United States Patent Application Publication US 2023/0026259 A1 - sequence listing, part 18

SEQ ID NO: 82852 - protein, 190 aa, Homo sapiens
  Payload ID: 16493
  Gene Symbol: SPOPL
  Gene Name: speckle-type POZ protein-like
  ENSP ID: ENSP00000396006
MSREPTPPLPGDMSTGPIAESWCYTQVKVVKFSYMWTINNFSFCREEMGEVLKSSTFSSGPSDKMKWCLRVNPKGLDDESKDYLSLYLLLVSCPKSEVRAKFKFSLLNAKREETKAMESQRAYRFVQGKDWGFKKFIRRDFLLDEANGLLPDDKLTLFCENLQHCLQKRRKHCTTLPKELPPPPPLQVVL

SEQ ID NO: 82853 - protein, 72 aa, Homo sapiens
  Payload ID: 16493
  Gene Symbol: SPOPL
  Gene Name: speckle-type POZ protein-like
  ENSP ID: ENSP00000410201
MSREPTPPLPGDMSTGPIAESWCYTQVKVVKFSYMWTINNFSFCREEMGEVLKSSTFSSGPSDKMKCQLPQK

SEQ ID NO: 82854 - protein, 8392 aa, Homo sapiens
  Payload ID: 16494
  Gene Symbol: SYNE1
  Gene Name: spectrin repeat containing, nuclear envelope 1
  ENSP ID: ENSP00000341887
MQRLQDEQEIVQKRTFTKWINSHLAKRKPPMVVDDLFEDMKDGVKLLALLEVLSGQKLPCEQGRRMKRIHAVANIGTALKFLEGRKIKLVNINSTDIADGRPSIVLGLMWTIILYFQIEELTSNLPQLQSLSSSASSVDSIVSSETPSPPSKRKVTTKIQGNAKKALLKWVQYTAGKQTGIEVKDFGKSWRSGVAFHSVIHAIRPELVDLETVKGRSNRENLEDAFTIAETELGIPRLLDPEDVDVDKPDEKSIMTYVAQFLKHYPDIHNASTDGQEDDEILPGFPSFANSVQNFKREDRVIFKEMKVWIEQFERDLTRAQMVESNLQDKYQSFKHFRVQYEMKRKQIEHLIQPLHRDGKLSLDQALVKQSWDRVTSRLFDWHIQLDKSLPAPLGTIGAWLYRAEVALREEITVQQVHEETANTIQRKLEQHKRKCQTIMDLLQNTDAHKRAFHEIYRTRSVNGIPVPPDQLEDMAERFHFVSSTSELHLMKMEFLELKYRLLSLLVLAESKLKSWIIKYGRRESVEQLLQNYVSFIENSKFFEQYEVTYQILKQTAEMYVKADGSVEEAENVMKFMNETTAQWRNLSVEVRSVRSMLEEVISNWDRYGNTVASLQAWLEDAEKMLNQSENAKKDFFRNLPHWIQQHTAMNDAGNFLIETCDEMVSRDLKQQLLLLNGRWRELFMEVKQYAQADEMDRMKKEYTDCVVTLSAFATEAHKKLSEPLEVSFMNVKLLIQDLEDIEQRVPVMDAQYKIITKTAHLITKESPQEEGKEMFATMSKLKEQLTKVKECYSPLLYESQQLLIPLEELEKQMTSFYDSLGKINEIITVLEREAQSSALFKQKHQLRILKCKWCNSSQKMTLCLVLGSMISMLSTAKITIAGYKSEVEVSELLACQENCKKTLTLIEKGSQSVQKFVTLSNVLKHFDQTRLQTDCRYSCCFSVMRKQHHIMIVFHIKSMVKKTGDWKKHVETNSRLMKKFEESRAELEKVLRIAQEGLEEKGDPEELLRRHTEFFSQLDQRVLNAFLKACDELTDILPEQEQQGLQEAVRKLHKQWKDLQGEAPYHLLHLKIDVEKNRFLASVEECRTELDRETKLMPQEGSEKIIKEHRVFFSDKGPHHLCEKRLQLIEELCVKLPVRDPVRDTPGTCHVTLKELRAAIDSTYRKLMEDPDKWKDYTSRFSEFSSWISTNETQLKGIKGEAIDTANHGEVKRAVEEIRNGVTKRGETLSWLKSRLKVLTEVSSENEAQKQGDELAKLSSSFKALVTLLSEVEKMLSNFGDCVQYKEIVKNSLEELISGSKEVQEQAEKILDTENLFEAQQLLLHHQQKTKRISAKKRDVQQQIAQAQQGEGGLPDRGHEELRKLESTLDGLERSRERQERRIQVTLRKWERFETNKETVVRYLFQTGSSHERFLSFSSLESLSSELEQTKEFSKRTESIAVQAENLVKEASEIPLGPQNKQLLQQQAKSIKEQVKKLEDTLEEEYVIDNKTMEMVKTKWDHFGSNFETLSVWITEKEKELNALETSSSAMDMQISQIKVTIQEIESKLSSIVGLEEEAQSFAQFVTTGESARIKAKLTQIRRYGEELREHAQCLEGTILGHLSQQQKFEENLRKIQQSVSEFEDKLAVPIKICSSATETYKVLQEHMDLCQALESLSSAITAFSASARKVVNRDSCVQEAAALQQQYEDILRRAKERQTALENLLAHWQRLEKELSSFLTWLERGEAKASSPEMDISADRVKVEASKDDVKMMKLHLEQLDERWRDLPQIINKRINFLQSVVAEHQQFDELLLSFSVWIKLFLSELQTTSEISIMDHQVALTRHKDHAAEVESKKGELQSLQGHLAKLGSLGRAEDLHLLQGKAEDCFQLFEEASQVVERRQLALSHLAEFLQSHASLSGILRQLRQTVEATNSMNKNESDLIEKDLNDALQNAKALESAAVSLDGILSKAQYHLKIGSSEQRTSCRATADQLCGEVERIQNLLGTKQSEADALAVLKKAFQDQKEELLKSIEDIEERTDKERLKEPTRQALQQRLRVFNQLEDELNSHEHELCWLKDKAKQIAQKDVAFAPEVDREINRLEVTWDDTKRLIHENQGQCCGLIDLMREYQNLKSAVSKVLENASSVIVTRTTIKDQEDLKWAFSKHETAKNKMNYKQKDLDNFTSKGKHLLSELKKIHSSDFSLVKTDMESTVDKWLDVSEKLEENMDRLRVSLSIWDDVLSTRDEIEGWSNNCVPQMAENISNLDNHLRAEELLKEFESEVKNKALRLEELHSKVNDLKELTKNLETPPDLQFIEADLMQKLEHAKEITEVAKGTLKDFTAQSTQVEKFINDITTWFTKVEESLMNCAQNETCEALKKVKDIQKELQSQQSNISSTQENLNSLCRKYHSAELESLGRAMTGLIKKHEAVSQLCSKTQASLQESLEKHFSEESMQEFQEWFLGAKAAAKESSDRTGDSKVLEAKLHDLQQNILDSVSDGQSKLDAVTQEGQTLYAHLSKQIVSSIQEQITKANEEFQAFLKQCLKDKQALQDCASELGSFEDQHRKLNLWIHEMEERFNTENLGESKQHIPEKKNEVHKVEMFLGELLAARESLDKLSQRGQLLSEEGHGAGQEGRLCSQLLTSHQNLLRMTKEKLRSCQVALQEHEALEEALQSMWFWVKAIQDRLACAESTLGSKDTLEKRLSQIQDILLMKGEGEVKLNMAIGKGEQALRSSNKEGQRVIQTQLETLKEVWADIMSSSVHAQSTLESVISQWNDYVERKNQLEQWMESVDQKIEHPLQPQPGLKEKFVLLDHLQSILSEAEDHTRALHRLIAKSRELYEKTEDESFKDTAQEELKTQFNDIMTVAKEKMRKVEEIVKDHLMYLDAVHEFTDWLHSAKEELHRWSDMSGDSSATQKKLSKIKELIDSREIGASRLSRVESLAPEVKQNTTASGCELMHTEMQALRADWKQWEDSVFQTQSCLENLVSQMALSEQEFSGQVAQLEQALEQFSALLKTWAQQLTLLEGKNTDEEIVECWHKGQEILDALQKAEPRTEDLKSQLNELCRFSRDLSTYSGKVSGLIKEYNCLCLQASKGCQNKEQILQQRFRKAFRDFQQWLVNAKITTAKCFDIPQNISEVSTSLQKIQEFLSESENGQHKLNMMLSKGELLSTLLTKEKAKGIQAKVTAAKEDWKNFHSNLHQKESALENLKIQMKDFEVSAEPIQDWLSKTEKMVHESSNRLYDLPAKRREQQKLQSVLEEIHCYEPQLNRLKEKAQQLWEGQAASKSFRHRVSQLSSQYLALSNLTKEKVSRLDRIVAEHNQFSLGIKELQDWMTDAIHMLDSYCHPTSDKSVLDSRTLKLEALLSVKQEKEIQMKMIVTRGESVLQNTSPEGIPTIQQQLQSVKDMWASLLSAGIRCKRVRLPCAYIALKLRVHQHAELRDKTTMLGKAKEAVTKSEKLVRLHQEYQRDLKAFEVWLGQEQEKLDQYSVLEGDAHTHETTLRDLQELQVHCAEGQALLNSVLHTREDVIPSGIPQAEDRALESLRQDWQAYQHRLSETRTQFNNVVNKLRLMEQKFQQVDEWLKTAEEKVSPRTRRQSNRATKEIQLHQMKKWHEEVTAYRDEVEEVGARAQEILDESHVNSRMGCQATQLTSRYQALLLQVLEQIKFLEEEIQSLEESESSLSSYSDWYGSTHKNFKNVATKIDKVDTVMMGKKLKTLEVLLKDMEKGHSLLKSAREKGERAVKYLEEGEAERLRKEIHDHMEQLKELTSTVRKEHMTLEKSLQQTVLSHEPSVKSVREKGEALLELVQDVTLKDKIDQLQSDYQDLCSIGKEHVFSLEAKVKDHEDYNSELQEVEKWLLQMSGRLVAPDLLETSSLETITQQLAHHKMYQSLEHELQKHVSRQDTLQQCQAWLSAVQPDLEPSPQPPLSRAEAIKQVKHFRALQEQARTYLDLLCSMCDLSNASVKTTAKDIQQTEQTIEQKLVQAQNLTQGWEEIKHLKSELWIYLQDADQQLQNMKRRHSELELNIAQNMVSQVKDFVKKLQSKQASVNTIIEKVNKLTKKEESPEHKEINHLNDQWLDLCRQSNNLCLQREEDLQRTRDYHDCMNVVEVFLEKFTTEWDNLARSDAESTAVHLEALKKLALALQERKYAIEDLKDQKQKMIEHLNLDDKELVKEQTSHLEQRWFQLEDLIKRKIQVSVTNLEELNVVQSRFQELMEWAEEQQPNIAEALKQSPPPDMAQNLLMDHLAICSELEAKQMLLKSLIKDADRVMADLGLNERQVIQKALSDAQSHVNCLSDLVGQRRKKHFKEDFDKACHWLKQADIVTFPEINLMNESSELHTQLAKYQNILEQSPEYENLLLTLQRTGQTILPSLNEVDHSYLSEKLNALPRQFNVIVALAKDKFYKVQEAILARKEYASLIELTTQSLSELEAQFLRMSKVPTDLAVEEALSLQDGCRAILDEVAGLGEAVDELNQKKEGFRSTGQPWQPDKMLHLVTLYHRLKRQTEQRVSLLEDTTSAYQEHEKMCQQLERQLKSVKEEQSKVNEETLPAEEKLKMYHSLAGSLQDSGIVLKRVTIHLEDLAPHLDPLAYEKARHQIQSWQGELKLLTSAIGETVTECESRMVQSIDFQTEMSRSLDWLRRVKAELSGPVYLDLNLQDIQEEIRKIQIHQEEVQSSLRIMNALSHKEKEKFTKAKELISADLEHSLAELSELDGDIQEALRTRQATLTEIYSQCQRYYQVFQAANDWLEDAQELLQLAGNGLDVESAEENLKSHMEFFSTEDQFHSNLEELHSLVATLDPLIKPTGKEDLEQKVASLELRSQRMSRDSGAQALVSVVNSFHEKIVALEEKASQLEKTGNDASKATLSRSMTTVWQRWTRLRAVAQDQEKILEDAVDEWTGFNNKVKKATEMIDQLQDKLPGSSAEKASKAELLTLLEYHDTFVLELEQQQSALGMLRQQTLSMLQDGAAPTPGEEPPLMQEITAMQDRCLKMVETQINSVKCWVQETKEYLGNPTIEIDAQLEELQILLTEATNHRQNIEKMAEEQKEKYLGLYTILPSELSLQLAEVALDLKIRDQIQDKIKEVEQSKATSQELSRQIQKLAKDLTTILTKLKAKTDNVVQAKTDQKAASHLEEYNEMLELILKWIEKAKVLAHGTIAWNSASQLREQYILHQTLLEESKEIDSELEAMTEKLQYLTSVYCTEKMSQQVAELGRETEELRQMIKIRLQNLQDAAKDMKKFEAELKKLQAALEQAQATLTSPEVGRLSLKEQLSHRQHLLSEMESLKPKVQAVQLCQSALRIPEDVVASLPLCHAALRLQEEASRLQHTAIQQCNIMQEAVVQYEQYEQEMKHLQQLIEGAHREIEDKPVATSNIQELQAQISRHEELAQKIKGYQEQIASLNSKCKMLTMKAKHATMLLTVTEVEGLAEGTEDLDGELLPTPSAHPSVVMMTAGRCHTLLSPVTEESGEEGTNSEISSPPACRSPSPVANTDASVNQDIAYYQALSAERLQTDAAKIHPSTSASQEFYEPGLEPSATAKLGDLQRSWETLKNVISEKQRTLYEALERQQKYQDSLQSISTKMEAIELKLSESPEPGRSPESQMAEHQALMDEILMLQDEINELQSSLAEELVSESCEADPAEQLALQSTLTVLAERMSTIRMKASGKRQLLEEKLNDQLEEQRQEQALQRYRCEADELDSWLLSTKATLDTALSPPKEPMDMEAQLMDCQNMLVEIEQKVVALSELSVHNENLLLEGKAHTKDEAEQLAGKLRRLKGSLLELQRALHDKQLNMQGTAQEKEESDVDLTATQSPGVQEWLAQARTTWTQQRQSSLQQQKELEQELAEQKSLLRSVASRGEEILIQHSAAETSGDAGEKPDVLSQELGMEGEKSSAEDQMRMKWESLHQEFSTKQKLLQNVLEQEQEQVLYSRPNRLLSGVPLYKGDVPTQDKSAVTSLLDGLNQAFEEVSSQSGGAKRQSIHLEQKLYDGVSATSTWLDDVEERLFVATALLPEETETCLFNQEILAKDIKEMSEEMDKNKNLFSQAFPENGDNRDVIEDTLGCLLGRLSLLDSVVNQRCHQMKERLQQILNFQNDLKVLFTSLADNKYIILQKLANVFEQPVAEQIEAIQQAEDGLKEFDAGIIELKRRGDKLQVEQPSMQELSKLQDMYDELMMIIGSRRSGLNQNLTLKSQYERALQDLADLLETGQEKMAGDQKIIVSSKEEIQQLLDKHKEYFQGLESHMILTETLFRKIISFAVQKETQFHTELMAQASAVLKRAHKRGVELEYILETWSHLDEDQQELSRQLEVVESSIPSVGLVEENEDRLIDRITLYQHLKSSLNEYQPKLYQVLDDGKRLLISISCSDLESQLNQLGECWLSNTNKMSKELHRLETILKHWTRYQSESADLIHWLQSAKDRLEFWTQQSVTVPQELEMVRDHLNAFLEFSKEVDAQSSLKSSVLSTGNQLLRLKKVDTATLRSELSRIDSQWTDLLTNIPAVQEKLHQLQMDKLPSRHAISEVMSWISLMENVIQKDEDNIKNSIGYKAIHEYLQKYKGFKIDINCKQLTVDFVNQSVLQISSQDVESKRSDKTDFAEQLGAMNKSWQILQGLVTEKIQLLEGLLESWSEYENNVQCLKTWFETQEKRLKQQHRIGDQASVQNALKDCQDLEDLIKAKEKEVEKIEQNGLALIQNKKEDVSSIVMSTLRELGQTWANLDHMVGQLKILLKSVLDQWSSHKVAFDKINSYLMEARYSLSRFRLLTGSLEAVQVQVDNLQNLQDDLEKQERSLQKFGSITNQLLKECHPPVTETLTNTLKEVNMRWNNLLEEIAEQLQSSKALLQLWQRYKDYSKQCASTVQQQEDRTNELLKAATNKDIADDEVATWIQDCNDLLKGLGTVKDSLFFLHELGEQLKQQVDASAASAIQSDQLSLSQHLCALEQALCKQQTSLQAGVLDYETFAKSLEALEAWIVEAEEILQGQDPSHSSDLSTIQERMEELKGQMLKFSSMAPDLDRLNELGYRLPLNDKEIKRMQNLNRHWSLISSQTTERFSKLQSFLLQHQTFLEKCETWMEFLVQTEQKLAVEISGNYQHLLEQQRAHELFQAEMFSRQQILHSIIIDGQRLLEQGQVDDRDEFNLKLTLLSNQWQGVIRRAQQRRGIIDSQIRQWQRYREMAEKLRKWLVEVSYLPMSGLGSVPIPLQQARTLFDEVQFKEKVFLRQQGSYILTVEAGKQLLLSADSGAEAALQAELAEIQEKWKSASMRLEEQKKKLAFLLKDWEKCEKGIADSLEKLRTFKKKLSQSLPDHHEELHAEQMRCKELENAVGSWTDDLTQLSLLKDTLSAYISADDISILNERVELLQRQWEELCHQLSLRRQQIGERLNEWAVFSEKNKELCEWLTQMESKVSQNGDILIEEMIEKLKKDYQEEIAIAQENKIQLQQMGERLAKASHESKASEIEYKLGKVNDRWQHLLDLIAARVKKLKETLVAVQQLDKNMSSLRTWLAHIESELAKPIVYDSCNSEEIQRKLNEQQELQRDIEKHSTGVASVLNLCEVLLHDCDACATDAECDSIQQATRNLDRRWRNICAMSMERRLKIEETWRLWQKFLDDYSRFEDWLKSSERTAAFPSSSGVIYTVAKEELKKFEAFQRQVHECLTQLELINKQYRRLARENRTDSACSLKQMVHEGNQRWDNLQKRVTSILRRLKHFIGQREEFETARDSILVWLTEMDLQLTNIEHFSECDVQAKIKQLKAFQQEISLNHNKIEQIIAQGEQLIEKSEPLDAAIIEEELDELRRYCQEVFGRVERYHKKLIRLPLPDDEHDLSDRELELEDSAALSDLHWHDRSADSLLSPQPSSNLSLSLAQPLRSERSGRDTPASVDSIPLEWDHDYDLSRDLESAMSRALPSEDEEGQDDKDFYLRGAVGLSGDHSALESQIRQLGKALDDSRFQIQQTENIIRSKTPTGPELDTSYKGYMKLLGECSSSIDSVKRLEHKLKEEEESLPGFVNLHSTETQTAGVIDRWELLQAQALSKELRMKQNLQKWQQFNSDLNSIWAWLGDTEEELEQLQRLELSTDIQTIELQIKKLKELQKAVDHRKAIILSINLCSPEFTQADSKESRDLQDRLSQMNGRWDRVCSLLEEWRGLLQDALMQCQGFHEMSHGLLLMLENIDRRKNEIVPIDSNLDAEILQDHHKQLMQIKHELLESQLRVASLQDMSCQLLVNAEGTDCLEAKEKVHVIGNRLKLLLKEVSRHIKELEKLLDVSSSQQDLSSWSSADELDTSGSVSPTSGRSTPNRQKTPRGKCSLSQPGPSVSSPHSRSTKGGSDSSLSEPGPGRSGRGFLFRVLRAALPLQLLLLLLIGLACLVPMSEEDYSCALSNNFARSFHPMLRYTNGPPPL

SEQ ID NO: 82855 - protein, 975 aa, Homo sapiens
  Payload ID: 16494
  Gene Symbol: SYNE1
  Gene Name: spectrin repeat containing, nuclear envelope 1
  ENSP ID: ENSP00000346701
MVVAEDLSALRMAEDSCVDADLPDCNCDVTRVKKLKETLVAVQQLDKNMSSLRTWLAHIESELAKPIVYDSCNSEEIQRKLNEQQELQRDIEKHSTGVASVLNLCEVLLHDCDACATDAECDSIQQATRNLDRRWRNICAMSMERRLKIEETWRLWQKFLDDYSRFEDWLKSSERTAAFPSSSGVIYTVAKEELKKFEAFQRQVHECLTQLELINKQYRRLARENRTDSACSLKQMVHEGNQRWDNLQKRVTSILRRLKHFIGQREEFETARDSILVWLTEMDLQLTNIEHFSECDVQAKIKQLKAFQQEISLNHNKIEQIIAQGEQLIEKSEPLDAAIIEEELDELRRYCQEVFGRVERYHKKLIRLPLPDDEHDLSDRELELEDSAALSDLHWHDRSADSLLSPQPSSNLSLSLAQPLRSERSGRDTPASVDSIPLEWDHDYDLSRDLESAMSRALPSEDEEGQDDKDFYLRGAVGLSDVMIPESPEAYVKLTENAIKNTSGDHSALESQIRQLGKALDDSRFQIQQTENIIRSKTPTGPELDTSYKGYMKLLGECSSSIDSVKRLEHKLKEEEESLPGFVNLHSTETQTAGVIDRWELLQAQALSKELRMKQNLQKWQQFNSDLNSIWAWLGDTEEELEQLQRLELSTDIQTIELQIKKLKELQKAVDHRKAIILSINLCSPEFTQADSKESRDLQDRLSQMNGRWDRVCSLLEEWRGLLQDALMQCQGFHEMSHGLLLMLENIDRRKNEIVPIDSNLDAEILQDHHKQLMQIKHELLESQLRVASLQDMSCQLLVNAEGTDCLEAKEKVHVIGNRLKLLLKEVSRHIKELEKLLDVSSSQQDLSSWSSADELDTSGSVSPTSGRSTPNRQKTPRGKCSLSQPGPSVSSPHSRSTKGGSDSSLSEPGPGRSGRGFLFRVLRAALPLQLLLLLLIGLACLVPMSEEDYSCALSNNFARSFHPMLRYTNGPPPL

SEQ ID NO: 82856 - protein, 1433 aa, Homo sapiens
  Payload ID: 16494
  Gene Symbol: SYNE1
  Gene Name: spectrin repeat containing, nuclear envelope 1
  ENSP ID: ENSP00000356217
MATSRGASRCPRDIANVMQRLQDEQEIVQKRTFTKWINSHLAKRKPPMVVDDLFEDMKDGVKLLALLEVLSGQKLPCEQGRRMKRIHAVANIGTALKFLEGRKSMHRGSPIKLVNINSTDIADGRPSIVLGLMWTIILYFQIEELTSNLPQLQSLSSSASSVDSIVSSETPSPPSKRKVTTKIQGNAKKALLKWVQYTAGKQTGIEVKDFGKSWRSGVAFHSVIHAIRPELVDLETVKGRSNRENLEDAFTIAETELGIPRLLDPEDVDVDKPDEKSIMTYVAQFLKHYPDIHNASTDGQEDDREDRVIFKEMKVWIEQFERDLTRAQMVESNLQDKYQSFKHFRVQYEMKRKQIEHLIQPLHRDGKLSLDQALVKQSWDRVTSRLFDWHIQLDKSLPAPLGTIGAWLYRAEVALREEITVQQVHEETANTIQRKLEQHKDLLQNTDAHKRAFHEIYRTRSVNGIPVPPDQLEDMAERFHFVSSTSELHLMKMEFLELKYRLLSLLVLAESKLKSWIIKYGRRESVEQLLQNYVSFIENSKFFEQYEVTYQILKQTAEMYVKADGSVEEAENVMKFMNETTAQWRNLSVEVRSVRSMLEEVISNWDRYGNTVASLQAWLEDAEKMLNQSENAKKDFFRNLPHWIQQHTAMNDAGNFLIETCDEMVSRDLKQQLLLLNGRWRELFMEVKQYAQADEMDRMKKEYTDCVVTLSAFATEAHKKLSEPLEVSFMNVKLLIQDLEDIEQRVPVMDAQYKIITKTAHLITKESPQEEGKEMFATMSKLKEQLTKVKECYSPLLYESQQLLIPLEELEKQMTSFYDSLGKINEIITVLEREAQSSALFKQKHQELLACQENCKKTLTLIEKGSQSVQKFVTLSNVLKHFDQTRLQRQIADIHVAFQSMVKKTGDWKKHVETNSRLMKKFEESRAELEKVLRIAQEGLEEKGDPEELLRRHTEFFSQLDQRVLNAFLKACDELTDILPEQEQQGLQEAVRKLHKQWKDLQGEAPYHLLHLKIDVEKNRFLASVEECRTELDRETKLMPQEGSEKIIKEHRVFFSDKGPHHLCEKRLQLIEELCVKLPVRDPVRDTPGTCHVTLKELRAAIDSTYRKLMEDPDKWKDYTSRFSEFSSWISTNETQLKGIKGEAIDTANHGEVKRAVEEIRNGVTKRGETLSWLKSRLKVLTEVSSENEAQKQGDELAKLSSSFKALVTLLSEVEKMLSNFGDCVQYKEIVKNSLEELISGSKEVQEQAEKILDTENLFEAQQLLLHHQQKTKRISAKKRDVQQQIAQAQQGEGGLPDRGHEELRKLESTLDGLERSRERQERRIQVTLRKWERFETNKETVVRYLFQTGSSHERFLSFSSLESLSSELEQTKEFSKRTESIAVQAENLVKEASEIPLGPQNKQLLQQQAKSIKEQVKKLEDTLEEEYVIDKS

SEQ ID NO: 82857 - protein, 1654 aa, Homo sapiens
  Payload ID: 16494
  Gene Symbol: SYNE1
  Gene Name: spectrin repeat containing, nuclear envelope 1
  ENSP ID: ENSP00000356220
EKIEQNGLALIQNKKEDVSSIVMSTLRELGQTWANLDHMVGQLKILLKSVLDQWSSHKVAFDKINSYLMEARYSLSRFRLLTGSLEAVQVQVDNLQNLQDDLEKQERSLQKFGSITNQLLKECHPPVTETLTNTLKEVNMRWNNLLEEIAEQLQSSKALLQLWQRYKDYSKQCASTVQQQEDRTNELLKAATNKDIADDEVATWIQDCNDLLKGLGTVKDSLFFLHELGEQLKQQVDASAASAIQSDQLSLSQHLCALEQALCKQQTSLQAGVLDYETFAKSLEALEAWIVEAEEILQGQDPSHSSDLSTIQERMEELKGQMLKFSSMAPDLDRLNELGYRLPLNDKEIKRMQNLNRHWSLISSQTTERFSKLQSFLLQHQTFLEKCETWMEFLVQTEQKLAVEISGNYQHLLEQQRAHELFQAEMFSRQQILHSIIIDGQRLLEQGQVDDRDEFNLKLTLLSNQWQGVIRRAQQRRGIIDSQIRQWQRYREMAEKLRKWLVEVSYLPMSGLGSVPIPLQQARTLFDEVQFKEKVFLRQQGSYILTVEAGKQLLLSADSGAEAALQAELAEIQEKWKSASMRLEEQKKKLAFLLKDWEKCEKGIADSLEKLRTFKKKLSQSLPDHHEELHAEQMRCKELENAVGSWTDDLTQLSLLKDTLSAYISADDISILNERVELLQRQWEELCHQLSLRRQQIGERLNEWAVFSEKNKELCEWLTQMESKVSQNGDILIEEMIEKLKKDYQEEIAIAQENKIQLQQMGERLAKASHESKASEIEYKLGKVNDRWQHLLDLIAARVKKLKETLVAVQQLDKNMSSLRTWLAHIESELAKPIVYDSCNSEEIQRKLNEQQELQRDIEKHSTGVASVLNLCEVLLHDCDACATDAECDSIQQATRNLDRRWRNICAMSMERRLKIEETWRLWQKFLDDYSRFEDWLKSSERTAAFPSSSGVIYTVAKEELKKFEAFQRQVHECLTQLELINKQYRRLARENRTDSACSLKQMVHEGNQRWDNLQKRVTSILRRLKHFIGQREEFETARDSILVWLTEMDLQLTNIEHFSECDVQAKIKQLKAFQQEISLNHNKIEQIIAQGEQLIEKSEPLDAAIIEEELDELRRYCQEVFGRVERYHKKLIRLPLPDDEHDLSDRELELEDSAALSDLHWHDRSADSLLSPQPSSNLSLSLAQPLRSERSGRDTPASVDSIPLEWDHDYDLSRDLESAMSRALPSEDEEGQDDKDFYLRGAVGLSDVMIPESPEAYVKLTENAIKNTSGDHSALESQIRQLGKALDDSRFQIQQTENIIRSKTPTGPELDTSYKGYMKLLGECSSSIDSVKRLEHKLKEEEESLPGFVNLHSTETQTAGVIDRWELLQAQALSKELRMKQNLQKWQQFNSDLNSIWAWLGDTEEELEQLQRLELSTDIQTIELQIKKLKELQKAVDHRKAIILSINLCSPEFTQADSKESRDLQDRLSQMNGRWDRVCSLLEEWRGLLQDALMQCQGFHEMSHGLLLMLENIDRRKNEIVPIDSNLDAEILQDHHKQLMQIKHELLESQLRVASLQDMSCQLLVNAEGTDCLEAKEKVHVIGNRLKLLLKEVSRHIKELEKLLDVSSSQQDLSSWSSADELDTSGSVSPTSGRSTPNRQKTVHKRWLRFLPF

SEQ ID NO: 82858 - protein, 1725 aa, Homo sapiens
  Payload ID: 16494
  Gene Symbol: SYNE1
  Gene Name: spectrin repeat containing, nuclear envelope 1
  Uniprot ID: Q8NF91
  ENSP ID: ENSP00000356222
MATSRGASRCPRDIANVMQRLQDEQEIVQKRTFTKWINSHLAKRKPPMVVDDLFEDMKDGVKLLALLEVLSGQKLPCEQGRRMKRIHAVANIGTALKFLEGRKIKLVNINSTDIADGRPSIVLGLMWTIILYFQIEELTSNLPQLQSLSSSASSVDSIVSSETPSPPSKRKVTTKIQGNAKKALLKWVQYTAGKQTGIEVKDFGKSWRSGVAFHSVIHAIRPELVDLETVKGRSNRENLEDAFTIAETELGIPRLLDPEDVDVDKPDEKSIMTYVAQFLKHYPDIHNASTDGQEDDEILPGFPSFANSVQNFKREDRVIFKEMKVWIEQFERDLTRAQMVESNLQDKYQSFKHFRVQYEMKRKQIEHLIQPLHRDGKLSLDQALVKQSWDRVTSRLFDWHIQLDKSLPAPLGTIGAWLYRAEVALREEITVQQVHEETANTIQRKLEQHKDLLQNTDAHKRAFHEIYRTRSVNGIPVPPDQLEDMAERFHFVSSTSELHLMKMEFLELKYRLLSLLVLAESKLKSWIIKYGRRESVEQLLQNYVSFIENSKFFEQYEVTYQILKQTAEMYVKADGSVEEAENVMKFMNETTAQWRNLSVEVRSVRSMLEEVISNWDRYGNTVASLQAWLEDAEKMLNQSENAKKDFFRNLPHWIQQHTAMNDAGNFLIETCDEMVSRDLKQQLLLLNGRWRELFMEVKQYAQADEMDRMKKEYTDCVVTLSAFATEAHKKLSEPLEVSFMNVKLLIQDLEDIEQRVPVMDAQYKIITKTAHLITKESPQEEGKEMFATMSKLKEQLTKVKECYSPLLYESQQLLIPLEELEKQMTSFYDSLGKINEIITVLEREAQSSALFKQKHQELLACQENCKKTLTLIEKGSQSVQKFVTLSNVLKHFDQTRLQRQIADIHVAFQSMVKKTGDWKKHVETNSRLMKKFEESRAELEKVLRIAQEGLEEKGDPEELLRRHTEFFSQLDQRVLNAFLKACDELTDILPEQEQQGLQEAVRKLHKQWKDLQGEAPYHLLHLKIDVEKNRFLASVEECRTELDRETKLMPQEGSEKIIKEHRVFFSDKGPHHLCEKRLQLIEELCVKLPVRDPVRDTPGTCHVTLKELRAAIDSTYRKLMEDPDKWKDYTSRFSEFSSWISTNETQLKGIKGEAIDTANHGEVKRAVEEIRNGVTKRGETLSWLKSRLKVLTEVSSENEAQKQGDELAKLSSSFKALVTLLSEVEKMLSNFGDCVQYKEIVKNSLEELISGSKEVQEQAEKILDTENLFEAQQLLLHHQQKTKRISAKKRDVQQQIAQAQQGEGGLPDRGHEELRKLESTLDGLERSRERQERRIQVTLRKWERFETNKETVVRYLFQTGSSHERFLSFSSLESLSSELEQTKEFSKRTESIAVQAENLVKEASEIPLGPQNKQLLQQQAKSIKEQVKKLEDTLEEDIKTMEMVKTKWDHFGSNFETLSVWITEKEKELNALETSSSAMDMQISQIKVTIQEIESKLSSIVGLEEEAQSFAQFVTTGESARIKAKLTQIRRYGEELREHAQCLEGTILGHLSQQQKFEENLRKIQQSVSEFEDKLAVPIKICSSATETYKVLQEHMDLCQALESLSSAITAFSASARKVVNRDSCVQEAAALQQQYEDILRRAKERQTALENLLAHWQRLEKELSSFLTWLERGEAKASSPEMDISADRVKVEGELQLIQASSRKCEEGKNKMLFVTVTLFKIIK

SEQ ID NO: 82859 - protein, 8797 aa, Homo sapiens
  Payload ID: 16494
  Gene Symbol: SYNE1
  Gene Name: spectrin repeat containing, nuclear envelope 1
  Uniprot ID: Q8NF91
  ENSP ID: ENSP00000356224
MATSRGASRCPRDIANVMQRLQDEQEIVQKRTFTKWINSHLAKRKPPMVVDDLFEDMKDGVKLLALLEVLSGQKLPCEQGRRMKRIHAVANIGTALKFLEGRKIKLVNINSTDIADGRPSIVLGLMWTIILYFQIEELTSNLPQLQSLSSSASSVDSIVSSETPSPPSKRKVTTKIQGNAKKALLKWVQYTAGKQTGIEVKDFGKSWRSGVAFHSVIHAIRPELVDLETVKGRSNRENLEDAFTIAETELGIPRLLDPEDVDVDKPDEKSIMTYVAQFLKHYPDIHNASTDGQEDDEILPGFPSFANSVQNFKREDRVIFKEMKVWIEQFERDLTRAQMVESNLQDKYQSFKHFRVQYEMKRKQIEHLIQPLHRDGKLSLDQALVKQSWDRVTSRLFDWHIQLDKSLPAPLGTIGAWLYRAEVALREEITVQQVHEETANTIQRKLEQHKDLLQNTDAHKRAFHEIYRTRSVNGIPVPPDQLEDMAERFHFVSSTSELHLMKMEFLELKYRLLSLLVLAESKLKSWIIKYGRRESVEQLLQNYVSFIENSKFFEQYEVTYQILKQTAEMYVKADGSVEEAENVMKFMNETTAQWRNLSVEVRSVRSMLEEVISNWDRYGNTVASLQAWLEDAEKMLNQSENAKKDFFRNLPHWIQQHTAMNDAGNFLIETCDEMVSRDLKQQLLLLNGRWRELFMEVKQYAQADEMDRMKKEYTDCVVTLSAFATEAHKKLSEPLEVSFMNVKLLIQDLEDIEQRVPVMDAQYKIITKTAHLITKESPQEEGKEMFATMSKLKEQLTKVKECYSPLLYESQQLLIPLEELEKQMTSFYDSLGKINEIITVLEREAQSSALFKQKHQELLACQENCKKTLTLIEKGSQSVQKFVTLSNVLKHFDQTRLQRQIADIHVAFQSMVKKTGDWKKHVETNSRLMKKFEESRAELEKVLRIAQEGLEEKGDPEELLRRHTEFFSQLDQRVLNAFLKACDELTDILPEQEQQGLQEAVRKLHKQWKDLQGEAPYHLLHLKIDVEKNRFLASVEECRTELDRETKLMPQEGSEKIIKEHRVFFSDKGPHHLCEKRLQLIEELCVKLPVRDPVRDTPGTCHVTLKELRAAIDSTYRKLMEDPDKWKDYTSRFSEFSSWISTNETQLKGIKGEAIDTANHGEVKRAVEEIRNGVTKRGETLSWLKSRLKVLTEVSSENEAQKQGDELAKLSSSFKALVTLLSEVEKMLSNFGDCVQYKEIVKNSLEELISGSKEVQEQAEKILDTENLFEAQQLLLHHQQKTKRISAKKRDVQQQIAQAQQGEGGLPDRGHEELRKLESTLDGLERSRERQERRIQVTLRKWERFETNKETVVRYLFQTGSSHERFLSFSSLESLSSELEQTKEFSKRTESIAVQAENLVKEASEIPLGPQNKQLLQQQAKSIKEQVKKLEDTLEEDIKTMEMVKTKWDHFGSNFETLSVWITEKEKELNALETSSSAMDMQISQIKVTIQEIESKLSSIVGLEEEAQSFAQFVTTGESARIKAKLTQIRRYGEELREHAQCLEGTILGHLSQQQKFEENLRKIQQSVSEFEDKLAVPIKICSSATETYKVLQEHMDLCQALESLSSAITAFSASARKVVNRDSCVQEAAALQQQYEDILRRAKERQTALENLLAHWQRLEKELSSFLTWLERGEAKASSPEMDISADRVKVEGELQLIQALQNEVVSQASFYSKLLQLKESLFSVASKDDVKMMKLHLEQLDERWRDLPQIINKRINFLQSVVAEHQQFDELLLSFSVWIKLFLSELQTTSEISIMDHQVALTRHKDHAAEVESKKGELQSLQGHLAKLGSLGRAEDLHLLQGKAEDCFQLFEEASQVVERRQLALSHLAEFLQSHASLSGILRQLRQTVEATNSMNKNESDLIEKDLNDALQNAKALESAAVSLDGILSKAQYHLKIGSSEQRTSCRATADQLCGEVERIQNLLGTKQSEADALAVLKKAFQDQKEELLKSIEDIEERTDKERLKEPTRQALQQRLRVFNQLEDELNSHEHELCWLKDKAKQIAQKDVAFAPEVDREINRLEVTWDDTKRLIHENQGQCCGLIDLMREYQNLKSAVSKVLENASSVIVTRTTIKDQEDLKWAFSKHETAKNKMNYKQKDLDNFTSKGKHLLSELKKIHSSDFSLVKTDMESTVDKWLDVSEKLEENMDRLRVSLSIWDDVLSTRDEIEGWSNNCVPQMAENISNLDNHLRAEELLKEFESEVKNKALRLEELHSKVNDLKELTKNLETPPDLQFIEADLMQKLEHAKEITEVAKGTLKDFTAQSTQVEKFINDITTWFTKVEESLMNCAQNETCEALKKVKDIQKELQSQQSNISSTQENLNSLCRKYHSAELESLGRAMTGLIKKHEAVSQLCSKTQASLQESLEKHFSESMQEFQEWFLGAKAAAKESSDRTGDSKVLEAKLHDLQNILDSVSDGQSKLDAVTQEGQTLYAHLSKQIVSSIQEQITKANEEFQAFLKQCLKDKQALQDCASELGSFEDQHRKLNLWIHEMEERFNTENLGESKQHIPEKKNEVHKVEMFLGELLAARESLDKLSQRGQLLSEEGHGAGQEGRLCSQLLTSHQNLLRMTKEKLRSCQVALQEHEALEEALQSMWFWVKAIQDRLACAESTLGSKDTLEKRLSQIQDILLMKGEGEVKLNMAIGKGEQALRSSNKEGQRVIQTQLETLKEVWADIMSSSVHAQSTLESVISQWNDYVERKNQLEQWMESVDQKIEHPLQPQPGLKEKFVLLDHLQSILSEAEDHTRALHRLIAKSRELYEKTEDESFKDTAQEELKTQFNDIMTVAKEKMRKVEEIVKDHLMYLDAVHEFTDWLHSAKEELHRWSDMSGDSSATQKKLSKIKELIDSREIGASRLSRVESLAPEVKQNTTASGCELMHTEMQALRADWKQWEDSVFQTQSCLENLVSQMALSEQEFSGQVAQLEQALEQFSALLKTWAQQLTLLEGKNTDEEIVECWHKGQEILDALQKAEPRTEDLKSQLNELCRFSRDLSTYSGKVSGLIKEYNCLCLQASKGCQNKEQILQQRFRKAFRDFQQWLVNAKITTAKCFDIPQNISEVSTSLQKIQEFLSESENGQHKLNMMLSKGELLSTLLTKEKAKGIQAKVTAAKEDWKNFHSNLHQKESALENLKIQMKDFEVSAEPIQDWLSKTEKMVHESSNRLYDLPAKRREQQKLQSVLEEIHCYEPQLNRLKEKAQQLWEGQAASKSFRHRVSQLSSQYLALSNLTKEKVSRLDRIVAEHNQFSLGIKELQDWMTDAIHMLDSYCHPTSDKSVLDSRTLKLEALLSVKQEKEIQMKMIVTRGESVLQNTSPEGIPTIQQQLQSVKDMWASLLSAGIRCKSQLEGALSKWTSYQDGVRQFSGWMDSMEANLNESERQHAELRDKTTMLGKAKLLNEEVLSYSSLLETIEVKGAGMTEHYVTQLELQDLQERYRAIQERAKEAVTKSEKLVRLHQEYQRDLKAFEVWLGQEQEKLDQYSVLEGDAHTHETTLRDLQELQVHCAEGQALLNSVLHTREDVIPSGIPQAEDRALESLRQDWQAYQHRLSETRTQFNNVVNKLRLMEQKFQQVDEWLKTAEEKVSPRTRRQSNRATKEIQLHQMKKWHEEVTAYRDEVEEVGARAQEILDESHVNSRMGCQATQLTSRYQALLLQVLEQIKFLEEEIQSLEESESSLSSYSDWYGSTHKNFKNVATKIDKVDTVMMGKKLKTLEVLLKDMEKGHSLLKSAREKGERAVKYLEEGEAERLRKEIHDHMEQLKELTSTVRKEHMTLEKGLHLAKEFSDKCKALTQWIAEYQEILHVPEEPKMELYEKKAQLSKYKSLQQTVLSHEPSVKSVREKGEALLELVQDVTLKDKIDQLQSDYQDLCSIGKEHVFSLEAKVKDHEDYNSELQEVEKWLLQMSGRLVAPDLLETSSLETITQQLAHHKAMMEEIAGFEDRLNNLQMKGDTLIGQCADHLQAKLKQNVHAHLQGTKDSYSAICSTAQRMYQSLEHELQKHVSRQDTLQQCQAWLSAVQPDLEPSPQPPLSRAEAIKQVKHFRALQEQARTYLDLLCSMCDLSNASVKTTAKDIQQTEQTIEQKLVQAQNLTQGWEEIKHLKSELWIYLQDADQQLQNMKRRHSELELNIAQNMVSQVKDFVKKLQSKQASVNTIIEKVNKLTKKEESPEHKEINHLNDQWLDLCRQSNNLCLQREEDLQRTRDYHDCMNVVEVFLEKFTTEWDNLARSDAESTAVHLEALKKLALALQERKYAIEDLKDQKQKMIEHLNLDDKELVKEQTSHLEQRWFQLEDLIKRKIQVSVTNLEELNVVQSRFQELMEWAEEQQPNIAEALKQSPPPDMAQNLLMDHLAICSELEAKQMLLKSLIKDADRVMADLGLNERQVIQKALSDAQSHVNCLSDLVGQRRKYLNKALSEKTQFLMAVFQATSQIQQHERKIMFREHICLLPDDVSKQVKTCKSAQASLKTYQNEVTGLWAQGRELMKEVTEQEKSEVLGKLQELQSVYDSVLQKCSHRLQELEKNLVSRKHFKEDFDKACHWLKQADIVTFPEINLMNESSELHTQLAKYQNILEQSPEYENLLLTLQRTGQTILPSLNEVDHSYLSEKLNALPRQFNVIVALAKDKFYKVQEAILARKEYASLIELTTQSLSELEAQFLRMSKVPTDLAVEEALSLQDGCRAILDEVAGLGEAVDELNQKKEGFRSTGQPWQPDKMLHLVTLYHRLKRQTEQRVSLLEDTTSAYQEHEKMCQQLERQLKSVKEEQSKVNEETLPAEEKLKMYHSLAGSLQDSGIVLKRVTIHLEDLAPHLDPLAYEKARHQIQSWQGELKLLTSAIGETVTECESRMVQSIDFQTEMSRSLDWLRRVKAELSGPVYLDLNLQDIQEEIRKIQIHQEEVQSSLRIMNALSHKEKEKFTKAKELISADLEHSLAELSELDGDIQEALRTRQATLTEIYSQCQRYYQVFQAANDWLEDAQELLQLAGNGLDVESAEENLKSHMEFFSTEDQFHSNLEELHSLVATLDPLIKPTGKEDLEQKVASLELRSQRMSRDSGAQVDLLQRCTAQWHDYQKAREEVIELMNDTEKKLSEFSLLKTSSSHEAEEKLSEHKALVSVVNSFHEKIVALEEKASQLEKTGNDASKATLSRSMTTVWQRWTRLRAVAQDQEKILEDAVDEWTGFNNKVKKATEMIDQLQDKLPGSSAEKASKAELLTLLEYHDTFVLELEQQQSALGMLRQQTLSMLQDGAAPTPGEEPPLMQEITAMQDRCLNMQEKVKTNGKLVKQELKDREMVETQINSVKCWVQETKEYLGNPTIEIDAQLEELQILLTEATNHRQNIEKMAEEQKEKYLGLYTILPSELSLQLAEVALDLKIRDQIQDKIKEVEQSKATSQELSRQIQKLAKDLTTILTKLKAKTDNVVQAKTDQKVLGEELDGCNSKLMELDAAVQKFLEQNGQLGKPLAKKIGKLTELHQQTIRQAENRLSKLNQAASHLEEYNEMLELILKWIEKAKVLAHGTIAWNSASQLREQYILHQTLLEESKEIDSELEAMTEKLQYLTSVYCTEKMSQQVAELGRETEELRQMIKIRLQNLQDAAKDMKKFEAELKKLQAALEQAQATLTSPEVGRLSLKEQLSHRQHLLSEMESLKPKVQAVQLCQSALRIPEDVVASLPLCHAALRLQEEASRLQHTAIQQCNIMQEAVVQYEQYEQEMKHLQQLIEGAHREIEDKPVATSNIQELQAQISRHEELAQKIKGYQEQIASLNSKCKMLTMKAKHATMLLTVTEVEGLAEGTEDLDGELLPTPSAHPSVVMMTAGRCHTLLSPVTEESGEEGTNSEISSPPACRSPSPVANTDASVNQDIAYYQALSAERLQTDAAKIHPSTSASQEFYEPGLEPSATAKLGDLQRSWETLKNVISEKQRTLYEALERQQKYQDSLQSISTKMEAIELKLSESPEPGRSPESQMAEHQALMDEILMLQDEINELQSSLAEELVSESCEADPAEQLALQSTLTVLAERMSTIRMKASGKRQLLEEKLNDQLEEQRQEQALQRYRCEADELDSWLLSTKATLDTALSPPKEPMDMEAQLMDCQNMLVEIEQKVVALSELSVHNENLLLEGKAHTKDEAEQLAGKLRRLKGSLLELQRALHDKQLNMQGTAQEKEESDVDLTATQSPGVQEWLAQARTTWTQQRQSSLQQQKELEQELAEQKSLLRSVASRGEEILIQHSAAETSGDAGEKPDVLSQELGMEGEKSSAEDQMRMKWESLHQEFSTKQKLLQNVLEQEQEQVLYSRPNRLLSGVPLYKGDVPTQDKSAVTSLLDGLNQAFEEVSSQSGGAKRQSIHLEQKLYDGVSATSTWLDDVEERLFVATALLPEETETCLFNQEILAKDIKEMSEEMDKNKNLFSQAFPENGDNRDVIEDTLGCLLGRLSLLDSVVNQRCHQMKERLQQILNFQNDLKVLFTSLADNKYIILQKLANVFEQPVAEQIEAIQQAEDGLKEFDAGIIELKRRGDKLQVEQPSMQELSKLQDMYDELMMIIGSRRSGLNQNLTLKSQYERALQDLADLLETGQEKMAGDQKIIVSSKEEIQQLLDKHKEYFQGLESHMILTETLFRKIISFAVQKETQFHTELMAQASAVLKRAHKRGVELEYILETWSHLDEDQQELSRQLEVVESSIPSVGLVEENEDRLIDRITLYQHLKSSLNEYQPKLYQVLDDGKRLLISISCSDLESQLNQLGECWLSNTNKMSKELHRLETILKHWTRYQSESADLIHWLQSAKDRLEFWTQQSVTVPQELEMVRDHLNAFLEFSKEVDAQSSLKSSVLSTGNQLLRLKKVDTATLRSELSRIDSQWTDLLTNIPAVQEKLHQLQMDKLPSRHAISEVMSWISLMENVIQKDEDNIKNSIGYKAIHEYLQKYKGFKIDINCKQLTVDFVNQSVLQISSQDVESKRSDKTDFAEQLGAMNKSWQILQGLVTEKIQLLEGLLESWSEYENNVQCLKTWFETQEKRLKQQHRIGDQASVQNALKDCQDLEDLIKAKEKEVEKIEQNGLALIQNKKEDVSSIVMSTLRELGQTWANLDHMVGQLKILLKSVLDQWSSHKVAFDKINSYLMEARYSLSRFRLLTGSLEAVQVQVDNLQNLQDDLEKQERSLQKFGSITNQLLKECHPPVTETLTNTLKEVNMRWNNLLEEIAEQLQSSKALLQLWQRYKDYSKQCASTVQQQEDRTNELLKAATNKDIADDEVATWIQDCNDLLKGLGTVKDSLFFLHELGEQLKQQVDASAASAIQSDQLSLSQHLCALEQALCKQQTSLQAGVLDYETFAKSLEALEAWIVEAEEILQGQDPSHSSDLSTIQERMEELKGQMLKFSSMAPDLDRLNELGYRLPLNDKEIKRMQNLNRHWSLISSQTTERFSKLQSFLLQHQTFLEKCETWMEFLVQTEQKLAVEISGNYQHLLEQQRAHELFQAEMFSRQQILHSIIIDGQRLLEQGQVDDRDEFNLKLTLLSNQWQGVIRRAQQRRGIIDSQIRQWQRYREMAEKLRKWLVEVSYLPMSGLGSVPIPLQQARTLFDEVQFKEKVFLRQQGSYILTVEAGKQLLLSADSGAEAALQAELAEIQEKWKSASMRLEEQKKKLAFLLKDWEKCEKGIADSLEKLRTFKKKLSQSLPDHHEELHAEQMRCKELENAVGSWTDDLTQLSLLKDTLSAYISADDISILNERVELLQRQWEELCHQLSLRRQQIGERLNEWAVFSEKNKELCEWLTQMESKVSQNGDILIEEMIEKLKKDYQEEIAIAQENKIQLQQMGERLAKASHESKASEIEYKLGKVNDRWQHLLDLIAARVKKLKETLVAVQQLDKNMSSLRTWLAHIESELAKPIVYDSCNSEEIQRKLNEQQELQRDIEKHSTGVASVLNLCEVLLHDCDACATDAECDSIQQATRNLDRRWRNICAMSMERRLKIEETWRLWQKFLDDYSRFEDWLKSSERTAAFPSSSGVIYTVAKEELKKFEAFQRQVHECLTQLELINKQYRRLARENRTDSACSLKQMVHEGNQRWDNLQKRVTSILRRLKHFIGQREEFETARDSILVWLTEMDLQLTNIEHFSECDVQAKIKQLKAFQQEISLNHNKIEQIIAQGEQLIEKSEPLDAAIIEEELDELRRYCQEVFGRVERYHKKLIRLPLPDDEHDLSDRELELEDSAALSDLHWHDRSADSLLSPQPSSNLSLSLAQPLRSERSGRDTPASVDSIPLEWDHDYDLSRDLESAMSRALPSEDEEGQDDKDFYLRGAVGLSGDHSALESQIRQLGKALDDSRFQIQQTENIIRSKTPTGPELDTSYKGYMKLLGECSSSIDSVKRLEHKLKEEEESLPGFVNLHSTETQTAGVIDRWELLQAQALSKELRMKQNLQKWQQFNSDLNSIWAWLGDTEEELEQLQRLELSTDIQTIELQIKKLKELQKAVDHRKAIILSINLCSPEFTQADSKESRDLQDRLSQMNGRWDRVCSLLEEWRGLLQDALMQCQGFHEMSHGLLLMLENIDRRKNEIVPIDSNLDAEILQDHHKQLMQIKHELLESQLRVASLQDMSCQLLVNAEGTDCLEAKEKVHVIGNRLKLLLKEVSRHIKELEKLLDVSSSQQDLSSWSSADELDTSGSVSPTSGRSTPNRQKTPRGKCSLSQPGPSVSSPHSRSTKGGSDSSLSEPGPGRSGRGFLFRVLRAALPLQLLLLLLIGLACLVPMSEEDYSCALSNNFARSFHPMLRYTNGPPPL

SEQ ID NO: 82860 - protein, 1355 aa, Homo sapiens
  Payload ID: 16494
  Gene Symbol: SYNE1
  Gene Name: spectrin repeat containing, nuclear envelope 1
  ENSP ID: ENSP00000356226
ETFAKSLEALEAWIVEAEEILQGQDPSHSSDLSTIQERMEELKGQMLKFSSMAPDLDRLNELGYRLPLNDKEIKRMQNLNRHWSLISSQTTERFSKLQSFLLQHQTFLEKCETWMEFLVQTEQKLAVEISGNYQHLLEQQRAHELFQAEMFSRQQILHSIIIDGQRLLEQGQVDDRDEFNLKLTLLSNQWQGVIRRAQQRRGIIDSQIRQWQRYREMAEKLRKWLVEVSYLPMSGLGSVPIPLQQARTLFDEVQFKEKVFLRQQGSYILTVEAGKQLLLSADSGAEAALQAELAEIQEKWKSASMRLEEQKKKLAFLLKDWEKCEKGIADSLEKLRTFKKKLSQSLPDHHEELHAEQMRCKELENAVGSWTDDLTQLSLLKDTLSAYISADDISILNERVELLQRQWEELCHQLSLRRQQIGERLNEWAVFSEKNKELCEWLTQMESKVSQNGDILIEEMIEKLKKDYQEEIAIAQENKIQLQQMGERLAKASHESKASEIEYKLGKVNDRWQHLLDLIAARVKKLKETLVAVQQLDKNMSSLRTWLAHIESELAKPIVYDSCNSEEIQRKLNEQQELQRDIEKHSTGVASVLNLCEVLLHDCDACATDAECDSIQQATRNLDRRWRNICAMSMERRLKIEETWRLWQKFLDDYSRFEDWLKSSERTAAFPSSSGVIYTVAKEELKKFEAFQRQVHECLTQLELINKQYRRLARENRTDSACSLKQMVHEGNQRWDNLQKRVTSILRRLKHFIGQREEFETARDSILVWLTEMDLQLTNIEHFSECDVQAKIKQLKAFQQEISLNHNKIEQIIAQGEQLIEKSEPLDAAIIEEELDELRRYCQEVFGRVERYHKKLIRLPLPDDEHDLSDRELELEDSAALSDLHWHDRSADSLLSPQPSSNLSLSLAQPLRSERSGRDTPASVDSIPLEWDHDYDLSRDLESAMSRALPSEDEEGQDDKDFYLRGAVGLSGDHSALESQIRQLGKALDDSRFQIQQTENIIRSKTPTGPELDTSYKGYMKLLGECSSSIDSVKRLEHKLKEEEESLPGFVNLHSTETQTAGVIDRWELLQAQALSKELRMKQNLQKWQQFNSDLNSIWAWLGDTEEELEQLQRLELSTDIQTIELQIKKLKELQKAVDHRKAIILSINLCSPEFTQADSKESRDLQDRLSQMNGRWDRVCSLLEEWRGLLQDALMQCQGFHEMSHGLLLMLENIDRRKNEIVPIDSNLDAEILQDHHKQLMQIKHELLESQLRVASLQDMSCQLLVNAEGTDCLEAKEKVHVIGNRLKLLLKEVSRHIKELEKLLDVSSSQQDLSSWSSADELDTSGSVSPTSGRSTPNRQKTVHKRWLRFLPF

SEQ ID NO: 82861 - protein, 510 aa, Homo sapiens
  Payload ID: 16494
  Gene Symbol: SYNE1
  Gene Name: spectrin repeat containing, nuclear envelope 1
  ENSP ID: ENSP00000390858
ELIDSREIGASRLSRVESLAPEVKQNTTASGCELMHTEMQALRADWKQWEDSVFQTQSCLENLVSQMALSEQEFSGQVAQLEQALEQFSALLKTWAQQLTLLEGKNTDEEIVECWHKGQEILDALQKAEPRTEDLKSQLNELCRFSRDLSTYSGKVSGLIKEYNCLCLQASKGCQNKEQILQQRFRKAFRDFQQWLVNAKITTAKCFDIPQNISEVSTSLQKIQEFLSESENGQHKLNMMLSKGELLSTLLTKEKAKGIQAKVTAAKEDWKNFHSNLHQKESALENLKIQMKDFEVSAEPIQDWLSKTEKMVHESSNRLYDLPAKRREQQKLQSVLEEIHCYEPQLNRLKEKAQQLWEGQAASKSFRHRVSQLSSQYLALSNLTKEKVSRLDRIVAEHNQFSLGIKELQDWMTDAIHMLDSYCHPTSDKSVLDSRTLKLEVCIFTQKYLQPTEFVFLKISRLHPPGVMMSHSLHDKSQMLCECNAVCLGCTCQRIPESSDPGCFPKNKIK

SEQ ID NO: 82862 - protein, 380 aa, Homo sapiens
  Payload ID: 16494
  Gene Symbol: SYNE1
  Gene Name: spectrin repeat containing, nuclear envelope 1
  ENSP ID: ENSP00000390975
MQEKVKTNGKLVKQELKDREMVETQINSVKCWVQETKEYLGNPTIEIDAQLEELQILLTEATNHRQNIEKMAEEQKEKYLGLYTILPSELSLQLAEVALDLKIRDQTLEDLLGRMTWQVHGLFIFLRQSLALSPRLECSETISAYCNLLGLSSSRASASQVAGIPGMHHHTRLIFCIFSKKRQGFAMLASLVSNSWPQVSCLPQPPKVLGLQIQDKIKEVEQSKATSQELSRQIQKLAKDLTTILTKLKAKTDNVVQAKTDQKVLGEELDGCNSKLMELDAAVQKFLEQNGQLGKPLAKKIGKLTELHQQTIRQAENRLSKLNQAASHLEEYNEMLELILKWIEKAKVLAHGTIAWNSASQLREQYILHQVTLGKIIFKK

SEQ ID NO: 82863 - protein, 8749 aa, Homo sapiens
  Payload ID: 16494
  Gene Symbol: SYNE1
  Gene Name: spectrin repeat containing, nuclear envelope 1
  ENSP ID: ENSP00000396024
MATSRGASRCPRDIANVMQRLQDEQEIVQKRTFTKWINSHLAKRKPPMVVDDLFEDMKDGVKLLALLEVLSGQKLPCEQGRRMKRIHAVANIGTALKFLEGRKSMHRGSPIKLVNINSTDIADGRPSIVLGLMWTIILYFQIEELTSNLPQLQSLSSSASSVDSIVSSETPSPPSKRKVTTKIQGNAKKALLKWVQYTAGKQTGIEVKDFGKSWRSGVAFHSVIHAIRPELVDLETVKGRSNRENLEDAFTIAETELGIPRLLDPEDVDVDKPDEKSIMTYVAQFLKHYPDIHNASTDGQEDDEILPGFPSFANSVQNFKREDRVIFKEMKVWIEQFERDLTRAQMVESNLQDKYQSFKHFRVQYEMKRKQIEHLIQPLHRDGKLSLDQALVKQSWDRVTSRLFDWHIQLDKSLPAPLGTIGAWLYRAEVALREEITVQQVHEETANTIQRKLEQHKDLLQNTDAHKRAFHEIYRTRSVNGIPVPPDQLEDMAERFHFVSSTSELHLMKMEFLELKYRLLSLLVLAESKLKSWIIKYGRRESVEQLLQNYVSFIENSKFFEQYEVTYQILKQTAEMYVKADGSVEEAENVMKFMNETTAQWRNLSVEVRSVRSMLEEVISNWDRYGNTVASLQAWLEDAEKMLNQSENAKKDFFRNLPHWIQQHTAMNDAGNFLIETCDEMVSRDLKQQLLLLNGRWRELFMEVKQYAQADEMDRMKKEYTDCVVTLSAFATEAHKKLSEPLEVSFMNVKLLIQDLEDIEQRVPVMDAQYKIITKTAHLITKESPQEEGKEMFATMSKLKEQLTKVKECYSPLLYESQQLLIPLEELEKQMTSFYDSLGKINEIITVLEREAQSSALFKQKHQELLACQENCKKTLTLIEKGSQSVQKFVTLSNVLKHFDQTRLQRQIADIHVAFQSMVKKTGDWKKHVETNSRLMKKFEESRAELEKVLRIAQEGLEEKGDPEELLRRHTEFFSQLDQRVLNAFLKACDELTDILPEQEQQGLQEAVRKLHKQWKDLQGEAPYHLLHLKIDVEKNRFLASVEECRTELDRETKLMPQEGSEKIIKEHRVFFSDKGPHHLCEKRLQLIEELCVKLPVRDPVRDTPGTCHVTLKELRAAIDSTYRKLMEDPDKWKDYTSRFSEFSSWISTNETQLKGIKGEAIDTANHGEVKRAVEEIRNGVTKRGETLSWLKSRLKVLTEVSSENEAQKQGDELAKLSSSFKALVTLLSEVEKMLSNFGDCVQYKEIVKNSLEELISGSKEVQEQAEKILDTENLFEAQQLLLHHQQKTKRISAKKRDVQQQIAQAQQGEGGLPDRGHEELRKLESTLDGLERSRERQERRIQVTLRKWERFETNKETVVRYLFQTGSSHERFLSFSSLESLSSELEQTKEFSKRTESIAVQAENLVKEASEIPLGPQNKQLLQQQAKSIKEQVKKLEDTLEEDIKTMEMVKTKWDHFGSNFETLSVWITEKEKELNALETSSSAMDMQISQIKVTIQEIESKLSSIVGLEEEAQSFAQFVTTGESARIKAKLTQIRRYGEELREHAQCLEGTILGHLSQQQKFEENLRKIQQSVSEFEDKLAVPIKICSSATETYKVLQEHMDLCQALESLSSAITAFSASARKVVNRDSCVQEAAALQQQYEDILRRAKERQTALENLLAHWQRLEKELSSFLTWLERGEAKASSPEMDISADRVKVEGELQLIQALQNEVVSQASFYSKLLQLKESLFSVASKDDVKMMKLHLEQLDERWRDLPQIINKRINFLQSVVAEHQQFDELLLSFSVWIKLFLSELQTTSEISIMDHQVALTRHKDHAAEVESKKGELQSLQGHLAKLGSLGRAEDLHLLQGKAEDCFQLFEEASQVVERRQLALSHLAEFLQSHASLSGILRQLRQTVEATNSMNKNESDLIEKDLNDALQNAKALESAAVSLDGILSKAQYHLKIGSSEQRTSCRATADQLCGEVERIQNLLGTKQSEADALAVLKKAFQDQKEELLKSIEDIEERTDKERLKEPTRQALQQRLRVFNQLEDELNSHEHELCWLKDKAKQIAQKDVAFAPEVDREINRLEVTWDDTKRLIHENQGQCCGLIDLMREYQNLKSAVSKVLENASSVIVTRTTIKDQEDLKWAFSKHETAKNKMNYKQKDLDNFTSKGKHLLSELKKIHSSDFSLVKTDMESTVDKWLDVSEKLEENMDRLRVSLSIWDDVLSTRDEIEGWSNNCVPQMAENISNLDNHLRAEELLKEFESEVKNKALRLEELHSKVNDLKELTKNLETPPDLQFIEADLMQKLEHAKEITEVAKGTLKDFTAQSTQVEKFINDITTWFTKVEESLMNCAQNETCEALKKVKDIQKELQSQQSNISSTQENLNSLCRKYHSAELESLGRAMTGLIKKHEAVSQLCSKTQASLQESLEKHFSESMQEFQEWFLGAKAAAKESSDRTGDSKVLEAKLHDLQNILDSVSDGQSKLDAVTQEGQTLYAHLSKQIVSSIQEQITKANEEFQAFLKQCLKDKQALQDCASELGSFEDQHRKLNLWIHEMEERFNTENLGESKQHIPEKKNEVHKVEMFLGELLAARESLDKLSQRGQLLSEEGHGAGQEGRLCSQLLTSHQNLLRMTKEKLRSCQVALQEHEALEEALQSMWFWVKAIQDRLACAESTLGSKDTLEKRLSQIQDILLMKGEGEVKLNMAIGKGEQALRSSNKEGQRVIQTQLETLKEVWADIMSSSVHAQSTLESVISQWNDYVERKNQLEQWMESVDQKIEHPLQPQPGLKEKFVLLDHLQSILSEAEDHTRALHRLIAKSRELYEKTEDESFKDTAQEELKTQFNDIMTVAKEKMRKVEEIVKDHLMYLDAVHEFTDWLHSAKEELHRWSDMSGDSSATQKKLSKIKELIDSREIGASRLSRVESLAPEVKQNTTASGCELMHTEMQALRADWKQWEDSVFQTQSCLENLVSQMALSEQEFSGQVAQLEQALEQFSALLKTWAQQLTLLEGKNTDEEIVECWHKGQEILDALQKAEPRTEDLKSQLNELCRFSRDLSTYSGKVSGLIKEYNCLCLQASKGCQNKEQILQQRFRKAFRDFQQWLVNAKITTAKCFDIPQNISEVSTSLQKIQEFLSESENGQHKLNMMLSKGELLSTLLTKEKAKGIQAKVTAAKEDWKNFHSNLHQKESALENLKIQMKDFEVSAEPIQDWLSKTEKMVHESSNRLYDLPAKRREQQKLQSVLEEIHCYEPQLNRLKEKAQQLWEGQAASKSFRHRVSQLSSQYLALSNLTKEKVSRLDRIVAEHNQFSLGIKELQDWMTDAIHMLDSYCHPTSDKSVLDSRTLKLEALLSVKQEKEIQMKMIVTRGESVLQNTSPEGIPTIQQQLQSVKDMWASLLSAGIRCKSQLEGALSKWTSYQDGVRQFSGWMDSMEANLNESERQHAELRDKTTMLGKAKLLNEEVLSYSSLLETIEVKGAGMTEHYVTQLELQDLQERYRAIQERAKEAVTKSEKLVRLHQEYQRDLKAFEVWLGQEQEKLDQYSVLEGDAHTHETTLRDLQELQVHCAEGQALLNSVLHTREDVIPSGIPQAEDRALESLRQDWQAYQHRLSETRTQFNNVVNKLRLMEQKFQQVDEWLKTAEEKKWHEEVTAYRDEVEEVGARAQEILDESHVNSRMGCQATQLTSRYQALLLQVLEQIKFLEEEIQSLEESESSLSSYSDWYGSTHKNFKNVATKIDKVDTVMMGKKLKTLEVLLKDMEKGHSLLKSAREKGERAVKYLEEGEAERLRKEIHDHMEQLKELTSTVRKEHMTLEKGLHLAKEFSDKCKALTQWIAEYQEILHVPEEPKMELYEKKAQLSKYKSLQQTVLSHEPSVKSVREKGEALLELVQDVTLKDKIDQLQSDYQDLCSIGKAMMEEIAGFEDRLNNLQMKGDTLIGQCADHLQAKLKQNVHAHLQGTKDSYSAICSTAQRMYQSLEHELQKHVSRQDTLQQCQAWLSAVQPDLEPSPQPPLSRAEAIKQVKHFRALQEQARTYLDLLCSMCDLSNASVKTTAKDIQQTEQTIEQKLVQAQNLTQGWEEIKHLKSELWIYLQDADQQLQNMKRRHSELELNIAQNMVSQVKDFVKKLQSKQASVNTIIEKVNKLTKKEESPEHKEINHLNDQWLDLCRQSNNLCLQREEDLQRTRDYHDCMNVVEVFLEKFTTEWDNLARSDAESTAVHLEALKKLALALQERKYAIEDLKDQKQKMIEHLNLDDKELVKEQTSHLEQRWFQLEDLIKRKIQVSVTNLEELNVVQSRFQELMEWAEEQQPNIAEALKQSPPPDMAQNLLMDHLAICSELEAKQMLLKSLIKDADRVMADLGLNERQVIQKALSDAQSHVNCLSDLVGQRRKYLNKALSEKTQFLMAVFQATSQIQQHERKIMFREHICLLPDDVSKQVKTCKSAQASLKTYQNEVTGLWAQGRELMKEVTEQEKSEVLGKLQELQSVYDSVLQKCSHRLQELEKNLVSRKHFKEDFDKACHWLKQADIVTFPEINLMNESSELHTQLAKYQNILEQSPEYENLLLTLQRTGQTILPSLNEVDHSYLSEKLNALPRQFNVIVALAKDKFYKVQEAILARKEYASLIELTTQSLSELEAQFLRMSKVPTDLAVEEALSLQDGCRAILDEVAGLGEAVDELNQKKEGFRSTGQPWQPDKMLHLVTLYHRLKRQTEQRVSLLEDTTSAYQEHEKMCQQLERQLKSVKEEQSKVNEETLPAEEKLKMYHSLAGSLQDSGIVLKRVTIHLEDLAPHLDPLAYEKARHQIQSWQGELKLLTSAIGETVTECESRMVQSIDFQTEMSRSLDWLRRVKAELSGPVYLDLNLQDIQEEIRKIQIHQEEVQSSLRIMNALSHKEKEKFTKAKELISADLEHSLAELSELDGDIQEALRTRQATLTEIYSQCQRYYQVFQAANDWLEDAQELLQLAGNGLDVESAEENLKSHMEFFSTEDQFHSNLEELHSLVATLDPLIKPTGKEDLEQKVASLELRSQRMSRDSGAQVDLLQRCTAQWHDYQKAREEVIELMNDTEKKLSEFSLLKTSSSHEAEEKLSEHKALVSVVNSFHEKIVALEEKASQLEKTGNDASKATLSRSMTTVWQRWTRLRAVAQDQEKILEDAVDEWTGFNNKVKKATEMIDQLQDKLPGSSAEKASKAELLTLLEYHDTFVLELEQQQSALGMLRQQTLSMLQDGAAPTPGEEPPLMQEITAMQDRCLNMQEKVKTNGKLVKQELKDREMVETQINSVKCWVQETKEYLGNPTIEIDAQLEELQILLTEATNHRQNIEKMAEEQKEKYLGLYTILPSELSLQLAEVALDLKIRDQIQDKIKEVEQSKATSQELSRQIQKLAKDLTTILTKLKAKTDNVVQAKTDQKVLGEELDGCNSKLMELDAAVQKFLEQNGQLGKPLAKKIGKLTELHQQTIRQAENRLSKLNQAASHLEEYNEMLELILKWIEKAKVLAHGTIAWNSASQLREQYILHQTLLEESKEIDSELEAMTEKLQYLTSVYCTEKMSQQVAELGRETEELRQMIKIRLQNLQDAAKDMKKFEAELKKLQAALEQAQATLTSPEVGRLSLKEQLSHRQHLLSEMESLKPKVQAVQLCQSALRIPEDVVASLPLCHAALRLQEEASRLQHTAIQQCNIMQAAVVQYEQYEQEMKHLQQLIEGAHREIEDKPVATSNIQELQAQISRHEELAQKIKGYQEQIASLNSKCKMLTMKAKHATMLLTVTEVEGLAEGTEDLDGELLPTPSAHPSVVMMTAGRCHTLLSPVTEESGEEGTNSEISSPPACRSPSPVANTDASVNQDIAYYQALSAERLQTDAAKIHPSTSASQEFYEPGLEPSATAKLGDLQRSWETLKNVISEKQRTLYEALERQQKYQDSLQSISTKMEAIELKLSESPEPGRSPESQMAEHQALMDEILMLQDEINELQSSLAEELVSESCEADPAEQLALQSTLTVLAERMSTIRMKASGKRQLLEEKLNDQLEEQRQEQALQRYRCEADELDSWLLSTKATLDTALSPPKEPMDMEAQLMDCQNMLVEIEQKVVALSELSVHNENLLLEGKAHTKDEAEQLAGKLRRLKGSLLELQRALHDKQLNMQGTAQEKEESDVDLTATQSPGVQEWLAQARTTWTQQRQSSLQQQKELEQELAEQKSLLRSVASRGEEILIQHSAAETSGDAGEKPDVLSQELGMEGEKSSAEDQMRMKWESLHQEFSTKQKLLQNVLEQEQEQVLYSRPNRLLSGVPLYKGDVPTQDKSAVTSLLDGLNQAFEEVSSQSGGAKRQSIHLEQKLYDGVSATSTWLDDVEERLFVATALLPEETETCLFNQEILAKDIKEMSEEMDKNKNLFSQAFPENGDNRDVIEDTLGCLLGRLSLLDSVVNQRCHQMKERLQQILNFQNDLKVLFTSLADNKYIILQKLANVFEQPVAEQIEAIQQAEDGLKEFDAGIIELKRRGDKLQVEQPSMQELSKLQDMYDELMMIIGSRRSGLNQNLTLKSQYERALQDLADLLETGQEKMAGDQKIIVSSKEEIQQLLDKHKEYFQGLESHMILTETLFRKIISFAVQKETQFHTELMAQASAVLKRAHKRGVELEYILETWSHLDEDQQELSRQLEVVESSIPSVGLVEENEDRLIDRITLYQHLKSSLNEYQPKLYQVLDDGKRLLISISCSDLESQLNQLGECWLSNTNKMSKELHRLETILKHWTRYQSESADLIHWLQSAKDRLEFWTQQSVTVPQELEMVRDHLNAFLEFSKEVDAQSSLKSSVLSTGNQLLRLKKVDTATLRSELSRIDSQWTDLLTNIPAVQEKLHQLQMDKLPSRHAISEVMSWISLMENVIQKDEDNIKNSIGYKAIHEYLQKYKGFKIDINCKQLTVDFVNQSVLQISSQDVESKRSDKTDFAEQLGAMNKSWQILQGLVTEKIQLLEGLLESWSEYENNVQCLKTWFETQEKRLKQQHRIGDQASVQNALKDCQDLEDLIKAKEKEVEKIEQNGLALIQNKKEDVSSIVMSTLRELGQTWANLDHMVGQLKILLKSVLDQWSSHKVAFDKINSYLMEARYSLSRFRLLTGSLEAVQVQVDNLQNLQDDLEKQERSLQKFGSITNQLLKECHPPVTETLTNTLKEVNMRWNNLLEEIAEQLQSSKALLQLWQRYKDYSKQCASTVQQQEDRTNELLKAATNKDIADDEVATWIQDCNDLLKGLGTVKDSLFFLHELGEQLKQQVDASAASAIQSDQLSLSQHLCALEQALCKQQTSLQAGVLDYETFAKSLEALEAWIVEAEEILQGQDPSHSSDLSTIQERMEELKGQMLKFSSMAPDLDRLNELGYRLPLNDKEIKRMQNLNRHWSLISSQTTERFSKLQSFLLQHQTFLEKCETWMEFLVQTEQKLAVEISGNYQHLLEQQRAHELFQAEMFSRQQILHSIIIDGQRLLEQGQVDDRDEFNLKLTLLSNQWQGVIRRAQQRRGIIDSQIRQWQRYREMAEKLRKWLVEVSYLPMSGLGSVPIPLQQARTLFDEVQFKEKVFLRQQGSYILTVEAGKQLLLSADSGAEAALQAELAEIQEKWKSASMRLEEQKKKLAFLLKDWEKCEKGIADSLEKLRTFKKKLSQSLPDHHEELHAEQMRCKELENAVGSWTDDLTQLSLLKDTLSAYISADDISILNERVELLQRQWEELCHQLSLRRQQIGERLNEWAVFSEKNKELCEWLTQMESKVSQNGDILIEEMIEKLKKDYQEEIAIAQENKIQLQQMGERLAKASHESKASEIEYKLGKVNDRWQHLLDLIAARVKKLKETLVAVQQLDKNMSSLRTWLAHIESELAKPIVYDSCNSEEIQRKLNEQQELQRDIEKHSTGVASVLNLCEVLLHDCDACATDAECDSIQQATRNLDRRWRNICAMSMERRLKIEETWRLWQKFLDDYSRFEDWLKSSERTAAFPSSSGVIYTVAKEELKKFEAFQRQVHECLTQLELINKQYRRLARENRTDSACSLKQMVHEGNQRWDNLQKRVTSILRRLKHFIGQREEFETARDSILVWLTEMDLQLTNIEHFSECDVQAKIKQLKAFQQEISLNHNKIEQIIAQGEQLIEKSEPLDAAIIEEELDELRRYCQEVFGRVERYHKKLIRLPLPDDEHDLSDRELELEDSAALSDLHWHDRSADSLLSPQPSSNLSLSLAQPLRSERSGRDTPASVDSIPLEWDHDYDLSRDLESAMSRALPSEDEEGQDDKDFYLRGAVGLSDVMIPESPEAYVKLTENAIKNTSGDHSALESQIRQLGKALDDSRFQIQQTENIIRSKTPTGPELDTSYKGYMKLLGECSSSIDSVKRLEHKLKEEEESLPGFVNLHSTETQTAGVIDRWELLQAQALSKELRMKQNLQKWQQFNSDLNSIWAWLGDTEEELEQLQRLELSTDIQTIELQIKKLKELQKAVDHRKAIILSINLCSPEFTQADSKESRDLQDRLSQMNGRWDRVCSLLEEWRGLLQDALMQCQGFHEMSHGLLLMLENIDRRKNEIVPIDSNLDAEILQDHHKQLMQIKHELLESQLRVASLQDMSCQLLVNAEGTDCLEAKEKVHVIGNRLKLLLKEVSRHIKELEKLLDVSSSQQDLSSWSSADELDTSGSVSPTSGRSTPNRQKTPRGKCSLSQPGPSVSSPHSRSTKGGSDSSLSEPGPGRSGRGFLFRVLRAALPLQLLLLLLIGLACLVPMSEEDYSCALSNNFARSFHPMLRYTNGPPPL

SEQ ID NO: 82864 - protein, 1443 aa, Homo sapiens
  Payload ID: 16494
  Gene Symbol: SYNE1
  Gene Name: spectrin repeat containing, nuclear envelope 1
  Uniprot ID: Q8NF91
  ENSP ID: ENSP00000414510
MATSRGASRCPRDIANVMQRLQDEQEIVQKRTFTKWINSHLAKRKPPMVVDDLFEDMKDGVKLLALLEVLSGQKLPCEQGRRMKRIHAVANIGTALKFLEGRKIKLVNINSTDIADGRPSIVLGLMWTIILYFQIEELTSNLPQLQSLSSSASSVDSIVSSETPSPPSKRKVTTKIQGNAKKALLKWVQYTAGKQTGIEVKDFGKSWRSGVAFHSVIHAIRPELVDLETVKGRSNRENLEDAFTIAETELGIPRLLDPEDVDVDKPDEKSIMTYVAQFLKHYPDIHNASTDGQEDDEILPGFPSFANSVQNFKREDRVIFKEMKVWIEQFERDLTRAQMVESNLQDKYQSFKHFRVQYEMKRKQIEHLIQPLHRDGKLSLDQALVKQSWDRVTSRLFDWHIQLDKSLPAPLGTIGAWLYRAEVALREEITVQQVHEETANTIQRKLEQHKDLLQNTDAHKRAFHEIYRTRSVNGIPVPPDQLEDMAERFHFVSSTSELHLMKMEFLELKYRLLSLLVLAESKLKSWIIKYGRRESVEQLLQNYVSFIENSKFFEQYEVTYQILKQTAEMYVKADGSVEEAENVMKFMNETTAQWRNLSVEVRSVRSMLEEVISNWDRYGNTVASLQAWLEDAEKMLNQSENAKKDFFRNLPHWIQQHTAMNDAGNFLIETCDEMVSRDLKQQLLLLNGRWRELFMEVKQYAQADEMDRMKKEYTDCVVTLSAFATEAHKKLSEPLEVSFMNVKLLIQDLEDIEQRVPVMDAQYKIITKTAHLITKESPQEEGKEMFATMSKLKEQLTKVKECYSPLLYESQQLLIPLEELEKQMTSFYDSLGKINEIITVLEREAQSSALFKQKHQELLACQENCKKTLTLIEKGSQSVQKFVTLSNVLKHFDQTRLQRQIADIHVAFQSMVKKTGDWKKHVETNSRLMKKFEESRAELEKVLRIAQEGLEEKGDPEELLRRHTEFFSQLDQRVLNAFLKACDELTDILPEQEQQGLQEAVRKLHKQWKDLQGEAPYHLLHLKIDVEKNRFLASVEECRTELDRETKLMPQEGSEKIIKEHRVFFSDKGPHHLCEKRLQLIEELCVKLPVRDPVRDTPGTCHVTLKELRAAIDSTYRKLMEDPDKWKDYTSRFSEFSSWISTNETQLKGIKGEAIDTANHGEVKRAVEEIRNGVTKRGETLSWLKSRLKVLTEVSSENEAQKQGDELAKLSSSFKALVTLLSEVEKMLSNFGDCVQYKEIVKNSLEELISGSKEVQEQAEKILDTENLFEAQQLLLHHQQKTKRISAKKRDVQQQIAQAQQGEGGLPDRGHEELRKLESTLDGLERSRERQERRIQVTLRKWERFETNKETVVRYLFQTGSSHERFLSFSSLESLSSELEQTKEFSKRTESIAVQAENLVKEASEIPLGPQNKQLLQQQAKSIKEQVKKLEDTLEEEYVIDKS

SEQ ID NO: 82865 - protein, 242 aa, Homo sapiens
  Payload ID: 16494
  Gene Symbol: SYNE1
  Gene Name: spectrin repeat containing, nuclear envelope 1
  ENSP ID: ENSP00000437411
MFPQELAQKIKGYQEQIASLNSKCKMLTMKAKHATMLLTVTEVEGLAEGTEDLDGELLPTPSAHPSVVMDIAYYQALSAERLQTDAAKIHPSTSASQEFYEPGLEPSATAKLGDLQRSWETLKNVISEKQRTLYEALERQQKYQDSLQSISTKMEAIELKLSESPEPGRSPESQMAEHQALMDEILMLQDEINELQSSLAEELVSESCEADPAEQLALQSTLTVLAERMSTIRMKASGKRQL

SEQ ID NO: 82866 - protein, 612 aa, Homo sapiens
  Payload ID: 16494
  Gene Symbol: SYNE1
  Gene Name: spectrin repeat containing, nuclear envelope 1
  ENSP ID: ENSP00000438508
MQFQHSVLSTSTQLLFKDLLQNTDAHKRAFHEIYRTRSVNGIPVPPDQLEDMAERFHFVSSTSELHLMKMEFLELKYRLLSLLVLAESKLKSWIIKYGRRESVEQLLQNYVSFIENSKFFEQYEVTYQILKQTAEMYVKADGSVEEAENVMKFMNETTAQWRNLSVEVRSVRSMLEEVISNWDRYGNTVASLQAWLEDAEKMLNQSENAKKDFFRNLPHWIQQHTAMNDAGNFLIETCDEMVSRDLKQQLLLLNGRWRELFMEVKQYAQADEMDRMKKEYTDCVVTLSAFATEAHKKLSEPLEVSFMNVKLLIQDLEDIEQRVPVMDAQYKIITKTAHLITKESPQEEGKEMFATMSKLKEQLTKVKECYSPLLYESQQLLIPLEELEKQMTSFYDSLGKINEIITVLEREAQSSALFKQKHQELLACQENCKKTLTLIEKGSQSVQKFVTLSNVLKHFDQTRLQRQIADIHVAFQSMVKKTGDWKKHVETNSRLMKKFEESRAELEKVLRIAQEGLEEKGDPEELLRRHTEFFSQLDQRVLNAFLKACDELTDILPEQEQQGLQEAVRKLHKQWKVSQDRTETPCILNEGRSLSVLRSKCKRNLEIPGKSL

SEQ ID NO: 82867 - protein, 62 aa, Homo sapiens
  Payload ID: 16494
  Gene Symbol: SYNE1
  Gene Name: spectrin repeat containing, nuclear envelope 1
  ENSP ID: ENSP00000440193
  MOD_RES (1)..(1): Any amino acid
XFQHSVLSTSTQLLFKDLLQNTDAHKRAFHEIYRTRSVNGIPVPPDQLEDMAERVKAEVLDH

SEQ ID NO: 82868 - protein, 952 aa, Homo sapiens
  Payload ID: 16494
  Gene Symbol: SYNE1
  Gene Name: spectrin repeat containing, nuclear envelope 1
  ENSP ID: ENSP00000441052
MVVAEDLSALRMAEDSCVDADLPDCNCDVTRVKKLKETLVAVQQLDKNMSSLRTWLAHIESELAKPIVYDSCNSEEIQRKLNEQQELQRDIEKHSTGVASVLNLCEVLLHDCDACATDAECDSIQQATRNLDRRWRNICAMSMERRLKIEETWRLWQKFLDDYSRFEDWLKSSERTAAFPSSSGVIYTVAKEELKKFEAFQRQVHECLTQLELINKQYRRLARENRTDSACSLKQMVHEGNQRWDNLQKRVTSILRRLKHFIGQREEFETARDSILVWLTEMDLQLTNIEHFSECDVQAKIKQLKAFQQEISLNHNKIEQIIAQGEQLIEKSEPLDAAIIEEELDELRRYCQEVFGRVERYHKKLIRLPLPDDEHDLSDRELELEDSAALSDLHWHDRSADSLLSPQPSSNLSLSLAQPLRSERSGRDTPASVDSIPLEWDHDYDLSRDLESAMSRALPSEDEEGQDDKDFYLRGAVGLSGDHSALESQIRQLGKALDDSRFQIQQTENIIRSKTPTGPELDTSYKGYMKLLGECSSSIDSVKRLEHKLKEEEESLPGFVNLHSTETQTAGVIDRWELLQAQALSKELRMKQNLQKWQQFNSDLNSIWAWLGDTEEELEQLQRLELSTDIQTIELQIKKLKELQKAVDHRKAIILSINLCSPEFTQADSKESRDLQDRLSQMNGRWDRVCSLLEEWRGLLQDALMQCQGFHEMSHGLLLMLENIDRRKNEIVPIDSNLDAEILQDHHKQLMQIKHELLESQLRVASLQDMSCQLLVNAEGTDCLEAKEKVHVIGNRLKLLLKEVSRHIKELEKLLDVSSSQQDLSSWSSADELDTSGSVSPTSGRSTPNRQKTPRGKCSLSQPGPSVSSPHSRSTKGGSDSSLSEPGPGRSGRGFLFRVLRAALPLQLLLLLLIGLACLVPMSEEDYSCALSNNFARSFHPMLRYTNGPPPL

SEQ ID NO: 82869 - protein, 615 aa, Homo sapiens
  Payload ID: 16494
  Gene Symbol: SYNE1
  Gene Name: spectrin repeat containing, nuclear envelope 1
  ENSP ID: ENSP00000441264
MATSRGASRCPRDIANVMQRLQDEQEIVQKRTFTKWINSHLAKRKPPMVVDDLFEDMKDGVKLLALLEVLSGQKLPCEQGRRMKRIHAVANIGTALKFLEGRKIKLVNINSTDIADGRPSIVLGLMWTIILYFQIEELTSNLPQLQSLSSSASSVDSIVSSETPSPPSKRKVTTKIQGNAKKALLKWVQYTAGKQTGIEVKDFGKSWRSGVAFHSVIHAIRPELVDLETVKGRSNRENLEDAFTIAETELGIPRLLDPEDVDVDKPDEKSIMTYVAQFLKHYPDIHNASTDGQEDDREDRVIFKEMKVWIEQFERDLTRAQMVESNLQDKYQSFKHFRVQYEMKRKQIEHLIQPLHRDGKLSLDQALVKQSWDRVTSRLFDWHIQLDKSLPAPLGTIGAWLYRAEVALREEITVQQVHEETANTIQRKLEQHKDLLQNTDAHKRAFHEIYRTRSVNGIPVPPDQLEDMAERFHFVSSTSELHLMKMEFLELKYRLLSLLVLAESKLKSWIIKYGRRESVEQLLQNYVSFIENSKFFEQYEVTYQILKQTAEMYVKADGSVEEAENVMKFMNETTAQWRNLSVEVRSVRSMLEEVISNWDRYGNTVASLQAWLEDA

SEQ ID NO: 82870 - protein, 207 aa, Homo sapiens
  Payload ID: 16494
  Gene Symbol: SYNE1
  Gene Name: spectrin repeat containing, nuclear envelope 1
  ENSP ID: ENSP00000442805
  MOD_RES (1)..(1): Any amino acid
XKEKAKGIQAKVTAAKEDWKNFHSNLHQKESALENLKIQMKDFEVSAEPIQDWLSKTEKMVHESSNRLYDLPAKRREQQKLQEKVSRLDRIVAEHNQFSLGIKELQDWMTDAIHMLDSYCHPTSDKSVLDSRTLKLEVCIFTQKYLQPTEFVFLKISRLHPPGVMMSHSLHDKSQMLCECNAVCLGCTCQRIPESSDPGCFPKNKIK

SEQ ID NO: 82871 - protein, 195 aa, Homo sapiens
  Payload ID: 16494
  Gene Symbol: SYNE1
  Gene Name: spectrin repeat containing, nuclear envelope 1
  ENSP ID: ENSP00000443879
MFPQELAQKIKGYQEQIASLNSKCKMLTMKAKHATMLLTVTEVEGLAEGTEDLDGELLPTPSAHPSVVMMTAGRCHTLLSPVTEESGEEGTNSEISSPPACRSPSPVANTDASVNQDIAYYQALSAERLQTDAAKIHPSTSASQEFYEPGLEPSATAKLGDLQRSWETLKNVISEKQRTLYEALERQQKYQDSLQ

SEQ ID NO: 82872 - protein, 754 aa, Homo sapiens
  Payload ID: 16494
  Gene Symbol: SYNE1
  Gene Name: spectrin repeat containing, nuclear envelope 1
  ENSP ID: ENSP00000446021
MATSRGASRCPRDIANVMQRLQDEQEIVQKRTFTKWINSHLAKRKPPMVVDDLFEDMKDGVKLLALLEVLSGQKLPCEQGRRMKRIHAVANIGTALKFLEGRKIKLVNINSTDIADGRPSIVLGLMWTIILYFQIEELTSNLPQLQSLSSSASSVDSIVSSETPSPPSKRKVTTKIQGNAKKALLKWVQYTAGKQTGIEVKDFGKSWRSGVAFHSVIHAIRPELVDLETVKGRSNRENLEDAFTIAETELGIPRLLDPEDVDVDKPDEKSIMTYVAQFLKHYPDIHNASTDGQEDDEILPGFPSFANSVQNFKREDRVIFKEMKVWIEQFERDLTRAQMVESNLQDKYQSFKHFRVQYEMKRKQIEHLIQPLHRDGKLSLDQALVKQSWDRVTSRLFDWHIQLDKSLPAPLGTIGAWLYRAEVALREEITVQQVHEETANTIQRKLEQHKDLLQNTDAHKRAFHEIYRTRSVNGIPVPPDQLEDMAERFHFVSSTSELHLMKMEFLELKYRLLSLLVLAESKLKSWIIKYGRRESVEQLLQNYVSFIENSKFFEQYEVTYQILKQTAEMYVKADGSVEEAENVMKFMNETTAQWRNLSVEVRSVRSMLEEVISNWDRYGNTVASLQAWLEDAEKMLNQSENAKKDFFRNLPHWIQQHTAMNDAGNFLIETCDEMVSRDLKQQLLLLNGRWRELFMEVKQYAQADEMDRMKKEYTDCVVTLSAFATEAHKKLSEPLEVSFMNVKLLIQDLEVRGF

SEQ ID NO: 82873 - protein, 477 aa, Homo sapiens
  Payload ID: 16494
  Gene Symbol: SYNE1
  Gene Name: spectrin repeat containing, nuclear envelope 1
  ENSP ID: ENSP00000481873
MQRLQDEQEIVQKRTFTKWINSHLAKRKPPMVVDDLFEDMKDGVKLLALLEVLSGQKLPCEQGRRMKRIHAVANIGTALKFLEGRKSMHRGSPIKLVNINSTDIADGRPSIVLGLMWTIILYFQIEELTSNLPQLQSLSSSASSVDSIVSSETPSPPSKRKVTTKIQGNAKKALLKWVQYTAGKQTGIEVKDFGKSWRSGVAFHSVIHAIRPELVDLETVKGRSNRENLEDAFTIAETELGIPRLLDPEDVDVDKPDEKSIMTYVAQFLKHYPDIHNASTDGQEDDEILPGFPSFANSVQNFKREDRVIFKEMKVWIEQFERDLTRAQMVESNLQDKYQSFKHFRVQYEMKRKQIEHLIQPLHRDGKLSLDQALVKQSWDRVTSRLFDWHIQLDKSLPAPLGTIGAWLYRAEVALREEITVQQVHEETANTIQRKLEQHKKIEAIRKELPPAPTATSTHLRNCICARIHALHFCYYG

SEQ ID NO: 82874 - protein, 6885 aa, Homo sapiens
  Payload ID: 16495
  Gene Symbol: SYNE2
  Gene Name: spectrin repeat containing, nuclear envelope 2
  Uniprot ID: Q8WXH0
  ENSP ID: ENSP00000341781
MASSPELPTEDEQGSWGIDDLHISLQAEQEDTQKKAFTCWINSQLARHTSPSVISDLFTDIKKGHVLLDLLEVLSGQQLPRDKGSNTFQCRINIEHALTFLRNRSIKLINIHVTDIIDGNPSIILGLIWTIILHFHIEKLAQTLSCNYNQPSLDDVSVVDSSPASSPPAKKCSKVQARWQMSARKALLLWAQEQCATYESVNVTDFKSSWRNGMAFLAIIHALRPDLIDMKSVKHRSNKDNLREAFRIAEQELKIPRLLEPEDVDVVDPDEKSIMTYVAQFLQYSKDAPGTGEEAQGKVKDAMGWLTLQKEKLQKLLKDSENDTYFKKYNSLLSFMESFNEEKKSFLDVLSIKRDLDELDKDHLQLREAWDGLDHQINAWKIKLNYALPPPLHQTEAWLQEVEELMDEDLSASQDHSQAVTLIQEKMTLFKSLMDRFEHHSNILLTFENKDENHLPLVPPNKLEEMKRRINNILEKKFILLLEFHYYKCLVLGLVDEVKSKLDIWNIKYGSRESVELLLEDWHKFIEEKEFLARLDTSFQKCGEIYKNLAGECQNINKQYMMVKSDVCMYRKNIYNVKSTLQKVLACWATYVENLRLLRACFEETKKEEIKEVPFETLAQWNLEHATLNEAGNFLVEVSNDVVGSSISKELRRLNKRWRKLVSKTQLEMNLPLMIKKQDQPTFDNSGNILSKEEKATVEFSTDMSVELPENYNQNIKAGEKHEKENEEFTGQLKVAKDVEKLIGQVEIWEAEAKSVLDQDDVDTSMEESLKHLIAKGSMFDELMARSEDMLQMDIQNISSQESFQHVLTTGLQAKIQEAKEKVQINVVKLIAALKNLTDVSPDLDIRLKMEESQKELESYMMRAQQLLGQRESPGELISKHKEALIISNTKSLAKYLKAVEELKNNVTEDIKMSLEEKSRDVCAKWESLHHELSLYVQQLKIDIEKGKLSDNILKLEKQINKEKKLIRRGRTKGLIKEHEACFSEEGCLYQLNHHMEVLRELCEELPSQKSQQEVKRLLKDYEQKIERLLKCASEIHMTLQPTAGGTSKNEGTITTSENRGGDPHSEAPFAKSDNQPSTEKAMEPTMKFSLASVLRPLQEESIMEKDYSASINSLLERYDTYRDILEHHLQNNKFRITSDFSSEEDRSSSCLQAKLTDLQVIKNETDARWKEFEIISLKLENHVNDIKKPFVIKERDTLKERERELQMTLNTRMESLETALRLVLPVEKASLLLCGSDLPLHKMAIQGFHLIDADRIYQHLRNIQDSIAKQIEICNRLEEPGNFVLKELHPFDLHAMQNIILKYKTQFEGMNHRVQRSEDTLKALEDFLASLRTAKLSAEPVTDLSASDTQVAQENTLTVKNKEGEIHLMKDKAKHLDKCLKMLDMSFKDAERGDDTSCENLLDAFSIKLSETHGYGVQEEFTEENKLLEACIFKNNELLKNIQDVQSQISKIGLKDPTVPAVKHRKKSLIRLDKVLDEYEEEKRHLQEMANSLPHFKDGREKTVNQQCQNTVVLWENTKALVTECLEQCGRVLELLKQYQNFKSILTTLIQKEESVISLQASYMGKENLKKRIAEIEIVKEEFNEHLEVVDKINQVCKNLQFYLNKMKTFEEPPFEKEANIIVDRWLDINEKTEDYYENLGRALALWDKLFNLKNVIDEWTEKALQKMELHQLTEEDRERLKEELQVHEQKTSEFSRRVAEIQFLLQSSEIPLELQVMESSILNKMEHVQKCLTGESNCHALSGSTAELREDLDQAKTQIGMTESLLKALSPSDSLEIFTKLEEIQQQILQQKHSMILLENQIGCLTPELSELKKQYESVSDLFNTKKSVLQDHFSKLLNDQCKNFNDWFSNIKVNLKECFESSETKKSVEQKLQKLSDFLTLEGRNSKIKQVDSVLKHVKKHLPKAHVKELISWLVGQEFELEKMESICQARAKELEDSLQQLLRLQDDHRNLRKWLTNQEEKWKGMEEPGEKTELFCQALARKREQFESVAQLNNSLKEYGFTEEEEIIMEATCLMDRYQTLLRQLSEIEEEDKLLPTEDQSFNDLAHDVIHWIKEIKESLMVLNSSEGKMPLEERIQKIKEIILLKPEGDARIETIMKQAESSEAPLVQKTLTDISNQWDNTLHLASTYLSHQEKLLLEGEKYLQSKEDLRLMLIELKKKQEAGFALQHGLQEKKAQLKIYKKFLKKAQDLTSLLKELKSQGNYLLECTKNPSFSEEPWLEIKHLHESLLQQLQDSVQNLDGHVREHDSYQVCVTDLNTTLDNFSKEFVSFSDKPVDQIAVEEKLQKLQELENRLSLQDGTLKKILALAKSVKQNTSSVGQKIIKDDIKSLQCKQKDLENRLASAKQEMECCLNSILKSKRSTEKKGKFTLPGREKQATSDVQESTQESAAVEKLEEDWEINKDSAVEMAMSKQLSLNAQESMKNTEDERKVNELQNQPLELDTMLRNEQLEEIEKLYTQLEAKKAAIKPLEQTECLNKTETGALVLHNIGYSAQHLDNLLQALITLKKNKESQYCVLRDFQEYLAAVESSMKALLTDKESLKVGPLDSVTYLDKIKKFIASIEKEKDSLGNLKIKWENLSNHVTDMDKKLLESQIKQLEHGWEQVEQQIQKKYSQQVVEYDEFTTLMNKVQDTEISLQQQQQHLQLRLKSPEERAGNQSMIALTTDLQATKHGFSVLKGQAELQMKRIWGEKEKKNLEDGINNLKKQWETLEPLHLEAENQIKKCDIRNKMKETILWAKNLLGELNPSIPLLPDDILSQIRKCKVTHDGILARQQSVESLAEEVKDKVPSLTTYEGSDLNNTLEDLRNQYQMLVLKSTQRSQQLEFKLEERSNFFAIIRKFQLMVQESETLIIPRVETAATEAELKHHHVTLEASQKELQEIDSGISTHLQELTNIYEELNVFERLFLEDQLKNLKIRTNRIQRFIQNTCNEVEHKIKFCRQFHEKTSALQEEADSIQRNELLLNQEVNKGVKEEIYNLKDRLTAIKCCILQVLKLKKVFDYIGLNWDFSQLDQLQTQVFEKEKELEEKIKQLDTFEEEHGKYQALLSKMRAIDLQIKKMTEVVLKAPDSSPESRRLNAQILSQRIEKAKCLCDEIIKKLNENKTFDDSFKEKEILQIKLNAEENDKLYKVLQNMVLELSPKELDEKNCQDKLETSLHVLNQIKSQLQQPLLINLEIKHIQNEKDNCEAFQEQVWAEMCSIKAVTAIEKQREENSSEASDVETKLREFEDLQMQLNTSIDLRTNVLNDAYENLTRYKEAVTRAVESITSLEAIIIPYRVDVGNPEESLEMPLRKQEELESTVAHIQDLTEKLGMISSPEAKLQLQYTLQELVSKNSAMKEAFKAQETEAERYLENYKCYRKMEEDIYTNLSKMETVLGQSMSSLPLSYREALERLEQSKALVSNLISTKEELMKLRQILRLLRLRCTENDGICLLKIVSALWEKWLSLLEAAKEWEMWCEELKQEWKFVSEEIEREAIILDNLQEELPEISKTKEAATTEELSELLDCLCQYGENVEKQQLLLTLLLQRIRSIQNVPESSGAVETVPAFQEITSMKERCNKLLQKVQKNKELVQTEIQERHSFTKEIIALKNFFQQTTTSFQNMAFQDHPEKSEQFEELQSILKKGKLTFENIMEKLRIKYSEMYTIVPAEIESQVEECRKALEDIDEKISNEVLKSSPSYAMRRKIEEINNGLHNVEKMLQQKSKNIEKAQEIQKKMWDELDLWHSKLNELDSEVQDIVEQDPGQAQEWMDNLMIPFQQYQQVSQRAECRTSQLNKATVKMEEYSDLLKSTEAWIENTSHLLANPADYDSLRTLSHHASTVQMALEDSEQKHNLLHSIFMDLEDLSIIFETDELTQSIQELSNQVTALQQKIMESLPQIQRMADDVVAIESEVKSMEKRVSKIKTILLSKEIFDFSPEEHLKHGEVILENIRPMKKTIAEIVSYQVELRLPQTGMKPLPVFQRTNQLLQDIKLLENVTQEQNELLKVVIKQTNEWDEEIENLKQILNNYSAQFSLEHMSPDQADKLPQLQGEIERMEKQILSLNQRKEDLLVDLKATVLNLHQHLKQEQEGVERDRLPAVTSEEGGVAERDASERKLNRRGSMSYLAAVEEEVEESSVKSDNGDEKAEPSPQSWSSLWKHDKDMEEDRASSSSGTIVQEAYGKISTSDNSMAQILTPDSLNTEQGPECSLRPNQTEEGTTPPIEADTLDSSDAQGGLEPRVEKTRPEPTEVLHACKTQVAELELWLQQANVAVEPETLNADMQQVLEQQLVGCQAMLTEIEHKVAFLLETCKDQGLGDNGATQHEAEALSLKLKTVKCNLEKVQMMLQEKHSEDQHPTILKKSSEPEHQEALQPVNLSELESIVTERPQFSRQKDFQQQQVLELKPMEQKDFIKFIEFNAKKMWPQYCQHDNDTTQESSASNQASSPENDVPDSILSPQGQNGDKWQYLHHELSSKIKLPLPQLVEPQVSTNMGILPSVTMYNFRYPTTEELKTYTTQLEDLRQEASNLQTQENMTEEAYINLDKKLFELFLTLSQCLSSVEEMLEMPRLYREDGSGQQVHYETLALELKKLYLALSDKKGDLLKAMTWPGENTNLLLECFDNLQVCLEHTQAAAVCRSKSLKAGLDYNRSYQNEIKRLYHQLIKSKTSLQQSLNEISGQSVAEQLQKADAYTVELENAESRVAKLRDEGERLHLPYALLQEVYKLEDVLDSMWGMLRARYTELSSPFVTESQQDALLQGMVELVKIGKEKLAHGHLKQTKSKVALQAQIENHKVFFQKLVADMLLIQAYSAKILPSLLQNRETFWAEQVTEVKILEEKSRQCGMKLQSLLQKWEEFDENYASLEKDLEILISTLPSVSLVEETEERLVERISFYQQIKRNIGGKHARLYQTLNEGKQLVASVSCPELEGQIAKLEEQWLSLNKKIDHELHRLQALLKHLLSYNRDSDQLTKWLESSQHTLNYWKEQSLNVSQDLDTIRSNINNFFEFSKEVDEKSSLKTAVISIGNQLLHLKETDTATLRASLAQFEQKWTMLITQLPDIQEKLHQLQMEKLPSRKAITEMISWMNNVEHQTSDEDSVHSPSSASQVKHLLQKHKEFRMEMDYKQWIVDFVNQSLLQLSTCDVESKRYERTEFAEHLGEMNRQWHRVHGMLNRKIQHLEQLLESITESENKIQILNNWLEAQEERLKTLQKPESVISVQKLLLDCQDIENQLAIKSKALDELKQSYLTLESGAVPLLEDTASRIDELFQKRSSVLTQVNQLKTSMQSVLQEWKIYDQLYDEVNMMTIRFWYCMEHSKPVVLSLETLRCQVENLQSLQDEAESSEGSWEKLQEVIGKLKGLCPSVAEIIEEKCQNTHKRWTQVNQAIADQLQKAQSLLQLWKAYSNAHGEAAARLKQQEAKFQQLANISMSGNNLAEILPPALQDIKELQHDVQKTKEAFLQNSSVLDRLPQPAESSTHMLLPGPLHSLQRAAYLEKMLLVKANEFEFVLSQFKDFGVRLESLKGLIMHEEENLDRLHQQEKENPDSFLNHVLALTAQSPDIEHLNEVSLKLPLSDVAVKTLQNMNRQWIRATATALERCSELQGIGLNEKFLYCCEKWIQLLEKIEEALKVDVANSLPELLEQQKTYKMLEAEVSINQTIADSYVTQSLQLLDTTEIENRPEFITEFSKLTDRWQNAVQGVRQRKGDVDGLVRQWQDFTTSVENLFRFLTDTSHLLSAVKGQERFSLYQTRSLIHELKNKEIHFQRRRTTCALTLEAGEKLLLTTDLKTKESVGRRISQLQDSWKDMEPQLAEMIKQFQSTVETWDQCEKKIKELKSRLQVLKAQSEDPLPELHEDLHNEKELIKELEQSLASWTQNLKELQTMKADLTRHVLVEDVMVLKEQIEHLHRQWEDLCLRVAIRKQEIEDRLNTWVVFNEKNKELCAWLVQMENKVLQTADISIEEMIEKLQKDCMEEINLFSENKLQLKQMGDQLIKASNKSRAAEIDDKLNKINDRWQHLFDVIGSRVKKLKETFAFIQQLDKNMSNLRTWLARIESELSKPVVYDVCDDQEIQKRLAEQQDLQRDIEQHSAGVESVFNICDVLLHDSDACANETECDSIQQTTRSLDRRWRNICAMSMERRMKIEETWRLWQKFLDDYSRFEDWLKSAERTAACPNSSEVLYTSAKEELKRFEAFQRQIHERLTQLELINKQYRRLARENRTDTASRLKQMVHEGNQRWDNLQRRVTAVLRRLRHFTNQREEFEGTRESILVWLTEMDLQLTNVEHFSESDADDKMRQLNGFQQEITLNTNKIDQLIVFGEQLIQKSEPLDAVLIEDELEELHRYCQEVFGRVSRFHRRLTSCTPGLEDEKEASENETDMEDPREIQTDSWRKRGESEEPSSPQSLCHLVAPGHERSGCETPVSVDSIPLEWDHTGDVGGSSSHEEDEEGPYYSALSGKSISDGHSWHVPDSPSCPEHHYKQMEGDRNVPPVPPASSTPYKPPYGKLLLPPGTDGGKEGPRVLNGNPQQEDGGLAGITEQQSGAFDRWEMIQAQELHNKLKIKQNLQQLNSDISAITTWLKKTEAELEMLKMAKPPSDIQEIELRVKRLQEILKAFDTYKALVVSVNVSSKEFLQTESPESTELQSRLRQLSLLWEAAQGAVDSWRGGLRQSLMQCQDFHQLSQNLLLWLASAKNRRQKAHVTDPKADPRALLECRRELMQLEKELVERQPQVDMLQEISNSLLIKGHGEDCIEAEEKVHVIEKKLKQLREQVSQDLMALQGTQNPASPLPSFDEVDSGDQPPATSVPAPRAKQFRAVRTTEGEEETESRVPGSTRPQRSFLSRVVRAALPLQLLLLLLLLLACLLPSSEEDYSCTQANNFARSFYPMLRYTNGPPPT

SEQ ID NO: 82875 - protein, 285 aa, Homo sapiens
  Payload ID: 16495
  Gene Symbol: SYNE2
  Gene Name: spectrin repeat containing, nuclear envelope 2
  Uniprot ID: Q8WXH0
  ENSP ID: ENSP00000344528
MASSPELPTEDEQGSWGIDDLHISLQAEQEDTQKKAFTCWINSQLARHTSPSVISDLFTDIKKGHVLLDLLEVLSGQQLPRDKGSNTFQCRINIEHALTFLRNRSIKLINIHVTDIIDGNPSIILGLIWTIILHFHIEKLAQTLSCNYNQPSLDDVSVVDSSPASSPPAKKCSKVQARWQMSARKALLLWAQEQCATYESVNVTDFKSSWRNGMAFLAIIHALRPDLIDMKSVKHRSNKDNLREAFRIAEQELKIPRLLEPEDAWRSSALYRIYMPGTVSCASYL

SEQ ID NO: 82876 - protein, 6824 aa, Homo sapiens
  Payload ID: 16495
  Gene Symbol: SYNE2
  Gene Name: spectrin repeat containing, nuclear envelope 2
  ENSP ID: ENSP00000349969
MASSPELPTEDEQGSWGIDDLHISLQAEQEDTQKKAFTCWINSQLARHTSPSVISDLFTDIKKGHVLLDLLEVLSGQQLPRDKGSNTFQCRINIEHALTFLRNRSIKLINIHVTDIIDGNPSIILGLIWTIILHFHIEKLAQTLSCNYNQPSLDDVSVVDSSPASSPPAKKCSKVQARWQMSARKALLLWAQEQCATYESVNVTDFKSSWRNGMAFLAIIHALRPDLIDMKSVKHRSNKDNLREAFRIAEQELKIPRLLEPEDVDVVDPDEKSIMTYVAQFLQYSKDAPGTGEEAQGKVKDAMGWLTLQKEKLQKLLKDSENDTYFKKYNSLLSFMESFNEEKKSFLDVLSIKRDLDELDKDHLQLREAWDGLDHQINAWKIKLNYALPPPLHQTEAWLQEVEELMDEDLSASQDHSQAVTLIQEKMTLFKSLMDRFEHHSNILLTFENKDENHLPLVPPNKLEEMKRRINNILEKKFILLLEFHYYKCLVLGLVDEVKSKLDIWNIKYGSRESVELLLEDWHKFIEEKEFLARLDTSFQKCGEIYKNLAGECQNINKQYMMVKSDVCMYRKNIYNVKSTLQKVLACWATYVENLRLLRACFEETKKEEIKEVPFETLAQWNLEHATLNEAGNFLVEVSNDVVGSSISKELRRLNKRWRKLVSKTQLEMNLPLMIKKQDQPTFDNSGNILSKEEKATVEFSTDMSVELPENYNQNIKAGEKHEKENEEFTGQLKVAKDVEKLIGQVEIWEAEAKSVLDQDDVDTSMEESLKHLIAKGSMFDELMARSEDMLQMDIQNISSQESFQHVLTTGLQAKIQEAKEKVQINVVKLIAALKNLTDVSPDLDIRLKMEESQKELESYMMRAQQLLGQRESPGELISKHKEALIISNTKSLAKYLKAVEELKNNVTEDIKMSLEEKSRDVCAKWESLHHELSLYVQQLKIDIEKGKLSDNILKLEKQINKEKKLIRRGRTKGLIKEHEACFSEEGCLYQLNHHMEVLRELCEELPSQKSQQEVKRLLKDYEQKIERLLKCASEIHMTLQPTAGGTSKNEGTITTSENRGGDPHSEAPFAKSDNQPSTEKAMEPTMKFSLASVLRPLQEESIMEKDYSASINSLLERYDTYRDILEHHLQNNKFRITSDFSSEEDRSSSCLQAKLTDLQVIKNETDARWKEFEIISLKLENHVNDIKKPFVIKERDTLKERERELQMTLNTRMESLETALRLVLPVEKASLLLCGSDLPLHKMAIQGFHLIDADRIYQHLRNIQDSIAKQIEICNRLEEPGNFVLKELHPFDLHAMQNIILKYKTQFEGMNHRVQRSEDTLKALEDFLASLRTAKLSAEPVTDLSASDTQVAQENTLTVKNKEGEIHLMKDKAKHLDKCLKMLDMSFKDAERGDDTSCENLLDAFSIKLSETHGYGVQEEFTEENKLLEACIFKNNELLKNIQDVQSQISKIGLKDPTVPAVKHRKKSLIRLDKVLDEYEEEKRHLQEMANSLPHFKDGREKTVNQQCQNTVVLWENTKALVTECLEQCGRVLELLKQYQNFKSILTTLIQKEESVISLQASYMGKENLKKRIAEIEIVKEEFNEHLEVVDKINQVCKNLQFYLNKMKTFEEPPFEKEANIIVDRWLDINEKTEDYYENLGRALALWDKLFNLKNVIDEWTEKALQKMELHQLTEEDRERLKEELQVHEQKTSEFSRRVAEIQFLLQSSEIPLELQVMESSILNKMEHVQKCLTGESNCHALSGSTAELREDLDQAKTQIGMTESLLKALSPSDSLEIFTKLEEIQQQILQQKHSMILLENQIGCLTPELSELKKQYESVSDLFNTKKSVLQDHFSKLLNDQCKNFNDWFSNIKVNLKECFESSETKKSVEQKLQKLSDFLTLEGRNSKIKQVDSVLKHVKKHLPKAHVKELISWLVGQEFELEKMESICQARAKELEDSLQQLLRLQDDHRNLRKWLTNQEEKWKGMEEPGEKTELFCQALARKREQFESVAQLNNSLKEYGFTEEEEIIMEATCLMDRYQTLLRQLSEIEEEDKLLPTEDQSFNDLAHDVIHWIKEIKESLMVLNSSEGKMPLEERIQKIKEIILLKPEGDARIETIMKQAESSEAPLVQKTLTDISNQWDNTLHLASTYLSHQEKLLLEGEKYLQSKEDLRLMLIELKKKQEAGFALQHGLQEKKAQLKIYKKFLKKAQDLTSLLKELKSQGNYLLECTKNPSFSEEPWLEIKHLHESLLQQLQDSVQNLDGHVREHDSYQVCVTDLNTTLDNFSKEFVSFSDKPVDQIAVEEKLQKLQELENRLSLQDGTLKKILALAKSVKQNTSSVGQKIIKDDIKSLQCKQKDLENRLASAKQEMECCLNSILKSKRSTEKKGKFTLPGREKQATSDVQESTQESAAVEKLEEDWEINKNFVENVMAVSKNCHHSMYIFESIVKNFISDEMQDSAVEMAMSKQLSLNAQESMKNTEDERKVNELQNQPLELDTMLRNEQLEEIEKLYTQLEAKKAAIKPLEQTECLNKTETGALVLHNIGYSAQHLDNLLQALITLKKNKESQYCVLRDFQEYLAAVESSMKALLTDKESLKVGPLDSVTYLDKIKKFIASIEKEKDSLGNLKIKWENLSNHVTDMDKKLLESQIKQLEHGWEQVEQQIQKKYSQQVVEYDEFTTLMNKVQDTEISLQQQQQHLQLRLKSPEERAGNQSMIALTTDLQATKHGFSVLKGQAELQMKRIWGEKEKKNLEDGINNLKKQWETLEPLHLEAENQIKKCDIRNKMKETILWAKNLLGELNPSIPLLPDDILSQIRKCKVTHDGILARQQSVESLAEEVKDKVPSLTTYEGSDLNNTLEDLRNQYQMLVLKSTQRSQQLEFKLEERSNFFAIIRKFQLMVQESETLIIPRVETAATEAELKHHHVTLEASQKELQEIDSGISTHLQELTNIYEELNVFERLFLEDQLKNLKIRTNRIQRFIQNTCNEVEHKIKFCRQFHEKTSALQEEADSIQRNELLLNQEVNKGVKEEIYNLKDRLTAIKCCILQVLKLKKVFDYIGLNWDFSQLDQLQTQVFEKEKELEEKIKQLDTFEEEHGKYQALLSKMRAIDLQIKKMTEVVLKAPDSSPESRRLNAQILSQRIEKAKCLCDEIIKKLNENKTFDDSFKEKEILQIKLNAEENDKLYKVLQNMVLELSPKELDEKNCQDKLETSLHVLNQIKSQLQQPLLINLEIKHIQNEKDNCEAFQEQVWAEMCSIKAVTAIEKQREENSSEASDVETKLREFEDLQMQLNTSIDLRTNVLNDAYENLTRYKEAVTRAVESITSLEAIIIPYRVDVGNPEESLEMPLRKQEELESTVAHIQDLTEKLGMISSPEAKLQLQYTLQELVSKNSAMKEAFKAQETEAERYLENYKCYRKMEEDIYTNLSKMETVLGQSMSSLPLSYREALERLEQSKALVSNLISTKEELMKLRQILRLLRLRCTENDGICLLKIVSALWEKWLSLLEAAKEWEMWCEELKQEWKFVSEEIEREAIILDNLQEELPEISKTKEAATTEELSELLDCLCQYGENVEKQQLLLTLLLQRIRSIQNVPESSGAVETVPAFQEITSMKERCNKLLQKVQKNKELVQTEIQERHSFTKEIIALKNFFQQTTTSFQNMAFQDHPEKSEQFEELQSILKKGKLTFENIMEKLRIKYSEMYTIVPAEIESQVEECRKALEDIDEKISNEVLKSSPSYAMRRKIEEINNGLHNVEKMLQQKSKNIEKAQEIQKKMWDELDLWHSKLNELDSEVQDIVEQDPGQAQEWMDNLMIPFQQYQQVSQRAECRTSQLNKATVKMEEYSDLLKSTEAWIENTSHLLANPADYDSLRTLSHHASTVQMALEDSEQKHNLLHSIFMDLEDLSIIFETDELTQSIQELSNQVTALQQKIMESLPQIQRMADDVVAIESEVKSMEKRVSKIKTILLSKEIFDFSPEEHLKHGEVILENIRPMKKTIAEIVSYQVELRLPQTGMKPLPVFQRTNQLLQDIKLLENVTQEQNELLKVVIKQTNEWDEEIENLKQILNNYSAQFSLEHMSPDQADKLPQLQGEIERMEKQILSLNQRKEDLLVDLKATVLNLHQHLKQEQEGVERDRLPAVTSEEGGVAERDASERKLNRRGSMSYLAAVEEEVEESSVKSDHDKDMEEDRASSSSGTIVQEAYGKISTSDNSMAQILTPDSLNTEQGPECSLRPNQTEEGTTPPIEADTLDSSDAQGGLEPRVEKTRPEPTEVLHACKTQVAELELWLQQANVAVEPETLNADMQQVLEQQLVGCQAMLTEIEHKVAFLLETCKDQGLGDNGATQHEAEALSLKLKTVKCNLEKVQMMLQEKHSEDQHPTILKKSSEPEHQEALQPVNLSELESIVTERPQFSRQKDFQQQQVLELKPMEQKDFIKFIEFNAKKMWPQYCQHDNDTTQESSARYPTTEELKTYTTQLEDLRQEASNLQTQENMTEEAYINLDKKLFELFLTLSQCLSSVEEMLEMPRLYREDGSGQQVHYETLALELKKLYLALSDKKGDLLKAMTWPGENTNLLLECFDNLQVCLEHTQAAAVCRSKSLKAGLDYNRSYQKADAYTVELENAESRVAKLRDEGERLHLPYALLQEVYKLEDVLDSMWGMLRARYTELSSPFVTESQQDALLQGMVELVKIGKEKLAHGHLKQTKSKVALQAQIENHKVFFQKLVADMLLIQAYSAKILPSLLQNRETFWAEQVTEVKILEEKSRQCGMKLQSLLQKWEEFDENYASLEKDLEILISTLPSVSLVEETEERLVERISFYQQIKRNIGGKHARLYQTLNEGKQLVASVSCPELEGQIAKLEEQWLSLNKKIDHELHRLQALLKHLLRSAFLGVYNRDSDQLTKWLESSQHTLNYWKEQSLNVSQDLDTIRSNINNFFEFSKEVDEKSSLKTAVISIGNQLLHLKETDTATLRASLAQFEQKWTMLITQLPDIQEKLHQLQMEKLPSRKAITEMISWMNNVEHQTSDEDSVHSPSSASQVKHLLQKHKEFRMEMDYKQWIVDFVNQSLLQLSTCDVESKRYERTEFAEHLGEMNRQWHRVHGMLNRKIQHLEQLLESITESENKIQILNNWLEAQEERLKTLQKPESVISVQKLLLDCQDIENQLAIKSKALDELKQSYLTLESGAVPLLEDTASRIDELFQKRSSVLTQVNQLKTSMQSVLQEWKIYDQLYDEVNMMTIRFWYCMEHSKPVVLSLETLRCQVENLQSLQDEAESSEGSWEKLQEVIGKLKGLCPSVAEIIEEKCQNTHKRWTQVNQAIADQLQKAQSLLQLWKAYSNAHGEAAARLKQQEAKFQQLANISMSGNNLAEILPPALQDIKELQHDVQKTKEAFLQNSSVLDRLPQPAESSTHMLLPGPLHSLQRAAYLEKMLLVKANEFENHVLALTAQSPDIEHLNEVSLKLPLSDVAVKTLQNMNRQWIRATATALERCSELQGIGLNEKFLYCCEKWIQLLEKIEEALKVDVANSLPELLEQQKTYKMLEAEVSINQTIADSYVTQSLQLLDTTEIENRPEFITEFSKLTDRWQNAVQGVRQRKGDVDGLNAHVARCGGASLKKQDLRYSLHTACGAALLCRSSHGANKEIHFQRRRTTCALTLEAGEKLLLTTDLKTKESVGRRISQLQDSWKDMEPQLAEMIKQFQSTVETWDQCEKKIKELKSRLQVLKAQSEDPLPELHEDLHNEKELIKVAIRKQEIEDRLNTWVVFNEKNKELCAWLVQMENKVLQTADISIEEMIEKLQKRTVGREEVPERWECETIVSGHGTEESCFLSIRKFHQGRGLHILTCQLIPQDCMEEINLFSENKLQLKQMGDQLIKASNKSRAAEIDDKLNKINDRWQHLFDVIGSSMADQTNSRWMFFQWPRGIQRTVTWPWDHLCSCASTGHTGPFHSSVLRCFEQHIEFGIYRRTYKVNKELGGDKNGQRCPIIYPHGLVQCIRLGEPLILKRVKKLKETFAFIQQLDKNMSNLRTWLARIESELSKPVVYDVCDDQEIQKRLAEQQDLQRDIEQHSAGVESVFNICDVLLHDSDACANETECDSIQQTTRSLDRRWRNICAMSMERRMKIEETWRLWQKFLDDYSRFEDWLKSAERTAACPNSSEVLYTSAKEELKRFERQIHERLTQLELINKQYRRLARENRTDTASRLKQMVHEGNQRWDNLQRRVTAVLRRLRHFTNQREEFEGTRESILVWLTEMDLQLTNVEHFSESDADDKMRQLNGFQQEITLNTNKIDQLIVFGEQLIQKSEPLDAVLIEDELEELHRYCQEGLEDEKEASENETDMEDPREIQTDSWRKRGESEEPSSPQSLCHLVAPGHERSGCETPVSVDSIPLEWDHTGDVGGSSSHEEDEEGPYYSALSGKSISDGHSWHVPDSPSCPEHHYKQMEGDRNVPPVPPASSTPYKPPYVSLNFTGSTAYVCAFDRWEMIQAQELHNKLKIKQNLQQLNSDISAITTWLKKTEAELEMLKMAKPPSDIQEIELRVKRLQEILKAFDTYKALVVSVNVSSKEFLQTESPESTELQSRLRQLSLLWEAAQGAVDSWRGGLRQSLMQCQDFHQLSQNLLLWLASAKNRRQKAHVTDPKADPRALLECRRELMQLEKELVERQPQVDMLQEISNSLLIKGHGEDCIEAEEKVHVIEKKLKQLREQVSQDLMALQGTQNPASPLPSFDEVDSGDQPPATSVPAPRAKFLYPAVQSSENYRRRGGDREQGPRQHTATALLPLKGGPGSPTPAAAPPAAAAPGLPAALLRRRLQLHSGQQLCPVLLPHAEVHQWATPHIEGIAGHSATPPA

SEQ ID NO: 82877 - protein, 6907 aa, Homo sapiens
  Payload ID: 16495
  Gene Symbol: SYNE2
  Gene Name: spectrin repeat containing, nuclear envelope 2
  Uniprot ID: Q8WXH0
  ENSP ID: ENSP00000350719
MASSPELPTEDEQGSWGIDDLHISLQAEQEDTQKKAFTCWINSQLARHTSPSVISDLFTDIKKGHVLLDLLEVLSGQQLPRDKGSNTFQCRINIEHALTFLRNRSIKLINIHVTDIIDGNPSIILGLIWTIILHFHIEKLAQTLSCNYNQPSLDDVSVVDSSPASSPPAKKCSKVQARWQMSARKALLLWAQEQCATYESVNVTDFKSSWRNGMAFLAIIHALRPDLIDMKSVKHRSNKDNLREAFRIAEQELKIPRLLEPEDVDVVDPDEKSIMTYVAQFLQYSKDAPGTGEEAQGKVKDAMGWLTLQKEKLQKLLKDSENDTYFKKYNSLLSFMESFNEEKKSFLDVLSIKRDLDELDKDHLQLREAWDGLDHQINAWKIKLNYALPPPLHQTEAWLQEVEELMDEDLSASQDHSQAVTLIQEKMTLFKSLMDRFEHHSNILLTFENKDENHLPLVPPNKLEEMKRRINNILEKKFILLLEFHYYKCLVLGLVDEVKSKLDIWNIKYGSRESVELLLEDWHKFIEEKEFLARLDTSFQKCGEIYKNLAGECQNINKQYMMVKSDVCMYRKNIYNVKSTLQKVLACWATYVENLRLLRACFEETKKEEIKEVPFETLAQWNLEHATLNEAGNFLVEVSNDVVGSSISKELRRLNKRWRKLVSKTQLEMNLPLMIKKQDQPTFDNSGNILSKEEKATVEFSTDMSVELPENYNQNIKAGEKHEKENEEFTGQLKVAKDVEKLIGQVEIWEAEAKSVLDQDDVDTSMEESLKHLIAKGSMFDELMARSEDMLQMDIQNISSQESFQHVLTTGLQAKIQEAKEKVQINVVKLIAALKNLTDVSPDLDIRLKMEESQKELESYMMRAQQLLGQRESPGELISKHKEALIISNTKSLAKYLKAVEELKNNVTEDIKMSLEEKSRDVCAKWESLHHELSLYVQQLKIDIEKGKLSDNILKLEKQINKEKKLIRRGRTKGLIKEHEACFSEEGCLYQLNHHMEVLRELCEELPSQKSQQEVKRLLKDYEQKIERLLKCASEIHMTLQPTAGGTSKNEGTITTSENRGGDPHSEAPFAKSDNQPSTEKAMEPTMKFSLASVLRPLQEESIMEKDYSASINSLLERYDTYRDILEHHLQNNKFRITSDFSSEEDRSSSCLQAKLTDLQVIKNETDARWKEFEIISLKLENHVNDIKKPFVIKERDTLKERERELQMTLNTRMESLETALRLVLPVEKASLLLCGSDLPLHKMAIQGFHLIDADRIYQHLRNIQDSIAKQIEICNRLEEPGNFVLKELHPFDLHAMQNIILKYKTQFEGMNHRVQRSEDTLKALEDFLASLRTAKLSAEPVTDLSASDTQVAQENTLTVKNKEGEIHLMKDKAKHLDKCLKMLDMSFKDAERGDDTSCENLLDAFSIKLSETHGYGVQEEFTEENKLLEACIFKNNELLKNIQDVQSQISKIGLKDPTVPAVKHRKKSLIRLDKVLDEYEEEKRHLQEMANSLPHFKDGREKTVNQQCQNTVVLWENTKALVTECLEQCGRVLELLKQYQNFKSILTTLIQKEESVISLQASYMGKENLKKRIAEIEIVKEEFNEHLEVVDKINQVCKNLQFYLNKMKTFEEPPFEKEANIIVDRWLDINEKTEDYYENLGRALALWDKLFNLKNVIDEWTEKALQKMELHQLTEEDRERLKEELQVHEQKTSEFSRRVAEIQFLLQSSEIPLELQVMESSILNKMEHVQKCLTGESNCHALSGSTAELREDLDQAKTQIGMTESLLKALSPSDSLEIFTKLEEIQQQILQQKHSMILLENQIGCLTPELSELKKQYESVSDLFNTKKSVLQDHFSKLLNDQCKNFNDWFSNIKVNLKECFESSETKKSVEQKLQKLSDFLTLEGRNSKIKQVDSVLKHVKKHLPKAHVKELISWLVGQEFELEKMESICQARAKELEDSLQQLLRLQDDHRNLRKWLTNQEEKWKGMEEPGEKTELFCQALARKREQFESVAQLNNSLKEYGFTEEEEIIMEATCLMDRYQTLLRQLSEIEEEDKLLPTEDQSFNDLAHDVIHWIKEIKESLMVLNSSEGKMPLEERIQKIKEIILLKPEGDARIETIMKQAESSEAPLVQKTLTDISNQWDNTLHLASTYLSHQEKLLLEGEKYLQSKEDLRLMLIELKKKQEAGFALQHGLQEKKAQLKIYKKFLKKAQDLTSLLKELKSQGNYLLECTKNPSFSEEPWLEIKHLHESLLQQLQDSVQNLDGHVREHDSYQVCVTDLNTTLDNFSKEFVSFSDKPVDQIAVEEKLQKLQELENRLSLQDGTLKKILALAKSVKQNTSSVGQKIIKDDIKSLQCKQKDLENRLASAKQEMECCLNSILKSKRSTEKKGKFTLPGREKQATSDVQESTQESAAVEKLEEDWEINKDSAVEMAMSKQLSLNAQESMKNTEDERKVNELQNQPLELDTMLRNEQLEEIEKLYTQLEAKKAAIKPLEQTECLNKTETGALVLHNIGYSAQHLDNLLQALITLKKNKESQYCVLRDFQEYLAAVESSMKALLTDKESLKVGPLDSVTYLDKIKKFIASIEKEKDSLGNLKIKWENLSNHVTDMDKKLLESQIKQLEHGWEQVEQQIQKKYSQQVVEYDEFTTLMNKVQDTEISLQQQQQHLQLRLKSPEERAGNQSMIALTTDLQATKHGFSVLKGQAELQMKRIWGEKEKKNLEDGINNLKKQWETLEPLHLEAENQIKKCDIRNKMKETILWAKNLLGELNPSIPLLPDDILSQIRKCKVTHDGILARQQSVESLAEEVKDKVPSLTTYEGSDLNNTLEDLRNQYQMLVLKSTQRSQQLEFKLEERSNFFAIIRKFQLMVQESETLIIPRVETAATEAELKHHHVTLEASQKELQEIDSGISTHLQELTNIYEELNVFERLFLEDQLKNLKIRTNRIQRFIQNTCNEVEHKIKFCRQFHEKTSALQEEADSIQRNELLLNQEVNKGVKEEIYNLKDRLTAIKCCILQVLKLKKVFDYIGLNWDFSQLDQLQTQVFEKEKELEEKIKQLDTFEEEHGKYQALLSKMRAIDLQIKKMTEVVLKAPDSSPESRRLNAQILSQRIEKAKCLCDEIIKKLNENKTFDDSFKEKEILQIKLNAEENDKLYKVLQNMVLELSPKELDEKNCQDKLETSLHVLNQIKSQLQQPLLINLEIKHIQNEKDNCEAFQEQVWAEMCSIKAVTAIEKQREENSSEASDVETKLREFEDLQMQLNTSIDLRTNVLNDAYENLTRYKEAVTRAVESITSLEAIIIPYRVDVGNPEESLEMPLRKQEELESTVAHIQDLTEKLGMISSPEAKLQLQYTLQELVSKNSAMKEAFKAQETEAERYLENYKCYRKMEEDIYTNLSKMETVLGQSMSSLPLSYREALERLEQSKALVSNLISTKEELMKLRQILRLLRLRCTENDGICLLKIVSALWEKWLSLLEAAKEWEMWCEELKQEWKFVSEEIEREAIILDNLQEELPEISKTKEAATTEELSELLDCLCQYGENVEKQQLLLTLLLQRIRSIQNVPESSGAVETVPAFQEITSMKERCNKLLQKVQKNKELVQTEIQERHSFTKEIIALKNFFQQTTTSFQNMAFQDHPEKSEQFEELQSILKKGKLTFENIMEKLRIKYSEMYTIVPAEIESQVEECRKALEDIDEKISNEVLKSSPSYAMRRKIEEINNGLHNVEKMLQQKSKNIEKAQEIQKKMWDELDLWHSKLNELDSEVQDIVEQDPGQAQEWMDNLMIPFQQYQQVSQRAECRTSQLNKATVKMEEYSDLLKSTEAWIENTSHLLANPADYDSLRTLSHHASTVQMALEDSEQKHNLLHSIFMDLEDLSIIFETDELTQSIQELSNQVTALQQKIMESLPQIQRMADDVVAIESEVKSMEKRVSKIKTILLSKEIFDFSPEEHLKHGEVILENIRPMKKTIAEIVSYQVELRLPQTGMKPLPVFQRTNQLLQDIKLLENVTQEQNELLKVVIKQTNEWDEEIENLKQILNNYSAQFSLEHMSPDQADKLPQLQGEIERMEKQILSLNQRKEDLLVDLKATVLNLHQHLKQEQEGVERDRLPAVTSEEGGVAERDASERKLNRRGSMSYLAAVEEEVEESSVKSDNGDEKAEPSPQSWSSLWKHDKDMEEDRASSSSGTIVQEAYGKISTSDNSMAQILTPDSLNTEQGPECSLRPNQTEEGTTPPIEADTLDSSDAQGGLEPRVEKTRPEPTEVLHACKTQVAELELWLQQANVAVEPETLNADMQQVLEQQLVGCQAMLTEIEHKVAFLLETCKDQGLGDNGATQHEAEALSLKLKTVKCNLEKVQMMLQEKHSEDQHPTILKKSSEPEHQEALQPVNLSELESIVTERPQFSRQKDFQQQQVLELKPMEQKDFIKFIEFNAKKMWPQYCQHDNDTTQESSASNQASSPENDVPDSILSPQGQNGDKWQYLHHELSSKIKLPLPQLVEPQVSTNMGILPSVTMYNFRYPTTEELKTYTTQLEDLRQEASNLQTQENMTEEAYINLDKKLFELFLTLSQCLSSVEEMLEMPRLYREDGSGQQVHYETLALELKKLYLALSDKKGDLLKAMTWPGENTNLLLECFDNLQVCLEHTQAAAVCRSKSLKAGLDYNRSYQNEIKRLYHQLIKSKTSLQQSLNEISGQSVAEQLQKADAYTVELENAESRVAKLRDEGERLHLPYALLQEVYKLEDVLDSMWGMLRARYTELSSPFVTESQQDALLQGMVELVKIGKEKLAHGHLKQTKSKVALQAQIENHKVFFQKLVADMLLIQAYSAKILPSLLQNRETFWAEQVTEVKILEEKSRQCGMKLQSLLQKWEEFDENYASLEKDLEILISTLPSVSLVEETEERLVERISFYQQIKRNIGGKHARLYQTLNEGKQLVASVSCPELEGQIAKLEEQWLSLNKKIDHELHRLQALLKHLLSYNRDSDQLTKWLESSQHTLNYWKEQSLNVSQDLDTIRSNINNFFEFSKEVDEKSSLKTAVISIGNQLLHLKETDTATLRASLAQFEQKWTMLITQLPDIQEKLHQLQMEKLPSRKAITEMISWMNNVEHQTSDEDSVHSPSSASQVKHLLQKHKEFRMEMDYKQWIVDFVNQSLLQLSTCDVESKRYERTEFAEHLGEMNRQWHRVHGMLNRKIQHLEQLLESITESENKIQILNNWLEAQEERLKTLQKPESVISVQKLLLDCQDIENQLAIKSKALDELKQSYLTLESGAVPLLEDTASRIDELFQKRSSVLTQVNQLKTSMQSVLQEWKIYDQLYDEVNMMTIRFWYCMEHSKPVVLSLETLRCQVENLQSLQDEAESSEGSWEKLQEVIGKLKGLCPSVAEIIEEKCQNTHKRWTQVNQAIADQLQKAQSLLQLWKAYSNAHGEAAARLKQQEAKFQQLANISMSGNNLAEILPPALQDIKELQHDVQKTKEAFLQNSSVLDRLPQPAESSTHMLLPGPLHSLQRAAYLEKMLLVKANEFEFVLSQFKDFGVRLESLKGLIMHEEENLDRLHQQEKENPDSFLNHVLALTAQSPDIEHLNEVSLKLPLSDVAVKTLQNMNRQWIRATATALERCSELQGIGLNEKFLYCCEKWIQLLEKIEEALKVDVANSLPELLEQQKTYKMLEAEVSINQTIADSYVTQSLQLLDTTEIENRPEFITEFSKLTDRWQNAVQGVRQRKGDVDGLVRQWQDFTTSVENLFRFLTDTSHLLSAVKGQERFSLYQTRSLIHELKNKEIHFQRRRTTCALTLEAGEKLLLTTDLKTKESVGRRISQLQDSWKDMEPQLAEMIKQFQSTVETWDQCEKKIKELKSRLQVLKAQSEDPLPELHEDLHNEKELIKELEQSLASWTQNLKELQTMKADLTRHVLVEDVMVLKEQIEHLHRQWEDLCLRVAIRKQEIEDRLNTWVVFNEKNKELCAWLVQMENKVLQTADISIEEMIEKLQKDCMEEINLFSENKLQLKQMGDQLIKASNKSRAAEIDDKLNKINDRWQHLFDVIGSRVKKLKETFAFIQQLDKNMSNLRTWLARIESELSKPVVYDVCDDQEIQKRLAEQQDLQRDIEQHSAGVESVFNICDVLLHDSDACANETECDSIQQTTRSLDRRWRNICAMSMERRMKIEETWRLWQKFLDDYSRFEDWLKSAERTAACPNSSEVLYTSAKEELKRFEAFQRQIHERLTQLELINKQYRRLARENRTDTASRLKQMVHEGNQRWDNLQRRVTAVLRRLRHFTNQREEFEGTRESILVWLTEMDLQLTNVEHFSESDADDKMRQLNGFQQEITLNTNKIDQLIVFGEQLIQKSEPLDAVLIEDELEELHRYCQEVFGRVSRFHRRLTSCTPGLEDEKEASENETDMEDPREIQTDSWRKRGESEEPSSPQSLCHLVAPGHERSGCETPVSVDSIPLEWDHTGDVGGSSSHEEDEEGPYYSALSDVEIPENPEAYLKMTTKTLKASSGKSISDGHSWHVPDSPSCPEHHYKQMEGDRNVPPVPPASSTPYKPPYGKLLLPPGTDGGKEGPRVLNGNPQQEDGGLAGITEQQSGAFDRWEMIQAQELHNKLKIKQNLQQLNSDISAITTWLKKTEAELEMLKMAKPPSDIQEIELRVKRLQEILKAFDTYKALVVSVNVSSKEFLQTESPESTELQSRLRQLSLLWEAAQGAVDSWRGGLRQSLMQCQDFHQLSQNLLLWLASAKNRRQKAHVTDPKADPRALLECRRELMQLEKELVERQPQVDMLQEISNSLLIKGHGEDCIEAEEKVHVIEKKLKQLREQVSQDLMALQGTQNPASPLPSFDEVDSGDQPPATSVPAPRAKFRAVRTTEGEEETESRVPGSTRPQRSFLSRVVRAALPLQLLLLLLLLLACLLPSSEEDYSCTQANNFARSFYPMLRYTNGPPPT

SEQ ID NO: 82878 - protein, 3270 aa, Homo sapiens
  Payload ID: 16495
  Gene Symbol: SYNE2
  Gene Name: spectrin repeat containing, nuclear envelope 2
  Uniprot ID: Q8WXH0
  ENSP ID: ENSP00000378249
MEKLRIKYSEMYTIVPAEIESQVEECRKALEDIDEKISNEVLKSSPSYAMRRKIEEINNGLHNVEKMLQQKSKNIEKAQEIQKKMWDELDLWHSKLNELDSEVQDIVEQDPGQAQEWMDNLMIPFQQYQQVSQRAECRTSQLNKATVKMEEYSDLLKSTEAWIENTSHLLANPADYDSLRTLSHHASTVQDSKCFRSGPRPNIYVSYYVTVIQMALEDSEQKHNLLHSIFMDLEDLSIIFETDELTQSIQELSNQVTALQQKIMESLPQIQRMADDVVAIESEVKSMEKRVSKIKTILLSKEIFDFSPEEHLKHGEVILENIRPMKKTIAEIVSYQVELRLPQTGMKPLPVFQRTNQLLQDIKLLENVTQEQNELLKVVIKQTNEWDEEIENLKQILNNYSAQFSLEHMSPDQADKLPQLQGEIERMEKQILSLNQRKEDLLVDLKATVLNLHQHLKQEQEGVERDRLPAVTSEEGGVAERDASERKLNRRGSMSYLAAVEEEVEESSVKSDNGDEKAEPSPQSWSSLWKHDKDMEEDRASSSSGTIVQEAYGKISTSDNSMAQILTPDSLNTEQGPECSLRPNQTEEGTTPPIEADTLDSSDAQGGLEPRVEKTRPEPTEVLHACKTQVAELELWLQQANVAVEPETLNADMQQVLEQQLVGCQAMLTEIEHKVAFLLETCKDQGLGDNGATQHEAEALSLKLKTVKCNLEKVQMMLQEKHSEDQHPTILKKSSEPEHQEALQPVNLSELESIVTERPQFSRQKDFQQQQVLELKPMEQKDFIKFIEFNAKKMWPQYCQHDNDTTQESSASNQASSPENDVPDSILSPQGQNGDKWQYLHHELSSKIKLPLPQLVEPQVSTNMGILPSVTMYNFRYPTTEELKTYTTQLEDLRQEASNLQTQENMTEEAYINLDKKLFELFLTLSQCLSSVEEMLEMPRLYREDGSGQQVHYETLALELKKLYLALSDKKGDLLKAMTWPGENTNLLLECFDNLQVCLEHTQAAAVCRSKSLKAGLDYNRSYQNEIKRLYHQLIKSKTSLQQSLNEISGQSVAEQLQKADAYTVELENAESRVAKLRDEGERLHLPYALLQEVYKLEDVLDSMWGMLRARYTELSSPFVTESQQDALLQGMVELVKIGKEKLAHGHLKQTKSKVALQAQIENHKVFFQKLVADMLLIQAYSAKILPSLLQNRETFWAEQVTEVKILEEKSRQCGMKLQSLLQKWEEFDENYASLEKDLEILISTLPSVSLVEETEERLVERISFYQQIKRNIGGKHARLYQTLNEGKQLVASVSCPELEGQIAKLEEQWLSLNKKIDHELHRLQALLKHLLSYNRDSDQLTKWLESSQHTLNYWKEQSLNVSQDLDTIRSNINNFFEFSKEVDEKSSLKTAVISIGNQLLHLKETDTATLRASLAQFEQKWTMLITQLPDIQEKLHQLQMEKLPSRKAITEMISWMNNVEHQTSDEDSVHSPSSASQVKHLLQKHKEFRMEMDYKQWIVDFVNQSLLQLSTCDVESKRYERTEFAEHLGEMNRQWHRVHGMLNRKIQHLEQLLESITESENKIQILNNWLEAQEERLKTLQKPESVISVQKLLLDCQDIENQLAIKSKALDELKQSYLTLESGAVPLLEDTASRIDELFQKRSSVLTQVNQLKTSMQSVLQEWKIYDQLYDEVNMMTIRFWYCMEHSKPVVLSLETLRCQVENLQSLQDEAESSEGSWEKLQEVIGKLKGLCPSVAEIIEEKCQNTHKRWTQVNQAIADQLQKAQSLLQLWKAYSNAHGEAAARLKQQEAKFQQLANISMSGNNLAEILPPALQDIKELQHDVQKTKEAFLQNSSVLDRLPQPAESSTHMLLPGPLHSLQRAAYLEKMLLVKANEFEFVLSQFKDFGVRLESLKGLIMHEEENLDRLHQQEKENPDSFLNHVLALTAQSPDIEHLNEVSLKLPLSDVAVKTLQNMNRQWIRATATALERCSELQGIGLNEKFLYCCEKWIQLLEKIEEALKVDVANSLPELLEQQKTYKMLEAEVSINQTIADSYVTQSLQLLDTTEIENRPEFITEFSKLTDRWQNAVQGVRQRKGDVDGLVRQWQDFTTSVENLFRFLTDTSHLLSAVKGQERFSLYQTRSLIHELKNKEIHFQRRRTTCALTLEAGEKLLLTTDLKTKESVGRRISQLQDSWKDMEPQLAEMIKQFQSTVETWDQCEKKIKELKSRLQVLKAQSEDPLPELHEDLHNEKELIKELEQSLASWTQNLKELQTMKADLTRHVLVEDVMVLKEQIEHLHRQWEDLCLRVAIRKQEIEDRLNTWVVFNEKNKELCAWLVQMENKVLQTADISIEEMIEKLQKDCMEEINLFSENKLQLKQMGDQLIKASNKSRAAEIDDKLNKINDRWQHLFDVIGSRVKKLKETFAFIQQLDKNMSNLRTWLARIESELSKPVVYDVCDDQEIQKRLAEQQDLQRDIEQHSAGVESVFNICDVLLHDSDACANETECDSIQQTTRSLDRRWRNICAMSMERRMKIEETWRLWQKFLDDYSRFEDWLKSAERTAACPNSSEVLYTSAKEELKRFEAFQRQIHERLTQLELINKQYRRLARENRTDTASRLKQMVHEGNQRWDNLQRRVTAVLRRLRHFTNQREEFEGTRESILVWLTEMDLQLTNVEHFSESDADDKMRQLNGFQQEITLNTNKIDQLIVFGEQLIQKSEPLDAVLIEDELEELHRYCQEVFGRVSRFHRRLTSCTPGLEDEKEASENETDMEDPREIQTDSWRKRGESEEPSSPQSLCHLVAPGHERSGCETPVSVDSIPLEWDHTGDVGGSSSHEEDEEGPYYSALSGKSISDGHSWHVPDSPSCPEHHYKQMEGDRNVPPVPPASSTPYKPPYGKLLLPPGTDGGKEGPRVLNGNPQQEDGGLAGITEQQSGAFDRWEMIQAQELHNKLKIKQNLQQLNSDISAITTWLKKTEAELEMLKMAKPPSDIQEIELRVKRLQEILKAFDTYKALVVSVNVSSKEFLQTESPESTELQSRLRQLSLLWEAAQGAVDSWRGGLRQSLMQCQDFHQLSQNLLLWLASAKNRRQKAHVTDPKADPRALLECRRELMQLEKELVERQPQVDMLQEISNSLLIKGHGEDCIEAEEKVHVIEKKLKQLREQVSQDLMALQGTQNPASPLPSFDEVDSGDQPPATSVPAPRAKQFRAVRTTEGEEETESRVPGSTRPQRSFLSRVVRAALPLQLLLLLLLLLACLLPSSEEDYSCTQANNFARSFYPMLRYTNGPPPT

SEQ ID NO: 82879 - protein, 556 aa, Homo sapiens
  Payload ID: 16495
  Gene Symbol: SYNE2
  Gene Name: spectrin repeat containing, nuclear envelope 2
  Uniprot ID: Q8WXH0
  ENSP ID: ENSP00000391937
MEDPREIQTDSWRKRGESEEPSSPQSLCHLVAPGHERSGCETPVSVDSIPLEWDHTGDVGGSSSHEEDEEGPYYSALSDVEIPENPEAYLKMTTKTLKASSGKSISDGHSWHVPDSPSCPEHHYKQMEGDRNVPPVPPASSTPYKPPYGKLLLPPGTDGGKEGPRVLNGNPQQEDGGLAGITEQQSGAFDRWEMIQAQELHNKLKIKQNLQQLNSDISAITTWLKKTEAELEMLKMAKPPSDIQEIELRVKRLQEILKAFDTYKALVVSVNVSSKEFLQTESPESTELQSRLRQLSLLWEAAQGAVDSWRGGLRQSLMQCQGSKTRPRSDVLFFKDFHQLSQNLLLWLASAKNRRQKAHVTDPKADPRALLECRRELMQLEKELVERQPQVDMLQEISNSLLIKGHGEDCIEAEEKVHVIEKKLKQLREQVSQDLMALQGTQNPASPLPSFDEVDSGDQPPATSVPAPRAKQFRAVRTTEGEEETESRVPGSTRPQRSFLSRVVRAALPLQLLLLLLLLLACLLPSSEEDYSCTQANNFARSFYPMLRYTNGPPPT

SEQ ID NO: 82880 - protein, 429 aa, Homo sapiens
  Payload ID: 16495
  Gene Symbol: SYNE2
  Gene Name: spectrin repeat containing, nuclear envelope 2
  Uniprot ID: Q8WXH0
  ENSP ID: ENSP00000396794
MEGDRNVPPVPPASSTPYKPPYGKLLLPPGTDGGKEGPRVLNGNPQQEDGGLAGITEQQSGAFDRWEMIQAQELHNKLKIKQNLQQLNSDISAITTWLKKTEAELEMLKMAKPPSDIQEIELRVKRLQEILKAFDTYKALVVSVNVSSKEFLQTESPESTELQSRLRQLSLLWEAAQGAVDSWRGGLRQSLMQCQGSKTRPRSDVLFFKDFHQLSQNLLLWLASAKNRRQKAHVTDPKADPRALLECRRELMQLEKELVERQPQVDMLQEISNSLLIKGHGEDCIEAEEKVHVIEKKLKQLREQVSQDLMALQGTQNPASPLPSFDEVDSGDQPPATSVPAPRAKFRAVRTTEGEEETESRVPGSTRPQRSFLSRVVRAALPLQLLLLLLLLLACLLPSSEEDYSCTQANNFARSFYPMLRYTNGPPPT

SEQ ID NO: 82881 - protein, 668 aa, Homo sapiens
  Payload ID: 16495
  Gene Symbol: SYNE2
  Gene Name: spectrin repeat containing, nuclear envelope 2
  ENSP ID: ENSP00000450605
MVHEGNQRWDNLQRRVTAVLRRLRHFTNQREEFEGTRESILVWLTEMDLQLTNVEHFSESDADDKMRQLNGFQQEITLNTNKIDQLIVFGEQLIQKSEPLDAVLIEDELEELHRYCQEVFGRVSRFHRRLTSCTPGLEDEKEASENETDMEDPREIQTDSWRKRGESEEPSSPQSLCHLVAPGHERSGCETPVSVDSIPLEWDHTGDVGGSSSHEEDEEGPYYSALSGKSISDGHSWHVPDSPSCPEHHYKQMEGDRNVPPVPPASSTPYKPPYGKLLLPPGTDGGKEGPRVLNGNPQQEDGGLAGITEQQSGAFDRWEMIQAQELHNKLKIKQNLQQLNSDISAITTWLKKTEAELEMLKMAKPPSDIQEIELRVKRLQEILKAFDTYKALVVSVNVSSKEFLQTESPESTELQSRLRQLSLLWEAAQGAVDSWRGGLRQSLMQCQDFHQLSQNLLLWLASAKNRRQKAHVTDPKADPRALLECRRELMQLEKELVERQPQVDMLQEISNSLLIKGHGEDCIEAEEKVHVIEKKLKQLREQVSQDLMALQGTQNPASPLPSFDEVDSGDQPPATSVPAPRAKQFRAVRTTEGEEETESRVPGSTRPQRSFLSRVVRAALPLQLLLLLLLLLACLLPSSEEDYSCTQANNFARSFYPMLRYTNGPPPT

SEQ ID NO: 82882 - protein, 40 aa, Homo sapiens
  Payload ID: 16495
  Gene Symbol: SYNE2
  Gene Name: spectrin repeat containing, nuclear envelope 2
  ENSP ID: ENSP00000450789
MKRRPLRMKQTWKTPEKSRLILGVNGERARNRHLLSPCVI

SEQ ID NO: 82883 - protein, 3541 aa, Homo sapiens
  Payload ID: 16495
  Gene Symbol: SYNE2
  Gene Name: spectrin repeat containing, nuclear envelope 2
  ENSP ID: ENSP00000450831
MEEDIYTNLSKMETVLGQSMSSLPLSYREALERLEQSKALVSNLISTKEELMKLRQILRLLRLRCTENDGICLLKIVSALWEKWLSLLEAAKEWEMWCEELKQEWKFVSEEIEREAIILDNLQEELPEISKTKEAATTEELSELLDCLCQYGENVEKQQLLLTLLLQRIRSIQNVPESSGAVETVPAFQEITSMKERCNKLLQKVQKNKELVQTEIQERHSFTKEIIALKNFFQQTTTSFQNMAFQDHPEKSEQFEELQSILKKGKLTFENIMEKLRIKYSEMYTIVPAEIESQVEECRKALEDIDEKISNEVLKSSPSYAMRRKIEEINNGLHNVEKMLQQKSKNIEKAQEIQKKMWDELDLWHSKLNELDSEVQDIVEQDPGQAQEWMDNLMIPFQQYQQVSQRAECRTSQLNKATVKMEEYSDLLKSTEAWIENTSHLLANPADYDSLRTLSHHASTVQMALEDSEQKHNLLHSIFMDLEDLSIIFETDELTQSIQELSNQVTALQQKIMESLPQIQRMADDVVAIESEVKSMEKRVSKIKTILLSKEIFDFSPEEHLKHGEVILENIRPMKKTIAEIVSYQVELRLPQTGMKPLPVFQRTNQLLQDIKLLENVTQEQNELLKVVIKQTNEWDEEIENLKQILNNYSAQFSLEHMSPDQADKLPQLQGEIERMEKQILSLNQRKEDLLVDLKATVLNLHQHLKQEQEGVERDRLPAVTSEEGGVAERDASERKLNRRGSMSYLAAVEEEVEESSVKSDNGDEKAEPSPQSWSSLWKHDKDMEEDRASSSSGTIVQEAYGKISTSDNSMAQILTPDSLNTEQGPECSLRPNQTEEGTTPPIEADTLDSSDAQGGLEPRVEKTRPEPTEVLHACKTQVAELELWLQQANVAVEPETLNADMQQVLEQQLVGCQAMLTEIEHKVAFLLETCKDQGLGDNGATQHEAEALSLKLKTVKCNLEKVQMMLQEKHSEDQHPTILKKSSEPEHQEALQPVNLSELESIVTERPQFSRQKDFQQQQVLELKPMEQKDFIKFIEFNAKKMWPQYCQHDNDTTQESSASNQASSPENDVPDSILSPQGQNGDKWQYLHHELSSKIKLPLPQLVEPQVSTNMGILPSVTMYNFRYPTTEELKTYTTQLEDLRQEASNLQTQENMTEEAYINLDKKLFELFLTLSQCLSSVEEMLEMPRLYREDGSGQQVHYETLALELKKLYLALSDKKGDLLKAMTWPGENTNLLLECFDNLQVCLEHTQAAAVCRSKSLKAGLDYNRSYQNEIKRLYHQLIKSKTSLQQSLNEISGQSVAEQLQKADAYTVELENAESRVAKLRDEGERLHLPYALLQEVYKLEDVLDSMWGMLRARYTELSSPFVTESQQDALLQGMVELVKIGKEKLAHGHLKQTKSKVALQAQIENHKVFFQKLVADMLLIQAYSAKILPSLLQNRETFWAEQVTEVKILEEKSRQCGMKLQSLLQKWEEFDENYASLEKDLEILISTLPSVSLVEETEERLVERISFYQQIKRNIGGKHARLYQTLNEGKQLVASVSCPELEGQIAKLEEQWLSLNKKIDHELHRLQALLKHLLSYNRDSDQLTKWLESSQHTLNYWKEQSLNVSQDLDTIRSNINNFFEFSKEVDEKSSLKTAVISIGNQLLHLKETDTATLRASLAQFEQKWTMLITQLPDIQEKLHQLQMEKLPSRKAITEMISWMNNVEHQTSDEDSVHSPSSASQVKHLLQKHKEFRMEMDYKQWIVDFVNQSLLQLSTCDVESKRYERTEFAEHLGEMNRQWHRVHGMLNRKIQHLEQLLESITESENKIQILNNWLEAQEERLKTLQKPESVISVQKLLLDCQDIENQLAIKSKALDELKQSYLTLESGAVPLLEDTASRIDELFQKRSSVLTQVNQLKTSMQSVLQEWKIYDQLYDEVNMMTIRFWYCMEHSKPVVLSLETLRCQVENLQSLQDEAESSEGSWEKLQEVIGKLKGLCPSVAEIIEEKCQNTHKRWTQVNQAIADQLQKAQSLLQLWKAYSNAHGEAAARLKQQEAKFQQLANISMSGNNLAEILPPALQDIKELQHDVQKTKEAFLQNSSVLDRLPQPAESSTHMLLPGPLHSLQRAAYLEKMLLVKANEFEFVLSQFKDFGVRLESLKGLIMHEEENLDRLHQQEKENPDSFLNHVLALTAQSPDIEHLNEVSLKLPLSDVAVKTLQNMNRQWIRATATALERCSELQGIGLNEKFLYCCEKWIQLLEKIEEALKVDVANSLPELLEQQKTYKMLEAEVSINQTIADSYVTQSLQLLDTTEIENRPEFITEFSKLTDRWQNAVQGVRQRKGDVDGLVRQWQDFTTSVENLFRFLTDTSHLLSAVKGQERFSLYQTRSLIHELKNKEIHFQRRRTTCALTLEAGEKLLLTTDLKTKESVGRRISQLQDSWKDMEPQLAEMIKQFQSTVETWDQCEKKIKELKSRLQVLKAQSEDPLPELHEDLHNEKELIKELEQSLASWTQNLKELQTMKADLTRHVLVEDVMVLKEQIEHLHRQWEDLCLRVAIRKQEIEDRLNTWVVFNEKNKELCAWLVQMENKVLQTADISIEEMIEKLQKDCMEEINLFSENKLQLKQMGDQLIKASNKSRAAEIDDKLNKINDRWQHLFDVIGSRVKKLKETFAFIQQLDKNMSNLRTWLARIESELSKPVVYDVCDDQEIQKRLAEQQDLQRDIEQHSAGVESVFNICDVLLHDSDACANETECDSIQQTTRSLDRRWRNICAMSMERRMKIEETWRLWQKFLDDYSRFEDWLKSAERTAACPNSSEVLYTSAKEELKRFEAFQRQIHERLTQLELINKQYRRLARENRTDTASRLKQMVHEGNQRWDNLQRRVTAVLRRLRHFTNQREEFEGTRESILVWLTEMDLQLTNVEHFSESDADDKMRQLNGFQQEITLNTNKIDQLIVFGEQLIQKSEPLDAVLIEDELEELHRYCQEVFGRVSRFHRRLTSCTPGLEDEKEASENETDMEDPREIQTDSWRKRGESEEPSSPQSLCHLVAPGHERSGCETPVSVDSIPLEWDHTGDVGGSSSHEEDEEGPYYSALSDVEIPENPEAYLKMTTKTLKASSGKSISDGHSWHVPDSPSCPEHHYKQMEGDRNVPPVPPASSTPYKPPYGKLLLPPGTDGGKEGPRVLNGNPQQEDGGLAGITEQQSGAFDRWEMIQAQELHNKLKIKQNLQQLNSDISAITTWLKKTEAELEMLKMAKPPSDIQEIELRVKRLQEILKAFDTYKALVVSVNVSSKEFLQTESPESTELQSRLRQLSLLWEAAQGAVDSWRGGLRQSLMQCQDFHQLSQNLLLWLASAKNRRQKAHVTDPKADPRALLECRRELMQLEKELVERQPQVDMLQEISNSLLIKGHGEDCIEAEEKVHVIEKKLKQLREQVSQDLMALQGTQNPASPLPSFDEVDSGDQPPATSVPAPRAKFRAVRTTEGEEETESRVPGSTRPQRSFLSRVVRAALPLQLLLLLLLLLACLLPSSEEDYSCTQANNFARSFYPMLRYTNGPPPT

SEQ ID NO: 82884 - protein, 763 aa, Homo sapiens
  Payload ID: 16495
  Gene Symbol: SYNE2
  Gene Name: spectrin repeat containing, nuclear envelope 2
  Uniprot ID: Q8WXH0
  ENSP ID: ENSP00000451009
MSMERRMKIEETWRLWQKFLDDYSRFEDWLKSAERTAACPNSSEVLYTSAKEELKRFEAFQRQIHERLTQLELINKQYRRLARENRTDTASRLKQMVHEGNQRWDNLQRRVTAVLRRLRHFTNQREEFEGTRESILVWLTEMDLQLTNVEHFSESDADDKMRQLNGFQQEITLNTNKIDQLIVFGEQLIQKSEPLDAVLIEDELEELHRYCQEVFGRVSRFHRRLTSCTPGLEDEKEASENETDMEDPREIQTDSWRKRGESEEPSSPQSLCHLVAPGHERSGCETPVSVDSIPLEWDHTGDVGGSSSHEEDEEGPYYSALSGKSISDGHSWHVPDSPSCPEHHYKQMEGDRNVPPVPPASSTPYKPPYGKLLLPPGTDGGKEGPRVLNGNPQQEDGGLAGITEQQSGAFDRWEMIQAQELHNKLKIKQNLQQLNSDISAITTWLKKTEAELEMLKMAKPPSDIQEIELRVKRLQEILKAFDTYKALVVSVNVSSKEFLQTESPESTELQSRLRQLSLLWEAAQGAVDSWRGGLRQSLMQCQDFHQLSQNLLLWLASAKNRRQKAHVTDPKADPRALLECRRELMQLEKELVERQPQVDMLQEISNSLLIKGHGEDCIEAEEKVHVIEKKLKQLREQVSQDLMALQGTQNPASPLPSFDEVDSGDQPPATSVPAPRAKQFRAVRTTEGEEETESRVPGSTRPQRSFLSRVVRAALPLQLLLLLLLLLACLLPSSEEDYSCTQANNFARSFYPMLRYTNGPPPT

SEQ ID NO: 82885 - protein, 570 aa, Homo sapiens
  Payload ID: 16495
  Gene Symbol: SYNE2
  Gene Name: spectrin repeat containing, nuclear envelope 2
  ENSP ID: ENSP00000451184
MSGNNLAEILPPALQDIKELQHDVQKTKEAFLQNSSVLDRLPQPAESSTHMLLPGPLHSLQRAAYLEKMLLVKANEFEFVLSQFKDFGVRLESLKGLIMHEEENLDRLHQQEKENPDSFLNHVLALTAQSPDIEHLNEVSLKLPLSDVAVKTLQNMNRQWIRATATALERCSELQGIGLNEKFLYCCEKWIQLLEKIEEALKVDVANSLPELLEQQKTYKMLEAEVSINQTIADSYVTQSLQLLDTTEIENRPEFITEFSKLTDRWQNAVQGVRQRKGDVDGLVRQWQDFTTSVENLFRFLTDTSHLLSAVKGQERFSLYQTRSLIHELKNKEIHFQRRRTTCALTLEAGEKLLLTTDLKTKESVGRRISQLQDSWKDMEPQLAEMIKQFQSTVETWDQCEKKIKELKSRLQVLKAQSEDPLPELHEDLHNEKELIKELEQSLASWTQNLKELQTMKADLTRHVLVEDVMVLKEQIEHLHRQWEDLCLRVAIRKQEIEDRLNTWVVFNEKNKELCAWLVQMENKVLQTADISIEEMIEKLQKGEEAEGDLCFYSAVGQKHEQPSHLVGSN

SEQ ID NO: 82886 - protein, 172 aa, Homo sapiens
  Payload ID: 16495
  Gene Symbol: SYNE2
  Gene Name: spectrin repeat containing, nuclear envelope 2
  ENSP ID: ENSP00000451520
MSYLAAVEEEVEESSVKSDNGDEKAEPSPQSWSSLWKHDKDMEEDRASSSSGTIVQEAYGKISTSDNSMAQILTPDSLNTEQGPECSLRPNQTEEGTTPPIEADTLDSSDAQGGLEPRVEKTRPEPTEVLHACKTQVAELELWLQQANVAVEPETLNADMQQVLEQQLVGCQ

SEQ ID NO: 82887 - protein, 1113 aa, Homo sapiens
  Payload ID: 16495
  Gene Symbol: SYNE2
  Gene Name: spectrin repeat containing, nuclear envelope 2
  ENSP ID: ENSP00000451972
MLITQLPDIQEKLHQLQMEKLPSRKAITEMISWMNNVEHQTSDEDSVHSPSSASQVKHLLQKHKEFRMEMDYKQWIVDFVNQSLLQLSTCDVESKRYERTEFAEHLGEMNRQWHRVHGMLNRKIQHLEQLLESITESENKIQILNNWLEAQEERLKTLQKPESVISVQKLLLDCQDIENQLAIKSKALDELKQSYLTLESGAVPLLEDTASRIDELFQKRSSVLTQVNQLKTSMQSVLQEWKIYDQLYDEVNMMTIRFWYCMEHSKPVVLSLETLRCQVENLQSLQDEAESSEGSWEKLQEVIGKLKGLCPSVAEIIEEKCQNTHKRWTQVNQAIADQLQKAQSLLQLWKAYSNAHGEAAARLKQQEAKFQQLANISMSGNNLAEILPPALQDIKELQHDVQKTKEAFLQNSSVLDRLPQPAESSTHMLLPGPLHSLQRAAYLEKMLLVKANEFEFVLSQFKDFGVRLESLKGLIMHEEENLDRLHQQEKENPDSFLNHVLALTAQSPDIEHLNEVSLKLPLSDVAVKTLQNMNRQWIRATATALERCSELQGIGLNEKFLYCCEKWIQLLEKIEEALKVDVANSLPELLEQQKTYKMLEAEVSINQTIADSYVTQSLQLLDTTEIENRPEFITEFSKLTDRWQNAVQGVRQRKGDVDGLVRQWQDFTTSVENLFRFLTDTSHLLSAVKGQERFSLYQTRSLIHELKNKEIHFQRRRTTCALTLEAGEKLLLTTDLKTKESVGRRISQLQDSWKDMEPQLAEMIKQFQSTVETWDQCEKKIKELKSRLQVLKAQSEDPLPELHEDLHNEKELIKELEQSLASWTQNLKELQTMKADLTRHVLVEDVMVLKEQIEHLHRQWEDLCLRVAIRKQEIEDRLNTWVVFNEKNKELCAWLVQMENKVLQTADISIEEMIEKLQKDCMEEINLFSENKLQLKQMGDQLIKASNKSRAAEIDDKLNKINDRWQHLFDVIGSRVKKLKETFAFIQQLDKNMSNLRTWLARIESELSKPVVYDVCDDQEIQKRLAEQQPTHGVQQKYYLMMTKNAMFIREEVFQFFPMTMHFLFINVIFPKLGNCITIIIKGQDSRDPTSLQATTALAGLYQLGRQGSTARY

SEQ ID NO: 82888 - protein, 162 aa, Homo sapiens
  Payload ID: 16495
  Gene Symbol: SYNE2
  Gene Name: spectrin repeat containing, nuclear envelope 2
  ENSP ID: ENSP00000452298
MSNLRTWLARIESELSKPVVYDVCDDQEIQKRLAEQQDLQRDIEQHSAGVESVFNICDVLLHDSDACANETECDSIQQTTRSLDRRWRNICAMSMERRMKIEETWRLWQKFLDDYSRFEDWLKSAERTAACPNSSEVLYTSAKEELKRFEAFQRQIHERLTQ

SEQ ID NO: 82889 - protein, 214 aa, Homo sapiens
  Payload ID: 16495
  Gene Symbol: SYNE2
  Gene Name: spectrin repeat containing, nuclear envelope 2
  ENSP ID: ENSP00000452434
MLTEIEHKVAFLLETCKDQGLGDNGATQHEAEALSLKLKTVKCNLEKVQMMLQEKHSEDQHPTILKKSSEPEHQEALQPVNLSELESIVTERPQFSRQKDFQQQQVLELKPMEQKDFIKFIEFNAKKMWPQYCQHDNDTTQESSASNQASSPENDVPDSILSPQGQNGDKWQYLHHELSSKIKLPLPQLVEPQVSLYLHGANSLFIFENPTSIH

SEQ ID NO: 82890 - protein, 6818 aa, Homo sapiens
  Payload ID: 16495
  Gene Symbol: SYNE2
  Gene Name: spectrin repeat containing, nuclear envelope 2
  ENSP ID: ENSP00000452570
MASSPELPTEDEQGSWGIDDLHISLQAEQEDTQKKAFTCWINSQLARHTSPSVISDLFTDIKKGHVLLDLLEVLSGQQLPRDKGSNTFQCRINIEHALTFLRNRSIKLINIHVTDIIDGNPSIILGLIWTIILHFHIEKLAQTLSCNYNQPSLDDVSVVDSSPASSPPAKKCSKVQARWQMSARKALLLWAQEQCATYESVNVTDFKSSWRNGMAFLAIIHALRPDLIDMKSVKHRSNKDNLREAFRIAEQELKIPRLLEPEDVDVVDPDEKSIMTYVAQFLQYSKDAPGTGEEAQGKVKDAMGWLTLQKEKLQKLLKDSENDTYFKKYNSLLSFMESFNEEKKSFLDVLSIKRDLDELDKDHLQLREAWDGLDHQINAWKIKLNYALPPPLHQTEAWLQEVEELMDEDLSASQDHSQAVTLIQEKMTLFKSLMDRFEHHSNILLTFENKDENHLPLVPPNKLEEMKRRINNILEKKFILLLEFHYYKCLVLGLVDEVKSKLDIWNIKYGSRESVELLLEDWHKFIEEKEFLARLDTSFQKCGEIYKNLAGECQNINKQYMMVKSDVCMYRKNIYNVKSTLQKVLACWATYVENLRLLRACFEETKKEEIKEVPFETLAQWNLEHATLNEAGNFLVEVSNDVVGSSISKELRRLNKRWRKLVSKTQLEMNLPLMIKKQDQPTFDNSGNILSKEEKATVEFSTDMSVELPENYNQNIKAGEKHEKENEEFTGQLKVAKDVEKLIGQVEIWEAEAKSVLDQDDVDTSMEESLKHLIAKGSMFDELMARSEDMLQMDIQNISSQESFQHVLTTGLQAKIQEAKEKVQINVVKLIAALKNLTDVSPDLDIRLKMEESQKELESYMMRAQQLLGQRESPGELISKHKEALIISNTKSLAKYLKAVEELKNNVTEDIKMSLEEKSRDVCAKWESLHHELSLYVQQLKIDIEKGKLSDNILKLEKQINKEKKLIRRGRTKGLIKEHEACFSEEGCLYQLNHHMEVLRELCEELPSQKSQQEVKRLLKDYEQKIERLLKCASEIHMTLQPTAGGTSKNEGTITTSENRGGDPHSEAPFAKSDNQPSTEKAMEPTMKFSLASVLRPLQEESIMEKDYSASINSLLERYDTYRDILEHHLQNNKFRITSDFSSEEDRSSSCLQAKLTDLQVIKNETDARWKEFEIISLKLENHVNDIKKPFVIKERDTLKERERELQMTLNTRMESLETALRLVLPVEKASLLLCGSDLPLHKMAIQGFHLIDADRIYQHLRNIQDSIAKQIEICNRLEEPGNFVLKELHPFDLHAMQNIILKYKTQFEGMNHRVQRSEDTLKALEDFLASLRTAKLSAEPVTDLSASDTQVAQENTLTVKNKEGEIHLMKDKAKHLDKCLKMLDMSFKDAERGDDTSCENLLDAFSIKLSETHGYGVQEEFTEENKLLEACIFKNNELLKNIQDVQSQISKIGLKDPTVPAVKHRKKSLIRLDKVLDEYEEEKRHLQEMANSLPHFKDGREKTVNQQCQNTVVLWENTKALVTECLEQCGRVLELLKQYQNFKSILTTLIQKEESVISLQASYMGKENLKKRIAEIEIVKEEFNEHLEVVDKINQVCKNLQFYLNKMKTFEEPPFEKEANIIVDRWLDINEKTEDYYENLGRALALWDKLFNLKNVIDEWTEKALQKMELHQLTEEDRERLKEELQVHEQKTSEFSRRVAEIQFLLQSSEIPLELQVMESSILNKMEHVQKCLTGESNCHALSGSTAELREDLDQAKTQIGMTESLLKALSPSDSLEIFTKLEEIQQQILQQKHSMILLENQIGCLTPELSELKKQYESVSDLFNTKKSVLQDHFSKLLNDQCKNFNDWFSNIKVNLKECFESSETKKSVEQKLQKLSDFLTLEGRNSKIKQVDSVLKHVKKHLPKAHVKELISWLVGQEFELEKMESICQARAKELEDSLQQLLRLQDDHRNLRKWLTNQEEKWKGMEEPGEKTELFCQALARKREQFESVAQLNNSLKEYGFTEEEEIIMEATCLMDRYQTLLRQLSEIEEEDKLLPTEDQSFNDLAHDVIHWIKEIKESLMVLNSSEGKMPLEERIQKIKEIILLKPEGDARIETIMKQAESSEAPLVQKTLTDISNQWDNTLHLASTYLSHQEKLLLEGEKYLQSKEDLRLMLIELKKKQEAGFALQHGLQEKKAQLKIYKKFLKKAQDLTSLLKELKSQGNYLLECTKNPSFSEEPWLEIKHLHESLLQQLQDSVQNLDGHVREHDSYQVCVTDLNTTLDNFSKEFVSFSDKPVDQIAVEEKLQKLQELENRLSLQDGTLKKILALAKSVKQNTSSVGQKIIKDDIKSLQCKQKDLENRLASAKQEMECCLNSILKSKRSTEKKGKFTLPGREKQATSDVQESTQESAAVEKLEEDWEINKNFVENVMAVSKNCHHSMYIFESIVKNFISDEMQDSAVEMAMSKQLSLNAQESMKNTEDERKVNELQNQPLELDTMLRNEQLEEIEKLYTQLEAKKAAIKPLEQTECLNKTETGALVLHNIGYSAQHLDNLLQALITLKKNKESQYCVLRDFQEYLAAVESSMKALLTDKESLKVGPLDSVTYLDKIKKFIASIEKEKDSLGNLKIKWENLSNHVTDMDKKLLESQIKQLEHGWEQVEQQIQKKYSQQVVEYDEFTTLMNKVQDTEISLQQQQQHLQLRLKSPEERAGNQSMIALTTDLQATKHGFSVLKGQAELQMKRIWGEKEKKNLEDGINNLKKQWETLEPLHLEAENQIKKCDIRNKMKETILWAKNLLGELNPSIPLLPDDILSQIRKCKVTHDGILARQQSVESLAEEVKDKVPSLTTYEGSDLNNTLEDLRNQYQMLVLKSTQRSQQLEFKLEERSNFFAIIRKFQLMVQESETLIIPRVETAATEAELKHHHVTLEASQKELQEIDSGISTHLQELTNIYEELNVFERLFLEDQLKNLKIRTNRIQRFIQNTCNEVEHKIKFCRQFHEKTSALQEEADSIQRNELLLNQEVNKGVKEEIYNLKDRLTAIKCCILQVLKLKKVFDYIGLNWDFSQLDQLQTQVFEKEKELEEKIKQLDTFEEEHGKYQALLSKMRAIDLQIKKMTEVVLKAPDSSPESRRLNAQILSQRIEKAKCLCDEIIKKLNENKTFDDSFKEKEILQIKLNAEENDKLYKVLQNMVLELSPKELDEKNCQDKLETSLHVLNQIKSQLQQPLLINLEIKHIQNEKDNCEAFQEQVWAEMCSIKAVTAIEKQREENSSEASDVETKLREFEDLQMQLNTSIDLRTNVLNDAYENLTRYKEAVTRAVESITSLEAIIIPYRVDVGNPEESLEMPLRKQEELESTVAHIQDLTEKLGMISSPEAKLQLQYTLQELVSKNSAMKEAFKAQETEAERYLENYKCYRKMEEDIYTNLSKMETVLGQSMSSLPLSYREALERLEQSKALVSNLISTKEELMKLRQILRLLRLRCTENDGICLLKIVSALWEKWLSLLEAAKEWEMWCEELKQEWKFVSEEIEREAIILDNLQEELPEISKTKEAATTEELSELLDCLCQYGENVEKQQLLLTLLLQRIRSIQNVPESSGAVETVPAFQEITSMKERCNKLLQKVQKNKELVQTEIQERHSFTKEIIALKNFFQQTTTSFQNMAFQDHPEKSEQFEELQSILKKGKLTFENIMEKLRIKYSEMYTIVPAEIESQVEECRKALEDIDEKISNEVLKSSPSYAMRRKIEEINNGLHNVEKMLQQKSKNIEKAQEIQKKMWDELDLWHSKLNELDSEVQDIVEQDPGQAQEWMDNLMIPFQQYQQVSQRAECRTSQLNKATVKMEEYSDLLKSTEAWIENTSHLLANPADYDSLRTLSHHASTVQMALEDSEQKHNLLHSIFMDLEDLSIIFETDELTQSIQELSNQVTALQQKIMESLPQIQRMADDVVAIESEVKSMEKRVSKIKTILLSKEIFDFSPEEHLKHGEVILENIRPMKKTIAEIVSYQVELRLPQTGMKPLPVFQRTNQLLQDIKLLENVTQEQNELLKVVIKQTNEWDEEIENLKQILNNYSAQFSLEHMSPDQADKLPQLQGEIERMEKQILSLNQRKEDLLVDLKATVLNLHQHLKQEQEGVERDRLPAVTSEEGGVAERDASERKLNRRGSMSYLAAVEEEVEESSVKSDHDKDMEEDRASSSSGTIVQEAYGKISTSDNSMAQILTPDSLNTEQGPECSLRPNQTEEGTTPPIEADTLDSSDAQGGLEPRVEKTRPEPTEVLHACKTQVAELELWLQQANVAVEPETLNADMQQVLEQQLVGCQAMLTEIEHKVAFLLETCKDQGLGDNGATQHEAEALSLKLKTVKCNLEKVQMMLQEKHSEDQHPTILKKSSEPEHQEALQPVNLSELESIVTERPQFSRQKDFQQQQVLELKPMEQKDFIKFIEFNAKKMWPQYCQHDNDTTQESSARYPTTEELKTYTTQLEDLRQEASNLQTQENMTEEAYINLDKKLFELFLTLSQCLSSVEEMLEMPRLYREDGSGQQVHYETLALELKKLYLALSDKKGDLLKAMTWPGENTNLLLECFDNLQVCLEHTQAAAVCRSKSLKAGLDYNRSYQKADAYTVELENAESRVAKLRDEGERLHLPYALLQEVYKLEDVLDSMWGMLRARYTELSSPFVTESQQDALLQGMVELVKIGKEKLAHGHLKQTKSKVALQAQIENHKVFFQKLVADMLLIQAYSAKILPSLLQNRETFWAEQVTEVKILEEKSRQCGMKLQSLLQKWEEFDENYASLEKDLEILISTLPSVSLVEETEERLVERISFYQQIKRNIGGKHARLYQTLNEGKQLVASVSCPELEGQIAKLEEQWLSLNKKIDHELHRLQALLKHLLSYNRDSDQLTKWLESSQHTLNYWKEQSLNVSQDLDTIRSNINNFFEFSKEVDEKSSLKTAVISIGNQLLHLKETDTATLRASLAQFEQKWTMLITQLPDIQEKLHQLQMEKLPSRKAITEMISWMNNVEHQTSDEDSVHSPSSASQVKHLLQKHKEFRMEMDYKQWIVDFVNQSLLQLSTCDVESKRYERTEFAEHLGEMNRQWHRVHGMLNRKIQHLEQLLESITESENKIQILNNWLEAQEERLKTLQKPESVISVQKLLLDCQDIENQLAIKSKALDELKQSYLTLESGAVPLLEDTASRIDELFQKRSSVLTQVNQLKTSMQSVLQEWKIYDQLYDEVNMMTIRFWYCMEHSKPVVLSLETLRCQVENLQSLQDEAESSEGSWEKLQEVIGKLKGLCPSVAEIIEEKCQNTHKRWTQVNQAIADQLQKAQSLLQLWKAYSNAHGEAAARLKQQEAKFQQLANISMSGNNLAEILPPALQDIKELQHDVQKTKEAFLQNSSVLDRLPQPAESSTHMLLPGPLHSLQRAAYLEKMLLVKANEFENHVLALTAQSPDIEHLNEVSLKLPLSDVAVKTLQNMNRQWIRATATALERCSELQGIGLNEKFLYCCEKWIQLLEKIEEALKVDVANSLPELLEQQKTYKMLEAEVSINQTIADSYVTQSLQLLDTTEIENRPEFITEFSKLTDRWQNAVQGVRQRKGDVDGLNAHVARCGGASLKKQDLRYSLHTACGAALLCRSSHGANKEIHFQRRRTTCALTLEAGEKLLLTTDLKTKESVGRRISQLQDSWKDMEPQLAEMIKQFQSTVETWDQCEKKIKELKSRLQVLKAQSEDPLPELHEDLHNEKELIKVAIRKQEIEDRLNTWVVFNEKNKELCAWLVQMENKVLQTADISIEEMIEKLQKRTVGREEVPERWECETIVSGHGTEESCFLSIRKFHQGRGLHILTCQLIPQDCMEEINLFSENKLQLKQMGDQLIKASNKSRAAEIDDKLNKINDRWQHLFDVIGSSMADQTNSRWMFFQWPRGIQRTVTWPWDHLCSCASTGHTGPFHSSVLRCFEQHIEFGIYRRTYKVNKELGGDKNGQRCPIIYPHGLVQCIRLGEPLILKRVKKLKETFAFIQQLDKNMSNLRTWLARIESELSKPVVYDVCDDQEIQKRLAEQQDLQRDIEQHSAGVESVFNICDVLLHDSDACANETECDSIQQTTRSLDRRWRNICAMSMERRMKIEETWRLWQKFLDDYSRFEDWLKSAERTAACPNSSEVLYTSAKEELKRFERQIHERLTQLELINKQYRRLARENRTDTASRLKQMVHEGNQRWDNLQRRVTAVLRRLRHFTNQREEFEGTRESILVWLTEMDLQLTNVEHFSESDADDKMRQLNGFQQEITLNTNKIDQLIVFGEQLIQKSEPLDAVLIEDELEELHRYCQEGLEDEKEASENETDMEDPREIQTDSWRKRGESEEPSSPQSLCHLVAPGHERSGCETPVSVDSIPLEWDHTGDVGGSSSHEEDEEGPYYSALSGKSISDGHSWHVPDSPSCPEHHYKQMEGDRNVPPVPPASSTPYKPPYVSLNFTGSTAYVCAFDRWEMIQAQELHNKLKIKQNLQQLNSDISAITTWLKKTEAELEMLKMAKPPSDIQEIELRVKRLQEILKAFDTYKALVVSVNVSSKEFLQTESPESTELQSRLRQLSLLWEAAQGAVDSWRGGLRQSLMQCQDFHQLSQNLLLWLASAKNRRQKAHVTDPKADPRALLECRRELMQLEKELVERQPQVDMLQEISNSLLIKGHGEDCIEAEEKVHVIEKKLKQLREQVSQDLMALQGTQNPASPLPSFDEVDSGDQPPATSVPAPRAKFLYPAVQSSENYRRRGGDREQGPRQHTATALLPLKGGPGSPTPAAAPPAAAAPGLPAALLRRRLQLHSGQQLCPVLLPHAEVHQWATPHIEGIAGHSATPPA

SEQ ID NO: 82891 - protein, 975 aa, Homo sapiens
  Payload ID: 16496
  Gene Symbol: SYNE3
  Gene Name: spectrin repeat containing, nuclear envelope family member 3
  Uniprot ID: Q6ZMZ3
  ENSP ID: ENSP00000334308
MTQQPQDDFDRSVEDAQAWMKAVQDQLQVNDNTQGPRAALEARLWETEKICQLEPEGRVRVDLVLRMAEALLACCPGDQKPGILARLKDIKAQWEETVTYMTHCHSRIEWVWLHWSEYLLARDEFYRWFQKMMVTLEPHIELQLGLKEKQWQLSHAQVLLHNVDNQAVLLDRLLEEAASLFNRIGDPSVDEDAQKRMKAEYDAVKAKAQKRVDLLEQVAREHEEYQAGVDEFQLWLKAVVEKVNGCLGRNCKLPITQRLSTLQDIAKDFPRGEESLETLEEQSAGVIRNTSPLGAEKITGELEEMRKVLEKLRALWEEEEERLRGLLRSRGAWEQQIKQLEAELSEFRMVLQRLAQEGLQPAAKAGTEDELVAHWRRYSATRAALASEEPRVDRLQAQLKELIVFPHNLKPLSDSVIATIQEYQSLKVKSARLRNAAAVELWQHFQRPLQDLQLWKALAQRLLEVTASLPDLPSLHTFLPQIEAALMESSRLKELLTMLQLKKDLLIGIFGQERATALLEQVAGSMRDRDLLHNSLLQRKSKLQSLLAQHKDFGAAFEPLQRKLLDLQVRVQAEKGLQRDLPGKQAQLSRLQGLQEEGLDLGAQMEAARPLVQENPNHQHKMDQLSSDFQALQRSLEDLVDRCRQSVQEHCTFSHQLLELRQWIVVTTQKLEAHRGEAGPGDAESQEAEFERLVAEFPEKEAQLSLVEAQGWLVMEKSSPEGAAVVQEELRELAESWRALRLLEESLLSLIRNWHLQRMEVDSGKKMVFTNNIPKSGFLINPMDPIPRHRRRANLLQEEEGSHEDFSQLLRNFGQWLQVENSKLVRIIAMRTSTAEDLRTRKSKLQELEARVPEGQHLFENLLRLGPARGTSDELEDLRYQWMLYKSKLKDSGHLLTQSSPGEPTGFQKTRRWRGLGSLFRRACCVALPLQLLLLLFLLLLFLLPIREEDRSCTLANNFARSFTLMLRYNGPPPT

SEQ ID NO: 82892 - protein, 970 aa, Homo sapiens
  Payload ID: 16496
  Gene Symbol: SYNE3
  Gene Name: spectrin repeat containing, nuclear envelope family member 3
  Uniprot ID: Q6ZMZ3
  ENSP ID: ENSP00000450562
MTQQPQDDFDRSVEDAQAWMKAVQDQLQVNDNTQGPRAALEARLWETEKICQLEPEGRVRVDLVLRMAEALLACCPGDQKPGILARLKDIKAQWEETVTYMTHCHSRIEWVWLHWSEYLLARDEFYRWFQKMMVTLEPHIELQLGLKEKQWQLSHAQVLLHNVDNQAVLLDRLLEEAASLFNRIGDPSVDEDAQKRMKAEYDAVKAKAQKRVDLLEQVAREHEEYQAGVDEFQLWLKAVVEKVNGCLGRNCKLPITQRLSTLQDIAKDFPRGEESLETLEEQSAGVIRNTSPLGAEKITGELEEMRKVLEKLRALWEEEEERLRGLLRSRGAWEQQIKQLEAELSEFRMVLQRLAQEGLQPAAKAGTEDELVAHWRRYSATRAALASEEPRVDRLQAQLKELIVFPHNLKPLSDSVIATIQEYQSLKVKSARLRNAAAVELWQHFQRPLQDLQLWKALAQRLLEVTASLPDLPSLHTFLPQIEAALMESSRLKELLTMLQLKKDLLIGIFGQERATALLEQVAGSMRDRDLLHNSLLQRKSKLQSLLAQHKDFGAAFEPLQRKLLDLQVRVQAEKGLQRDLPGKQAQLSRLQGLQEEGLDLGAQMEAARPLVQENPNHQHKMDQLSSDFQALQRSLEDLVDRCRQSVQEHCTFSHQLLELRQWIVVTTQKLEAHRGEAGPGDAESQEAEFERLVAEFPEKEAQLSLVEAQGWLVMEKSSPEGAAVVQEELRELAESWRALRLLEESLLSLIRNWHLQRMEVDSGKKMVFTNNIPKSGFLINPMDPIPRHRRREEEGSHEDFSQLLRNFGQWLQVENSKLVRIIAMRTSTAEDLRTRKSKLQELEARVPEGQHLFENLLRLGPARGTSDELEDLRYQWMLYKSKLKDSGHLLTQSSPGEPTGFQKTRRWRGLGSLFRRACCVALPLQLLLLLFLLLLFLLPIREEDRSCTLANNFARSFTLMLRYNGPPPT

SEQ ID NO: 82893 - protein, 596 aa, Homo sapiens
  Payload ID: 16496
  Gene Symbol: SYNE3
  Gene Name: spectrin repeat containing, nuclear envelope family member 3
  Uniprot ID: Q6ZMZ3
  ENSP ID: ENSP00000450774
MTQQPQDDFDRSVEDAQAWMKAVQDQLQVNDNTQGPRAALEARLWETEKICQLEPEGRVRVDLVLRMAEALLACCPGDQKPGILARLKDIKAQWEETVTYMTHCHSRIEWVWLHWSEYLLARDEFYRWFQKMMVTLEPHIELQLGLKEKQWQLSHAQVLLHNVDNQAVLLDRLLEEAASLFNRIGDPSVDEDAQKRMKAEYDAVKAKAQKRVDLLEQVAREHEEYQAGVDEFQLWLKAVVEKVNGCLGRNCKLPITQRLSTLQDIAKDFPRGEESLETLEEQSAGVIRNTSPLGAEKITGELEEMRKVLEKLRALWEEEEERLRGLLRSRGAWEQQIKQLEAELSEFRMVLQRLAQEGLQPAAKAGTEDELVAHWRRYSATRAALASEEPRVDRLQAQLKELIVFPHNLKPLSDSVIATIQEYQSLKVKSARLRNAAAVELWQHFQRPLQDLQLWKALAQRLLEVTASLPDLPSLHTFLPQIEAALMESSRLKELLTMLQLKKDLLIGIFGQERATALLEQVAGSMRDRDLLHNSLLQRKSKLQSLLAQHKDFGAAFEPLQRKLLDLQVRVQAEKGLQRDLPGKQAQLSRLQVRGL

SEQ ID NO: 82894 - protein, 732 aa, Homo sapiens
  Payload ID: 16496
  Gene Symbol: SYNE3
  Gene Name: spectrin repeat containing, nuclear envelope family member 3
  ENSP ID: ENSP00000452154
MQQLYSFSLPVFPSPLYPLQDIAKDFPRGEESLETLEEQSAGVIRNTSPLGAEKITGELEEMRKVLEKLRALWEEEEERLRGLLRSRGAWEQQIKQLEAELSEFRMVLQRLAQEGLQPAAKAGTEDELVAHWRRYSATRAALASEEPRVDRLQAQLKELIVFPHNLKPLSDSVIATIQEYQSLKVKSARLRNAAAVELWQHFQRPLQDLQLWKALAQRLLEVTASLPDLPSLHTFLPQIEAALMESSRLKELLTMLQLKKDLLIGIFGQERATALLEQVAGSMRDRDLLHNSLLQRKSKLQSLLAQHKDFGAAFEPLQRKLLDLQVRVQAEKGLQRDLPGKQAQLSRLQGLQEEGLDLGAQMEAARPLVQENPNHQHKMDQLSSDFQALQRSLEDLVDRCRQSVQEHCTFSHQLLELRQWIVVTTQKLEAHRGEAGPGDAESQEAEFERLVAEFPEKEAQLSLVEAQGWLVMEKSSPEGAAVVQEELRELAESWRALRLLEESLLSLIRNWHLQRMEVDSGKKMVFTNNIPKSGFLINPMDPIPRHRRRANLLQEEEGSHEDFSQLLRNFGQWLQVENSKLVRIIAMRTSTAEDLRTRKSKLQELEARVPEGQHLFENLLRLGPARGTSDELEDLRYQWMLYKSKLKDSGHLLTQSSPGEPTGFQKTRRWRGLGSLFRRACCVALPLQLLLLLFLLLLFLLPIREEDRSCTLANNFARSFTLMLRYNGPPPT

SEQ ID NO: 82895 - protein, 404 aa, Homo sapiens
  Payload ID: 16497
  Gene Symbol: SYNE4
  Gene Name: spectrin repeat containing, nuclear envelope family member 4
  Uniprot ID: Q8N205
  ENSP ID: ENSP00000316130
MALSLPLGPRLGSEPLNHPPGAPREADIVGCTVCPASGEESTSPEQAQTLGQDSLGPPEHFQGGPRGNEPAAHPPRWSTPSSYEDPAGGKHCEHPISGLEVLEAEQNSLHLCLLGLGRRLQDLEQGLGHWALAQSGMVQLQALQVDLRGAAERVEALLAFGEGLAQRSEPRAWAALEQILRALGAYRDSIFRRLWQLQAQLVSYSLVFEEANTLDQDLEVEGDSDWPGPGGVWGPWAPSSLPTSTELEWDPAGDIGGLGPLGQKTARTLGVPCELCGQRGPQGRGQGLEEADTSHSRQDMLESGLGHQKRLARHQRHSLLRKPQDKKRQASPHLQDVRLEGNPGAPDPASRQPLTFLLILFLLFLLLVGAMFLLPASGGPCCSHARIPRTPYLVLSYVNGLPPV

SEQ ID NO: 82896 - protein, 291 aa, Homo sapiens
  Payload ID: 16497
  Gene Symbol: SYNE4
  Gene Name: spectrin repeat containing, nuclear envelope family member 4
  Uniprot ID: Q8N205
  ENSP ID: ENSP00000343152
MALSLPLGPRLGSEPLNHPPGAPREADIVGCTVCPASGEESTSPEQAQTLGQDSLGPPEHFQGGPRGNEPAAHPPRWSTPSSYEDPAGGKHCEVFEEANTLDQDLEVEGDSDWPGPGGVWGPWAPSSLPTSTELEWDPAGDIGGLGPLGQKTARTLGVPCELCGQRGPQGRGQGLEEADTSHSRQDMLESGLGHQKRLARHQRHSLLRKPQDKKRQASPHLQDVRLEGNPGAPDPASRQPLTFLLILFLLFLLLVGAMFLLPASGGPCCSHARIPRTPYLVLSYVNGLPPV

SEQ ID NO: 82897 - protein, 118 aa, Homo sapiens
  Payload ID: 16497
  Gene Symbol: SYNE4
  Gene Name: spectrin repeat containing, nuclear envelope family member 4
  ENSP ID: ENSP00000380572
MHRLPRVRRGEHEEADTSHSRQDMLESGLGHQKRLARHQRHSLLRKPQGPRSCIQAASDLPPYPLPPLPPPGGCHVSPARVRRPLLLSCPNTQDTLPGAQLCQWSSPSLMCVINGHCQ

SEQ ID NO: 82898 - protein, 354 aa, Homo sapiens
  Payload ID: 16497
  Gene Symbol: SYNE4
  Gene Name: spectrin repeat containing, nuclear envelope family member 4
  ENSP ID: ENSP00000422716
MALSLPLGPRLGSEPLNHPPGAPREADIVGCTVCPASGEESTSPEQAQTLGQDSLGPPEHFQGGPRGNEPAAHPPRWSTPSSYEDPAGGKHCEHPISGLEVLEAEQNSLHLCLLGLGRRLQDLEQGLGHWALAQSGMVQLQALQVDLRGAAERVEALLAFGEGLAQRSEPRAWAALEQILRALGAYRDSIFRRLWQLQAQLVSYSLVFEEANTLDQDLEVEGDSDWPGPGSRHLSLPTGHAGVWPRPPETLSTSPKTLPAPEASGQEEASISSSPGCEAGGESRGPRSCIQAASDLPPYPLPPLPPPGGCHVSPARVRRPLLLSCPNTQDTLPGAQLCQWSSPSLMCVINGHCQ

SEQ ID NO: 82899 - protein, 151 aa, Homo sapiens
  Payload ID: 16497
  Gene Symbol: SYNE4
  Gene Name: spectrin repeat containing, nuclear envelope family member 4
  ENSP ID: ENSP00000425550
  MOD_RES (1)..(1): Any amino acid
XEPLNHPPGAPREADIVGCTVCPASGEESTSPEQAQTLGQDSLGPPEHFQGGPRGNEPAAHPPRWSTPSSYEDPAGGKHCEGPRSCIQAASDLPPYPLPPLPPPGGCHVSPARVRRPLLLSCPNTQDTLPGAQLCQWSSPSLMCVINGHCQ

SEQ ID NO: 82900 - protein, 2419 aa, Homo sapiens
  Payload ID: 16498
  Gene Symbol: SPTA1
  Gene Name: spectrin, alpha, erythrocytic 1
  Uniprot ID: P02549
  ENSP ID: ENSP00000357129
MEQFPKETVVESSGPKVLETAEEIQERRQEVLTRYQSFKERVAERGQKLEDSYHLQVFKRDADDLGKWIMEKVNILTDKSYEDPTNIQGKYQKHQSLEAEVQTKSRLMSELEKTREERFTMGHSAHEETKAHIEELRHLWDLLLELTLEKGDQLLRALKFQQYVQECADILEWIGDKEAIATSVELGEDWERTEVLHKKFEDFQVELVAKEGRVVEVNQYANECAEENHPDLPLIQSKQNEVNAAWERLRGLALQRQKALSNAANLQRFKRDVTEAIQWIKEKEPVLTSEDYGKDLVASEGLFHSHKGLERNLAVMSDKVKELCAKAEKLTLSHPSDAPQIQEMKEDLVSSWEHIRALATSRYEKLQATYWYHRFSSDFDELSGWMNEKTAAINADELPTDVAGGEVLLDRHQQHKHEIDSYDDRFQSADETGQDLVNANHEASDEVREKMEILDNNWTALLELWDERHRQYEQCLDFHLFYRDSEQVDSWMSRQEAFLENEDLGNSLGSAEALLQKHEDFEEAFTAQEEKIITVDKTATKLIGDDHYDSENIKAIRDGLLARRDALREKAATRRRLLKESLLLQKLYEDSDDLKNWINKKKKLADDEDYKDIQNLKSRVQKQQVFEKELAVNKTQLENIQKTGQEMIEGGHYASDNVTTRLSEVASLWEELLEATKQKGTQLHEANQQLQFENNAEDLQRWLEDVEWQVTSEDYGKGLAEVQNRLRKHGLLESAVAARQDQVDILTDLAAYFEEIGHPDSKDIRARQESLVCRFEALKEPLATRKKKLLDLLHLQLICRDTEDEEAWIQETEPSATSTYLGKDLIASKKLLNRHRVILENIASHEPRIQEITERGNKMVEEGHFAAEDVASRVKSLNQNMESLRARAARRQNDLEANVQFQQYLADLHEAETWIREKEPIVDNTNYGADEEAAGALLKKHEAFLLDLNSFGDSMKALRNQANACQQQQAAPVEGVAGEQRVMALYDFQARSPREVTMKKGDVLTLLSSINKDWWKVEAADHQGIVPAVYVRRLAHDEFPMLPQRRREEPGNITQRQEQIENQYRSLLDRAEERRRRLLQRYNEFLLAYEAGDMLEWIQEKKAENTGVELDDVWELQKKFDEFQKDLNTNEPRLRDINKVADDLLFEGLLTPEGAQIRQELNSRWGSLQRLADEQRQLLGSAHAVEVFHREADDTKEQIEKKCQALSAADPGSDLFSVQALQRRHEGFERDLVPLGDKVTILGETAERLSESHPDATEDLQRQKMELNEAWEDLQGRTKDRKESLNEAQKFYLFLSKARDLQNWISSIGGMVSSQELAEDLTGIEILLERHQEHRADMEAEAPTFQALEDFSAELIDSGHHASPEIEKKLQAVKLERDDLEKAWEKRKKILDQCLELQMFQGNCDQVESWMVARENSLRSDDKSSLDSLEALMKKRDDLDKAITAQEGKITDLEHFAESLIADEHYAKEEIATRLQRVLDRWKALKAQLIDERTKLGDYANLKQFYRDLEELEEWISEMLPTACDESYKDATNIQRKYLKHQTFAHEVDGRSEQVHGVINLGNSLIECSACDGNEEAMKEQLEQLKEHWDHLLERTNDKGKKLNEASRQQRFNTSIRDFEFWLSEAETLLAMKDQARDLASAGNLLKKHQLLEREMLAREDALKDLNTLAEDLLSSGTFNVDQIVKKKDNVNKRFLNVQELAAAHHEKLKEAYALFQFFQDLDDEESWIEEKLIRVSSQDYGRDLQGVQNLLKKHKRLEGELVAHEPAIQNVLDMAEKLKDKAAVGQEEIQLRLAQFVEHWEKLKELAKARGLKLEESLEYLQFMQNAEEEEAWINEKNALAVRGDCGDTLAATQSLLMKHEALENDFAVHETRVQNVCAQGEDILNKVLQEESQNKEISSKIEALNEKTPSLAKAIAAWKLQLEDDYAFQEFNWKADVVEAWIADKETSLKTNGNGADLGDFLTLLAKQDTLDASLQSFQQERLPEITDLKDKLISAQHNQSKAIEERYAALLKRWEQLLEASAVHRQKLLEKQLPLQKAEDLFVEFAHKASALNNWCEKMEENLSEPVHCVSLNEIRQLQKDHEDFLASLARAQADFKCLLELDQQIKALGVPSSPYTWLTVEVLERTWKHLSDIIEEREQELQKEEARQVKNFEMCQEFEQNASTFLQWILETRAYFLDGSLLKETGTLESQLEANKRKQKEIQAMKRQLTKIVDLGDNLEDALILDIKYSTIGLAQQWDQLYQLGLRMQHNLEQQIQAKDIKGVSEETLKEFSTIYKHFDENLTGRLTHKEFRSCLRGLNYYLPMVEEDEHEPKFEKFLDAVDPGRKGYVSLEDYTAFLIDKESENIKSSDEIENAFQALAEGKSYITKEDMKQALTPEQVSFCATHMQQYMDPRGRSHLSGYDYVGFTNSYFGN

SEQ ID NO: 82901 - protein, 124 aa, Homo sapiens
  Payload ID: 16498
  Gene Symbol: SPTA1
  Gene Name: spectrin, alpha, erythrocytic 1
  ENSP ID: ENSP00000476485
MEQFPKETVVESSGPKVLETAEEIQERRQEVLTRYQSFKERVAEENHPDLPLIQSKQNEVNAAWERLRGLALQRQKALSNAANLQRFKRDVTEAIQWIKEKEPVLTSEDYGKDLVASEGLFHSH

SEQ ID NO: 82902 - protein, 2430 aa, Homo sapiens
  Payload ID: 16498
  Gene Symbol: SPTA1
  Gene Name: spectrin, alpha, erythrocytic 1
  ENSP ID: ENSP00000482595
MEQFPKETVVESSGPKVLETAEEIQERRQEVLTRYQSFKERVAERGQKLEDSYHLQVFKRDADDLGKWIMEKVNILTDKSYEDPTNIQGKYQKHQSLEAEVQTKSRLMSELEKTREERFTMGHSAHEETKAHIEELRHLWDLLLELTLEKGDQLLRALKFQQYVQECADILEWIGDKEAIATSVELGEDWERTEVLHKKFEDFQVELVAKEGRVVEVNQYANECAEENHPDLPLIQSKQNEVNAAWERLRGLALQRQKALSNAANLQRFKRDVTEAIQWIKEKEPVLTSEDYGKDLVASEGLFHSHKGLERNLAVMSDKVKELCAKAEKLTLSHPSDAPQIQEMKEDLVSSWEHIRALATSRYEKLQATYWYHRFSSDFDELSGWMNEKTAAINADELPTDVAGGEVLLDRHQQHKHEIDSYDDRFQSADETGQDLVNANHEASDEVREKMEILDNNWTALLELWDERHRQYEQCLDFHLFYRDSEQVDSWMSRQEAFLENEDLGNSLGSAEALLQKHEDFEEAFTAQEEKIITVDKTATKLIGDDHYDSENIKAIRDGLLARRDALREKAATRRRLLKESLLLQKLYEDSDDLKNWINKKKKLADDEDYKDIQNLKSRVQKQQVFEKELAVNKTQLENIQKTGQEMIEGGHYASDNVTTRLSEVASLWEELLEATKQKGTQLHEANQQLQFENNAEDLQRWLEDVEWQVTSEDYGKGLAEVQNRLRKHGLLESAVAARQDQVDILTDLAAYFEEIGHPDSKDIRARQESLVCRFEALKEPLATRKKKLLDLLHLQLICRDTEDEEAWIQETEPSATSTYLGKDLIASKKLLNRHRVILENIASHEPRIQEITERGNKMVEEGHFAAEDVASRVKSLNQNMESLRARAARRQNDLEANVQFQQYLADLHEAETWIREKEPIVDNTNYGADEEAAGALLKKHEAFLLDLNSFGDSMKALRNQANACQQQQAAPVEGVAGEQRVMALYDFQARSPREVTMKKGDVLTLLSSINKDWWKVEAADHQGIVPAVYVRRLAHDEFPMLPQRRREEPGNITQRQEQIENQYRSLLDRAEERRRRLLQRYNEFLLAYEAGDMLEWIQEKKAENTGVELDDVWELQKKFDEFQKDLNTNEPRLRDINKVADDLLFEGLLTPEGAQIRQELNSRWGSLQRLADEQRQLLGSAHAVEVFHREADDTKEQIEKKCQALSAADPGSDLFSVQALQRRHEGFERDLVPLGDKVTILGETAERLSESHPDATEDLQRQKMELNEAWEDLQGRTKDRKESLNEAQKFYLFLSKARDLQNWISSIGGMVSSQELAEDLTGIEILLERHQEHRADMEAEAPTFQALEDFSAELIDSGHHASPEIEKKLQAVKLERDDLEKAWEKRKKILDQCLELQMFQGNCDQVESWMVARENSLRSDDKSSLDSLEALMKKRDDLDKAITAQEGKITDLEHFAESLIADEHYAKEEIATRLQRVLDRWKALKAQLIDERTKLGDYANLKQFYRDLEELEEWISEMLPTACDESYKDATNIQRKYLKHQTFAHEVDGRSEQVHGVINLGNSLIECSACDGNEEAMKEQLEQLKEHWDHLLERTNDKGKKLNEASRQQRFNTSIRDFEFWLSEAETLLAMKDQARDLASAGNLLKKHQLLEREMLAREDALKDLNTLAEDLLSSGTFNVDQIVKKKDNVNKRFLNVQELAAAHHEKLKEAYALFQFFQDLDDEESWIEEKLIRVSSQDYGRDLQGVQNLLKKHKRLEGELVAHEPAIQNVLDMAEKLKDKAAVGQEEIQLRLAQFVEHWEKLKELAKARGLKLEESLEYLQFMQNAEEEEAWINEKNALAVRGDCGDTLAATQSLLMKHEALENDFAVHETRVQNVCAQGEDILNKVLQEESQNKEISSKIEALNEKTPSLAKAIAAWKLQLEDDYAFQEFNWKADVVEAWIADKETSLKTNGNGADLGDFLTLLAKQDTLDASLQSFQQERLPEITDLKDKLISAQHNQSKAIEERYAALLKRWEQLLEASAVHRQKLLEKQLPLQKAEDLFVEFAHKASALNNWCEKMEENLSEPVHCVSLNEIRQLQKDHEDFLASLARAQADFKCLLELDQQIKALGVPSSPYTWLTVEVLERTWKHLSDIIEEREQELQKEEARQVKNFEMCQEFEQNASTFLQWILETRAYFLDGSLLKETGTLESQLEANKRKQKEIQAMKRQLTKIVDLGDNLEDALILDIKYSTIGLAQQWDQLYQLGLRMQHNLEQQIQAKDIKGVSEETLKEFSTIYKHFDENLTGRLTHKEFRSCLRGLNYYLPMVEEDEHEPKFEKFLDAVDPGRKGYVSLEDYTAFLIDKESENIKSSDEIENAFQALAEGKSYITKEDMKQALTPEQVSFCATHMQQYMDPRVEAISLAMTTLASPIPTLATNKQLLVDRRKS

SEQ ID NO: 82903 - protein, 2452 aa, Homo sapiens
  Payload ID: 16499
  Gene Symbol: SPTAN1
  Gene Name: spectrin, alpha, non-erythrocytic 1
  Uniprot ID: Q13813
  ENSP ID: ENSP00000350882
MDPSGVKVLETAEDIQERRQQVLDRYHRFKELSTLRRQKLEDSYRFQFFQRDAEELEKWIQEKLQIASDENYKDPTNLQGKLQKHQAFEAEVQANSGAIVKLDETGNLMISEGHFASETIRTRLMELHRQWELLLEKMREKGIKLLQAQKLVQYLRECEDVMDWINDKEAIVTSEELGQDLEHVEVLQKKFEEFQTDMAAHEERVNEVNQFAAKLIQEQHPEEELIKTKQDEVNAAWQRLKGLALQRQGKLFGAAEVQRFNRDVDETISWIKEKEQLMASDDFGRDLASVQALLRKHEGLERDLAALEDKVKALCAEADRLQQSHPLSATQIQVKREELITNWEQIRTLAAERHARLNDSYRLQRFLADFRDLTSWVTEMKALINADELASDVAGAEALLDRHQEHKGEIDAHEDSFKSADESGQALLAAGHYASDEVREKLTVLSEERAALLELWELRRQQYEQCMDLQLFYRDTEQVDNWMSKQEAFLLNEDLGDSLDSVEALLKKHEDFEKSLSAQEEKITALDEFATKLIQNNHYAMEDVATRRDALLSRRNALHERAMRRRAQLADSFHLQQFFRDSDELKSWVNEKMKTATDEAYKDPSNLQGKVQKHQAFEAELSANQSRIDALEKAGQKLIDVNHYAKDEVAARMNEVISLWKKLLEATELKGIKLREANQQQQFNRNVEDIELWLYEVEGHLASDDYGKDLTNVQNLQKKHALLEADVAAHQDRIDGITIQARQFQDAGHFDAENIKKKQEALVARYEALKEPMVARKQKLADSLRLQQLFRDVEDEETWIREKEPIAASTNRGKDLIGVQNLLKKHQALQAEIAGHEPRIKAVTQKGNAMVEEGHFAAEDVKAKLHELNQKWEALKAKASQRRQDLEDSLQAQQYFADANEAESWMREKEPIVGSTDYGKDEDSAEALLKKHEALMSDLSAYGSSIQALREQAQSCRQQVAPTDDETGKELVLALYDYQEKSPREVTMKKGDILTLLNSTNKDWWKVEVNDRQGFVPAAYVKKLDPAQSASRENLLEEQGSIALRQEQIDNQYHSLLELGEKRKGMLEKSCKKFMLFREANELQQWINEKEAALTSEEVGADLEQVEVLQKKFDDFQKDLKANESRLKDINKVAEDLESEGLMAEEVQAVQQQEVYGMMPRDETDSKTASPWKSARLMVHTVATFNSIKELNERWRSLQQLAEERSQLLGSAHEVQRFHRDADETKEWIEEKNQALNTDNYGHDLASVQALQRKHEGFERDLAALGDKVNSLGETAERLIQSHPESAEDLQEKCTELNQAWSSLGKRADQRKAKLGDSHDLQRFLSDFRDLMSWINGIRGLVSSDELAKDVTGAEALLERHQEHRTEIDARAGTFQAFEQFGQQLLAHGHYASPEIKQKLDILDQERADLEKAWVQRRMMLDQCLELQLFHRDCEQAENWMAAREAFLNTEDKGDSLDSVEALIKKHEDFDKAINVQEEKIAALQAFADQLIAAGHYAKGDISSRRNEVLDRWRRLKAQMIEKRSKLGESQTLQQFSRDVDEIEAWISEKLQTASDESYKDPTNIQSKHQKHQAFEAELHANADRIRGVIDMGNSLIERGACAGSEDAVKARLAALADQWQFLVQKSAEKSQKLKEANKQQNFNTGIKDFDFWLSEVEALLASEDYGKDLASVNNLLKKHQLLEADISAHEDRLKDLNSQADSLMTSSAFDTSQVKDKRDTINGRFQKIKSMAASRRAKLNESHRLHQFFRDMDDEESWIKEKKLLVGSEDYGRDLTGVQNLRKKHKRLEAELAAHEPAIQGVLDTGKKLSDDNTIGKEEIQQRLAQFVEHWKELKQLAAARGQRLEESLEYQQFVANVEEEEAWINEKMTLVASEDYGDTLAAIQGLLKKHEAFETDFTVHKDRVNDVCTNGQDLIKKNNHHEENISSKMKGLNGKVSDLEKAAAQRKAKLDENSAFLQFNWKADVVESWIGEKENSLKTDDYGRDLSSVQTLLTKQETFDAGLQAFQQEGIANITALKDQLLAAKHVQSKAIEARHASLMKRWSQLLANSAARKKKLLEAQSHFRKVEDLFLTFAKKASAFNSWFENAEEDLTDPVRCNSLEEIKALREAHDAFRSSLSSAQADFNQLAELDRQIKSFRVASNPYTWFTMEALEETWRNLQKIIKERELELQKEQRRQEENDKLRQEFAQHANAFHQWIQETRTYLLDGSCMVEESGTLESQLEATKRKHQEIRAMRSQLKKIEDLGAAMEEALILDNKYTEHSTVGLAQQWDQLDQLGMRMQHNLEQQIQARNTTGVTEEALKEFSMMFKHFDKDKSGRLNHQEFKSCLRSLGYDLPMVEEGEPDPEFEAILDTVDPNRDGHVSLQEYMAFMISRETENVKSSEEIESAFRALSSEGKPYVTKEELYQNLTREQADYCVSHMKPYVDGKGRELPTAFDYVEFTRSLFVN

SEQ ID NO: 82904 - protein, 2472 aa, Homo sapiens
  Payload ID: 16499
  Gene Symbol: SPTAN1
  Gene Name: spectrin, alpha, non-erythrocytic 1
  Uniprot ID: Q13813
  ENSP ID: ENSP00000361816
MDPSGVKVLETAEDIQERRQQVLDRYHRFKELSTLRRQKLEDSYRFQFFQRDAEELEKWIQEKLQIASDENYKDPTNLQGKLQKHQAFEAEVQANSGAIVKLDETGNLMISEGHFASETIRTRLMELHRQWELLLEKMREKGIKLLQAQKLVQYLRECEDVMDWINDKEAIVTSEELGQDLEHVEVLQKKFEEFQTDMAAHEERVNEVNQFAAKLIQEQHPEEELIKTKQDEVNAAWQRLKGLALQRQGKLFGAAEVQRFNRDVDETISWIKEKEQLMASDDFGRDLASVQALLRKHEGLERDLAALEDKVKALCAEADRLQQSHPLSATQIQVKREELITNWEQIRTLAAERHARLNDSYRLQRFLADFRDLTSWVTEMKALINADELASDVAGAEALLDRHQEHKGEIDAHEDSFKSADESGQALLAAGHYASDEVREKLTVLSEERAALLELWELRRQQYEQCMDLQLFYRDTEQVDNWMSKQEAFLLNEDLGDSLDSVEALLKKHEDFEKSLSAQEEKITALDEFATKLIQNNHYAMEDVATRRDALLSRRNALHERAMRRRAQLADSFHLQQFFRDSDELKSWVNEKMKTATDEAYKDPSNLQGKVQKHQAFEAELSANQSRIDALEKAGQKLIDVNHYAKDEVAARMNEVISLWKKLLEATELKGIKLREANQQQQFNRNVEDIELWLYEVEGHLASDDYGKDLTNVQNLQKKHALLEADVAAHQDRIDGITIQARQFQDAGHFDAENIKKKQEALVARYEALKEPMVARKQKLADSLRLQQLFRDVEDEETWIREKEPIAASTNRGKDLIGVQNLLKKHQALQAEIAGHEPRIKAVTQKGNAMVEEGHFAAEDVKAKLHELNQKWEALKAKASQRRQDLEDSLQAQQYFADANEAESWMREKEPIVGSTDYGKDEDSAEALLKKHEALMSDLSAYGSSIQALREQAQSCRQQVAPTDDETGKELVLALYDYQEKSPREVTMKKGDILTLLNSTNKDWWKVEVNDRQGFVPAAYVKKLDPAQSASRENLLEEQGSIALRQEQIDNQTRITKEAGSVSLRMKQVEELYHSLLELGEKRKGMLEKSCKKFMLFREANELQQWINEKEAALTSEEVGADLEQVEVLQKKFDDFQKDLKANESRLKDINKVAEDLESEGLMAEEVQAVQQQEVYGMMPRDETDSKTASPWKSARLMVHTVATFNSIKELNERWRSLQQLAEERSQLLGSAHEVQRFHRDADETKEWIEEKNQALNTDNYGHDLASVQALQRKHEGFERDLAALGDKVNSLGETAERLIQSHPESAEDLQEKCTELNQAWSSLGKRADQRKAKLGDSHDLQRFLSDFRDLMSWINGIRGLVSSDELAKDVTGAEALLERHQEHRTEIDARAGTFQAFEQFGQQLLAHGHYASPEIKQKLDILDQERADLEKAWVQRRMMLDQCLELQLFHRDCEQAENWMAAREAFLNTEDKGDSLDSVEALIKKHEDFDKAINVQEEKIAALQAFADQLIAAGHYAKGDISSRRNEVLDRWRRLKAQMIEKRSKLGESQTLQQFSRDVDEIEAWISEKLQTASDESYKDPTNIQSKHQKHQAFEAELHANADRIRGVIDMGNSLIERGACAGSEDAVKARLAALADQWQFLVQKSAEKSQKLKEANKQQNFNTGIKDFDFWLSEVEALLASEDYGKDLASVNNLLKKHQLLEADISAHEDRLKDLNSQADSLMTSSAFDTSQVKDKRDTINGRFQKIKSMAASRRAKLNESHRLHQFFRDMDDEESWIKEKKLLVGSEDYGRDLTGVQNLRKKHKRLEAELAAHEPAIQGVLDTGKKLSDDNTIGKEEIQQRLAQFVEHWKELKQLAAARGQRLEESLEYQQFVANVEEEEAWINEKMTLVASEDYGDTLAAIQGLLKKHEAFETDFTVHKDRVNDVCTNGQDLIKKNNHHEENISSKMKGLNGKVSDLEKAAAQRKAKLDENSAFLQFNWKADVVESWIGEKENSLKTDDYGRDLSSVQTLLTKQETFDAGLQAFQQEGIANITALKDQLLAAKHVQSKAIEARHASLMKRWSQLLANSAARKKKLLEAQSHFRKVEDLFLTFAKKASAFNSWFENAEEDLTDPVRCNSLEEIKALREAHDAFRSSLSSAQADFNQLAELDRQIKSFRVASNPYTWFTMEALEETWRNLQKIIKERELELQKEQRRQEENDKLRQEFAQHANAFHQWIQETRTYLLDGSCMVEESGTLESQLEATKRKHQEIRAMRSQLKKIEDLGAAMEEALILDNKYTEHSTVGLAQQWDQLDQLGMRMQHNLEQQIQARNTTGVTEEALKEFSMMFKHFDKDKSGRLNHQEFKSCLRSLGYDLPMVEEGEPDPEFEAILDTVDPNRDGHVSLQEYMAFMISRETENVKSSEEIESAFRALSSEGKPYVTKEELYQNLTREQADYCVSHMKPYVDGKGRELPTAFDYVEFTRSLFVN

SEQ ID NO: 82905 - protein, 2477 aa, Homo sapiens
  Payload ID: 16499
  Gene Symbol: SPTAN1
  Gene Name: spectrin, alpha, non-erythrocytic 1
  Uniprot ID: Q13813
  ENSP ID: ENSP00000361824
MDPSGVKVLETAEDIQERRQQVLDRYHRFKELSTLRRQKLEDSYRFQFFQRDAEELEKWIQEKLQIASDENYKDPTNLQGKLQKHQAFEAEVQANSGAIVKLDETGNLMISEGHFASETIRTRLMELHRQWELLLEKMREKGIKLLQAQKLVQYLRECEDVMDWINDKEAIVTSEELGQDLEHVEVLQKKFEEFQTDMAAHEERVNEVNQFAAKLIQEQHPEEELIKTKQDEVNAAWQRLKGLALQRQGKLFGAAEVQRFNRDVDETISWIKEKEQLMASDDFGRDLASVQALLRKHEGLERDLAALEDKVKALCAEADRLQQSHPLSATQIQVKREELITNWEQIRTLAAERHARLNDSYRLQRFLADFRDLTSWVTEMKALINADELASDVAGAEALLDRHQEHKGEIDAHEDSFKSADESGQALLAAGHYASDEVREKLTVLSEERAALLELWELRRQQYEQCMDLQLFYRDTEQVDNWMSKQEAFLLNEDLGDSLDSVEALLKKHEDFEKSLSAQEEKITALDEFATKLIQNNHYAMEDVATRRDALLSRRNALHERAMRRRAQLADSFHLQQFFRDSDELKSWVNEKMKTATDEAYKDPSNLQGKVQKHQAFEAELSANQSRIDALEKAGQKLIDVNHYAKDEVAARMNEVISLWKKLLEATELKGIKLREANQQQQFNRNVEDIELWLYEVEGHLASDDYGKDLTNVQNLQKKHALLEADVAAHQDRIDGITIQARQFQDAGHFDAENIKKKQEALVARYEALKEPMVARKQKLADSLRLQQLFRDVEDEETWIREKEPIAASTNRGKDLIGVQNLLKKHQALQAEIAGHEPRIKAVTQKGNAMVEEGHFAAEDVKAKLHELNQKWEALKAKASQRRQDLEDSLQAQQYFADANEAESWMREKEPIVGSTDYGKDEDSAEALLKKHEALMSDLSAYGSSIQALREQAQSCRQQVAPTDDETGKELVLALYDYQEKSPREVTMKKGDILTLLNSTNKDWWKVEVNDRQGFVPAAYVKKLDPAQSASRENLLEEQGSIALRQEQIDNQTRITKEAGSVSLRMKQVEELYHSLLELGEKRKGMLEKSCKKFMLFREANELQQWINEKEAALTSEEVGADLEQVEVLQKKFDDFQKDLKANESRLKDINKVAEDLESEGLMAEEVQAVQQQEVYGMMPRDETDSKTASPWKSARLMVHTVATFNSIKELNERWRSLQQLAEERSQLLGSAHEVQRFHRDADETKEWIEEKNQALNTDNYGHDLASVQALQRKHEGFERDLAALGDKVNSLGETAERLIQSHPESAEDLQEKCTELNQAWSSLGKRADQRKAKLGDSHDLQRFLSDFRDLMSWINGIRGLVSSDELAKDVTGAEALLERHQEHRTEIDARAGTFQAFEQFGQQLLAHGHYASPEIKQKLDILDQERADLEKAWVQRRMMLDQCLELQLFHRDCEQAENWMAAREAFLNTEDKGDSLDSVEALIKKHEDFDKAINVQEEKIAALQAFADQLIAAGHYAKGDISSRRNEVLDRWRRLKAQMIEKRSKLGESQTLQQFSRDVDEIEAWISEKLQTASDESYKDPTNIQLSKLLSKHQKHQAFEAELHANADRIRGVIDMGNSLIERGACAGSEDAVKARLAALADQWQFLVQKSAEKSQKLKEANKQQNFNTGIKDFDFWLSEVEALLASEDYGKDLASVNNLLKKHQLLEADISAHEDRLKDLNSQADSLMTSSAFDTSQVKDKRDTINGRFQKIKSMAASRRAKLNESHRLHQFFRDMDDEESWIKEKKLLVGSEDYGRDLTGVQNLRKKHKRLEAELAAHEPAIQGVLDTGKKLSDDNTIGKEEIQQRLAQFVEHWKELKQLAAARGQRLEESLEYQQFVANVEEEEAWINEKMTLVASEDYGDTLAAIQGLLKKHEAFETDFTVHKDRVNDVCTNGQDLIKKNNHHEENISSKMKGLNGKVSDLEKAAAQRKAKLDENSAFLQFNWKADVVESWIGEKENSLKTDDYGRDLSSVQTLLTKQETFDAGLQAFQQEGIANITALKDQLLAAKHVQSKAIEARHASLMKRWSQLLANSAARKKKLLEAQSHFRKVEDLFLTFAKKASAFNSWFENAEEDLTDPVRCNSLEEIKALREAHDAFRSSLSSAQADFNQLAELDRQIKSFRVASNPYTWFTMEALEETWRNLQKIIKERELELQKEQRRQEENDKLRQEFAQHANAFHQWIQETRTYLLDGSCMVEESGTLESQLEATKRKHQEIRAMRSQLKKIEDLGAAMEEALILDNKYTEHSTVGLAQQWDQLDQLGMRMQHNLEQQIQARNTTGVTEEALKEFSMMFKHFDKDKSGRLNHQEFKSCLRSLGYDLPMVEEGEPDPEFEAILDTVDPNRDGHVSLQEYMAFMISRETENVKSSEEIESAFRALSSEGKPYVTKEELYQNLTREQADYCVSHMKPYVDGKGRELPTAFDYVEFTRSLFVN

SEQ ID NO: 82906 - protein, 2457 aa, Homo sapiens
  Payload ID: 16499
  Gene Symbol: SPTAN1
  Gene Name: spectrin, alpha, non-erythrocytic 1
  ENSP ID: ENSP00000486308
MDPSGVKVLETAEDIQERRQQVLDRYHRFKELSTLRRQKLEDSYRFQFFQRDAEELEKWIQEKLQIASDENYKDPTNLQGKLQKHQAFEAEVQANSGAIVKLDETGNLMISEGHFASETIRTRLMELHRQWELLLEKMREKGIKLLQAQKLVQYLRECEDVMDWINDKEAIVTSEELGQDLEHVEVLQKKFEEFQTDMAAHEERVNEVNQFAAKLIQEQHPEEELIKTKQDEVNAAWQRLKGLALQRQGKLFGAAEVQRFNRDVDETISWIKEKEQLMASDDFGRDLASVQALLRKHEGLERDLAALEDKVKALCAEADRLQQSHPLSATQIQVKREELITNWEQIRTLAAERHARLNDSYRLQRFLADFRDLTSWVTEMKALINADELASDVAGAEALLDRHQEHKGEIDAHEDSFKSADESGQALLAAGHYASDEVREKLTVLSEERAALLELWELRRQQYEQCMDLQLFYRDTEQVDNWMSKQEAFLLNEDLGDSLDSVEALLKKHEDFEKSLSAQEEKITALDEFATKLIQNNHYAMEDVATRRDALLSRRNALHERAMRRRAQLADSFHLQQFFRDSDELKSWVNEKMKTATDEAYKDPSNLQGKVQKHQAFEAELSANQSRIDALEKAGQKLIDVNHYAKDEVAARMNEVISLWKKLLEATELKGIKLREANQQQQFNRNVEDIELWLYEVEGHLASDDYGKDLTNVQNLQKKHALLEADVAAHQDRIDGITIQARQFQDAGHFDAENIKKKQEALVARYEALKEPMVARKQKLADSLRLQQLFRDVEDEETWIREKEPIAASTNRGKDLIGVQNLLKKHQALQAEIAGHEPRIKAVTQKGNAMVEEGHFAAEDVKAKLHELNQKWEALKAKASQRRQDLEDSLQAQQYFADANEAESWMREKEPIVGSTDYGKDEDSAEALLKKHEALMSDLSAYGSSIQALREQAQSCRQQVAPTDDETGKELVLALYDYQEKSPREVTMKKGDILTLLNSTNKDWWKVEVNDRQGFVPAAYVKKLDPAQSASRENLLEEQGSIALRQEQIDNQYHSLLELGEKRKGMLEKSCKKFMLFREANELQQWINEKEAALTSEEVGADLEQVEVLQKKFDDFQKDLKANESRLKDINKVAEDLESEGLMAEEVQAVQQQEVYGMMPRDETDSKTASPWKSARLMVHTVATFNSIKELNERWRSLQQLAEERSQLLGSAHEVQRFHRDADETKEWIEEKNQALNTDNYGHDLASVQALQRKHEGFERDLAALGDKVNSLGETAERLIQSHPESAEDLQEKCTELNQAWSSLGKRADQRKAKLGDSHDLQRFLSDFRDLMSWINGIRGLVSSDELAKDVTGAEALLERHQEHRTEIDARAGTFQAFEQFGQQLLAHGHYASPEIKQKLDILDQERADLEKAWVQRRMMLDQCLELQLFHRDCEQAENWMAAREAFLNTEDKGDSLDSVEALIKKHEDFDKAINVQEEKIAALQAFADQLIAAGHYAKGDISSRRNEVLDRWRRLKAQMIEKRSKLGESQTLQQFSRDVDEIEAWISEKLQTASDESYKDPTNIQLSKLLSKHQKHQAFEAELHANADRIRGVIDMGNSLIERGACAGSEDAVKARLAALADQWQFLVQKSAEKSQKLKEANKQQNFNTGIKDFDFWLSEVEALLASEDYGKDLASVNNLLKKHQLLEADISAHEDRLKDLNSQADSLMTSSAFDTSQVKDKRDTINGRFQKIKSMAASRRAKLNESHRLHQFFRDMDDEESWIKEKKLLVGSEDYGRDLTGVQNLRKKHKRLEAELAAHEPAIQGVLDTGKKLSDDNTIGKEEIQQRLAQFVEHWKELKQLAAARGQRLEESLEYQQFVANVEEEEAWINEKMTLVASEDYGDTLAAIQGLLKKHEAFETDFTVHKDRVNDVCTNGQDLIKKNNHHEENISSKMKGLNGKVSDLEKAAAQRKAKLDENSAFLQFNWKADVVESWIGEKENSLKTDDYGRDLSSVQTLLTKQETFDAGLQAFQQEGIANITALKDQLLAAKHVQSKAIEARHASLMKRWSQLLANSAARKKKLLEAQSHFRKVEDLFLTFAKKASAFNSWFENAEEDLTDPVRCNSLEEIKALREAHDAFRSSLSSAQADFNQLAELDRQIKSFRVASNPYTWFTMEALEETWRNLQKIIKERELELQKEQRRQEENDKLRQEFAQHANAFHQWIQETRTYLLDGSCMVEESGTLESQLEATKRKHQEIRAMRSQLKKIEDLGAAMEEALILDNKYTEHSTVGLAQQWDQLDQLGMRMQHNLEQQIQARNTTGVTEEALKEFSMMFKHFDKDKSGRLNHQEFKSCLRSLGYDLPMVEEGEPDPEFEAILDTVDPNRDGHVSLQEYMAFMISRETENVKSSEEIESAFRALSSEGKPYVTKEELYQNLTREQADYCVSHMKPYVDGKGRELPTAFDYVEFTRSLFVN

SEQ ID NO: 82907 - protein, 153 aa, Homo sapiens
  Payload ID: 16499
  Gene Symbol: SPTAN1
  Gene Name: spectrin, alpha, non-erythrocytic 1
  ENSP ID: ENSP00000486547
MLSSFRKRRVQKMDPSGVKVLETAEDIQERRQQVLDRYHRFKELSTLRRQKLEDSYRFQFFQRDAEELEKWIQEKLQIASDENYKDPTNLQGKLQKHQAFEAEVQANSGAIVKLDETGNLMISEGHFASETIRTRLMELHRQWELLLEKMREK

SEQ ID NO: 82908 - protein, 68 aa, Homo sapiens
  Payload ID: 16499
  Gene Symbol: SPTAN1
  Gene Name: spectrin, alpha, non-erythrocytic 1
  ENSP ID: ENSP00000486605
  MOD_RES (1)..(1): Any amino acid
XEAILDTVDPNRDGHVSLQEYMAFMISRETENVKSSEEIESAFRALSSEGKPYVTKEELYQVWASGGG

SEQ ID NO: 82909 - protein, 2498 aa, Homo sapiens
  Payload ID: 16499
  Gene Symbol: SPTAN1
  Gene Name: spectrin, alpha, non-erythrocytic 1
  ENSP ID: ENSP00000487444
MDPSGVKVLETAEDIQERRQQVLDRYHRFKELSTLRRQKLEDSYRFQFFQRDAEELEKWIQEKLQIASDENYKDPTNLQGKLQKHQAFEAEVQANSGAIVKLDETGNLMISEGHFASETIRTRLMELHRQWELLLEKMREKGIKLLQAQKLVQYLRECEDVMDWINDKEAIVTSEELGQDLEHVEVLQKKFEEFQTDMAAHEERVNEVNQFAAKLIQEQHPEEELIKTKQDEVNAAWQRLKGLALQRQGKLFGAAEVQRFNRDVDETISWIKEKEQLMASDDFGRDLASVQALLRKHEGLERDLAALEDKVKALCAEADRLQQSHPLSATQIQVKREELITNWEQIRTLAAERHARLNDSYRLQRFLADFRDLTSWVTEMKALINADELASDVAGAEALLDRHQEHKGEIDAHEDSFKSADESGQALLAAGHYASDEVREKLTVLSEERAALLELWELRRQQYEQCMDLQLFYRDTEQVDNWMSKQEAFLLNEDLGDSLDSVEALLKKHEDFEKSLSAQEEKITALDEFATKLIQNNHYAMEDVATRRDALLSRRNALHERAMRRRAQLADSFHLQQFFRDSDELKSWVNEKMKTATDEAYKDPSNLQGKVQKHQAFEAELSANQSRIDALEKAGQKLIDVNHYAKDEVAARMNEVISLWKKLLEATELKGIKLREANQQQQFNRNVEDIELWLYEVEGHLASDDYGKDLTNVQNLQKKHALLEADVAAHQDRIDGITIQARQFQDAGHFDAENIKKKQEALVARYEALKEPMVARKQKLADSLRLQQLFRDVEDEETWIREKEPIAASTNRGKDLIGVQNLLKKHQALQAEIAGHEPRIKAVTQKGNAMVEEGHFAAEDVKAKLHELNQKWEALKAKASQRRQDLEDSLQAQQYFADANEAESWMREKEPIVGSTDYGKDEDSAEALLKKHEALMSDLSAYGSSIQALREQAQSCRQQVAPTDDETGKELVLALYDYQEKSPREVTMKKGDILTLLNSTNKDWWKVEVNDRQGFVPAAYVKKLDPAQSASRENLLEEQGSIALRQEQIDNQTRITKEAGSVSLRMKQVEELYHSLLELGEKRKGMLEKSCKKFMLFREANELQQWINEKEAALTSEEVGADLEQVEVLQKKFDDFQKDLKANESRLKDINKVAEDLESEGLMAEEVQAVQQQEVYGMMPRDETDSKTASPWKSARLMVHTVATFNSIKELNERWRSLQQLAEERSQLLGSAHEVQRFHRDADETKEWIEEKNQALNTDNYGHDLASVQALQRKHEGFERDLAALGDKVNSLGETAERLIQSHPESAEDLQEKCTELNQAWSSLGKRADQRKAKLGDSHDLQRFLSDFRDLMSWINGIRGLVSSDELAKDVTGAEALLERHQEHRTEIDARAGTFQAFEQFGQQLLAHGHYASPEIKQKLDILDQERADLEKAWVQRRMMLDQCLELQLFHRDCEQAENWMAAREAFLNTEDKGDSLDSVEALIKKHEDFDKAINVQEEKIAALQAFADQLIAAGHYAKGDISSRRNEVLDRWRRLKAQMIEKRSKLGESQTLQQFSRDVDEIEAWISEKLQTASDESYKDPTNIQLSKLLSKHQKHQAFEAELHANADRIRGVIDMGNSLIERGACAGSEDAVKARLAALADQWQFLVQKSAEKSQKLKEANKQQNFNTGIKDFDFWLSEVEALLASEDYGKDLASVNNLLKKHQLLEADISAHEDRLKDLNSQADSLMTSSAFDTSQVKDKRDTINGRFQKIKSMAASRRAKLNESHRLHQFFRDMDDEESWIKEKKLLVGSEDYGRDLTGVQNLRKKHKRLEAELAAHEPAIQGVLDTGKKLSDDNTIGKEEIQQRLAQFVEHWKELKQLAAARGQRLEESLEYQQFVANVEEEEAWINEKMTLVASEDYGDTLAAIQGLLKKHEAFETDFTVHKDRVNDVCTNGQDLIKKNNHHEENISSKMKGLNGKVSDLEKAAAQRKAKLDENSAFLQFNWKADVVESWIGEKENSLKTDDYGRDLSSVQTLLTKQETFDAGLQAFQQEGIANITALKDQLLAAKHVQSKAIEARHASLMKRWSQLLANSAARKKKLLEAQSHFRKVEDLFLTFAKKASAFNSWFENAEEDLTDPVRCNSLEEIKALREAHDAFRSSLSSAQADFNQLAELDRQIKSFRVASNPYTWFTMEALEETWRNLQKIIKERELELQKEQRRQEENDKLRQEFAQHANAFHQWIQETRTYLLDGIAYRRVIRVYQYEVGDDLSGRSCMVEESGTLESQLEATKRKHQEIRAMRSQLKKIEDLGAAMEEALILDNKYTEHSTVGLAQQWDQLDQLGMRMQHNLEQQIQARNTTGVTEEALKEFSMMFKHFDKDKSGRLNHQEFKSCLRSLGYDLPMVEEGEPDPEFEAILDTVDPNRDGHVSLQEYMAFMISRETENVKSSEEIESAFRALSSEGKPYVTKEELYQNLTREQADYCVSHMKPYVDGKGRELPTAFDYVEFTRSLFVN

SEQ ID NO: 82910 - protein, 2106 aa, Homo sapiens
  Payload ID: 16500
  Gene Symbol: SPTB
  Gene Name: spectrin, beta, erythrocytic
  Uniprot ID: P11277
  ENSP ID: ENSP00000374370
MTSATEFENVGNQPPYSRINARWDAPDDELDNDNSSARLFERSRIKALADEREVVQKKTFTKWVNSHLARVSCRITDLYKDLRDGRMLIKLLEVLSGEMLPKPTKGKMRIHCLENVDKALQFLKEQRVHLENMGSHDIVDGNHRLVLGLIWTIILRFQIQDIVVQTQEGRETRSAKDALLLWCQMKTAGYPHVNVTNFTSSWKDGLAFNALIHKHRPDLIDFDKLKDSNARHNLEHAFNVAERQLGIIPLLDPEDVFTENPDEKSIITYVVAFYHYFSKMKVLAVEGKRVGKVIDHAIETEKMIEKYSGLASDLLTWIEQTITVLNSRKFANSLTGVQQQLQAFSTYRTVEKPPKFQEKGNLEVLLFTIQSRMRANNQKVYTPHDGKLVSDINRAWESLEEAEYRRELALRNELIRQEKLEQLARRFDRKAAMRETWLSENQRLVAQDNFGYDLAAVEAAKKKHEAIETDTAAYEERVRALEDLAQELEKENYHDQKRITARKDNILRLWSYLQELLQSRRQRLETTLALQKLFQDMLHSIDWMDEIKAHLLSAEFGKHLLEVEDLLQKHKLMEADIAIQGDKVKAITAATLKFTEGKGYQPCDPQVIQDRISHLEQCFEELSNMAAGRKAQLEQSKRLWKFFWEMDEAESWIKEKEQIYSSLDYGKDLTSVLILQRKHKAFEDELRGLDAHLEQIFQEAHGMVARKQFGHPQIEARIKEVSAQWDQLKDLAAFCKKNLQDAENFFQFQGDADDLKAWLQDAHRLLSGEDVGQDEGATRALGKKHKDFLEELEESRGVMEHLEQQAQGFPEEFRDSPDVTHRLQALRELYQQVVAQADLRQQRLQEALDLYTVFGETDACELWMGEKEKWLAEMEMPDTLEDLEVVQHRFDILDQEMKTLMTQIDGVNLAANSLVESGHPRSREVKQYQDHLNTRWQAFQTLVSERREAVDSALRVHNYCVDCEETSKWITDKTKVVESTKDLGRDLAGIIAIQRKLSGLERDVAAIQARVDALERESQQLMDSHPEQKEDIGQRQKHLEELWQGLQQSLQGQEDLLGEVSQLQAFLQDLDDFQAWLSITQKAVASEDMPESLPEAEQLLQQHAGIKDEIDGHQDSYQRVKESGEKVIQGQTDPEYLLLGQRLEGLDTGWNALGRMWESRSHTLAQCLGFQEFQKDAKQAEAILSNQEYTLAHLEPPDSLEAAEAGIRKFEDFLGSMENNRDKVLSPVDSGNKLVAEGNLYSDKIKEKVQLIEDRHRKNNEKAQEASVLLRDNLELQNFLQNCQELTLWINDKLLTSQDVSYDEARNLHNKWLKHQAFVAELASHEGWLENIDAEGKQLMDEKPQFTALVSQKLEALHRLWDELQATTKEKTQHLSAARSSDLRLQTHADLNKWISAMEDQLRSDDPGKDLTSVNRMLAKLKRVEDQVNVRKEELGELFAQVPSMGEEGGDADLSIEKRFLDLLEPLGRRKKQLESSRAKLQISRDLEDETLWVEERLPLAQSADYGTNLQTVQLFMKKNQTLQNEILGHTPRVEDVLQRGQQLVEAAEIDCQDLEERLGHLQSSWDRLREAAAGRLQRLRDANEAQQYYLDADEAEAWIGEQELYVISDEIPKDEEGAIVMLKRHLRQQRAVEDYGRNIKQLASRAQGLLSAGHPEGEQIIRLQGQVDKHYAGLKDVAEERKRKLENMYHLFQLKRETDDLEQWISEKELVASSPEMGQDFDHVTLLRDKFRDFARETGAIGQERVDNVNAFIERLIDAGHSEAATIAEWKDGLNEMWADLLELIDTRMQLLAASYDLHRYFYTGAEILGLIDEKHRELPEDVGLDASTAESFHRVHTAFERELHLLGVQVQQFQDVATRLQTAYAGEKAEAIQNKEQEVSAAWQALLDACAGRRTQLVDTADKFRFFSMARDLLSWMESIIRQIETQERPRDVSSVELLMKYHQGINAEIETRSKNFSACLELGESLLQRQHQASEEIREKLQQVMSRRKEMNEKWEARWERLRMLLEVCQFSRDASVAEAWLIAQEPYLASGDFGHTVDSVEKLIKRHEAFEKSTASWAERFAALEKPTTASRGGRRDSRGGSSFPPCGHRENVPGQSLVSFV

SEQ ID NO: 82911 - protein, 2137 aa, Homo sapiens
  Payload ID: 16500
  Gene Symbol: SPTB
  Gene Name: spectrin, beta, erythrocytic
  Uniprot ID: P11277
  ENSP ID: ENSP00000374371
MTSATEFENVGNQPPYSRINARWDAPDDELDNDNSSARLFERSRIKALADEREVVQKKTFTKWVNSHLARVSCRITDLYKDLRDGRMLIKLLEVLSGEMLPKPTKGKMRIHCLENVDKALQFLKEQRVHLENMGSHDIVDGNHRLVLGLIWTIILRFQIQDIVVQTQEGRETRSAKDALLLWCQMKTAGYPHVNVTNFTSSWKDGLAFNALIHKHRPDLIDFDKLKDSNARHNLEHAFNVAERQLGIIPLLDPEDVFTENPDEKSIITYVVAFYHYFSKMKVLAVEGKRVGKVIDHAIETEKMIEKYSGLASDLLTWIEQTITVLNSRKFANSLTGVQQQLQAFSTYRTVEKPPKFQEKGNLEVLLFTIQSRMRANNQKVYTPHDGKLVSDINRAWESLEEAEYRRELALRNELIRQEKLEQLARRFDRKAAMRETWLSENQRLVAQDNFGYDLAAVEAAKKKHEAIETDTAAYEERVRALEDLAQELEKENYHDQKRITARKDNILRLWSYLQELLQSRRQRLETTLALQKLFQDMLHSIDWMDEIKAHLLSAEFGKHLLEVEDLLQKHKLMEADIAIQGDKVKAITAATLKFTEGKGYQPCDPQVIQDRISHLEQCFEELSNMAAGRKAQLEQSKRLWKFFWEMDEAESWIKEKEQIYSSLDYGKDLTSVLILQRKHKAFEDELRGLDAHLEQIFQEAHGMVARKQFGHPQIEARIKEVSAQWDQLKDLAAFCKKNLQDAENFFQFQGDADDLKAWLQDAHRLLSGEDVGQDEGATRALGKKHKDFLEELEESRGVMEHLEQQAQGFPEEFRDSPDVTHRLQALRELYQQVVAQADLRQQRLQEALDLYTVFGETDACELWMGEKEKWLAEMEMPDTLEDLEVVQHRFDILDQEMKTLMTQIDGVNLAANSLVESGHPRSREVKQYQDHLNTRWQAFQTLVSERREAVDSALRVHNYCVDCEETSKWITDKTKVVESTKDLGRDLAGIIAIQRKLSGLERDVAAIQARVDALERESQQLMDSHPEQKEDIGQRQKHLEELWQGLQQSLQGQEDLLGEVSQLQAFLQDLDDFQAWLSITQKAVASEDMPESLPEAEQLLQQHAGIKDEIDGHQDSYQRVKESGEKVIQGQTDPEYLLLGQRLEGLDTGWNALGRMWESRSHTLAQCLGFQEFQKDAKQAEAILSNQEYTLAHLEPPDSLEAAEAGIRKFEDFLGSMENNRDKVLSPVDSGNKLVAEGNLYSDKIKEKVQLIEDRHRKNNEKAQEASVLLRDNLELQNFLQNCQELTLWINDKLLTSQDVSYDEARNLHNKWLKHQAFVAELASHEGWLENIDAEGKQLMDEKPQFTALVSQKLEALHRLWDELQATTKEKTQHLSAARSSDLRLQTHADLNKWISAMEDQLRSDDPGKDLTSVNRMLAKLKRVEDQVNVRKEELGELFAQVPSMGEEGGDADLSIEKRFLDLLEPLGRRKKQLESSRAKLQISRDLEDETLWVEERLPLAQSADYGTNLQTVQLFMKKNQTLQNEILGHTPRVEDVLQRGQQLVEAAEIDCQDLEERLGHLQSSWDRLREAAAGRLQRLRDANEAQQYYLDADEAEAWIGEQELYVISDEIPKDEEGAIVMLKRHLRQQRAVEDYGRNIKQLASRAQGLLSAGHPEGEQIIRLQGQVDKHYAGLKDVAEERKRKLENMYHLFQLKRETDDLEQWISEKELVASSPEMGQDFDHVTLLRDKFRDFARETGAIGQERVDNVNAFIERLIDAGHSEAATIAEWKDGLNEMWADLLELIDTRMQLLAASYDLHRYFYTGAEILGLIDEKHRELPEDVGLDASTAESFHRVHTAFERELHLLGVQVQQFQDVATRLQTAYAGEKAEAIQNKEQEVSAAWQALLDACAGRRTQLVDTADKFRFFSMARDLLSWMESIIRQIETQERPRDVSSVELLMKYHQGINAEIETRSKNFSACLELGESLLQRQHQASEEIREKLQQVMSRRKEMNEKWEARWERLRMLLEVCQFSRDASVAEAWLIAQEPYLASGDFGHTVDSVEKLIKRHEAFEKSTASWAERFAALEKPTTLELKERQIAERPAEETGPQEEEGETAGEAPVSHHAATERTSPVSLWSRLSSSWESLQPEPSHPY

SEQ ID NO: 82912 - protein, 2328 aa, Homo sapiens
  Payload ID: 16500
  Gene Symbol: SPTB
  Gene Name: spectrin, beta, erythrocytic
  Uniprot ID: P11277
  ENSP ID: ENSP00000374372
MTSATEFENVGNQPPYSRINARWDAPDDELDNDNSSARLFERSRIKALADEREVVQKKTFTKWVNSHLARVSCRITDLYKDLRDGRMLIKLLEVLSGEMLPKPTKGKMRIHCLENVDKALQFLKEQRVHLENMGSHDIVDGNHRLVLGLIWTIILRFQIQDIVVQTQEGRETRSAKDALLLWCQMKTAGYPHVNVTNFTSSWKDGLAFNALIHKHRPDLIDFDKLKDSNARHNLEHAFNVAERQLGIIPLLDPEDVFTENPDEKSIITYVVAFYHYFSKMKVLAVEGKRVGKVIDHAIETEKMIEKYSGLASDLLTWIEQTITVLNSRKFANSLTGVQQQLQAFSTYRTVEKPPKFQEKGNLEVLLFTIQSRMRANNQKVYTPHDGKLVSDINRAWESLEEAEYRRELALRNELIRQEKLEQLARRFDRKAAMRETWLSENQRLVAQDNFGYDLAAVEAAKKKHEAIETDTAAYEERVRALEDLAQELEKENYHDQKRITARKDNILRLWSYLQELLQSRRQRLETTLALQKLFQDMLHSIDWMDEIKAHLLSAEFGKHLLEVEDLLQKHKLMEADIAIQGDKVKAITAATLKFTEGKGYQPCDPQVIQDRISHLEQCFEELSNMAAGRKAQLEQSKRLWKFFWEMDEAESWIKEKEQIYSSLDYGKDLTSVLILQRKHKAFEDELRGLDAHLEQIFQEAHGMVARKQFGHPQIEARIKEVSAQWDQLKDLAAFCKKNLQDAENFFQFQGDADDLKAWLQDAHRLLSGEDVGQDEGATRALGKKHKDFLEELEESRGVMEHLEQQAQGFPEEFRDSPDVTHRLQALRELYQQVVAQADLRQQRLQEALDLYTVFGETDACELWMGEKEKWLAEMEMPDTLEDLEVVQHRFDILDQEMKTLMTQIDGVNLAANSLVESGHPRSREVKQYQDHLNTRWQAFQTLVSERREAVDSALRVHNYCVDCEETSKWITDKTKVVESTKDLGRDLAGIIAIQRKLSGLERDVAAIQARVDALERESQQLMDSHPEQKEDIGQRQKHLEELWQGLQQSLQGQEDLLGEVSQLQAFLQDLDDFQAWLSITQKAVASEDMPESLPEAEQLLQQHAGIKDEIDGHQDSYQRVKESGEKVIQGQTDPEYLLLGQRLEGLDTGWNALGRMWESRSHTLAQCLGFQEFQKDAKQAEAILSNQEYTLAHLEPPDSLEAAEAGIRKFEDFLGSMENNRDKVLSPVDSGNKLVAEGNLYSDKIKEKVQLIEDRHRKNNEKAQEASVLLRDNLELQNFLQNCQELTLWINDKLLTSQDVSYDEARNLHNKWLKHQAFVAELASHEGWLENIDAEGKQLMDEKPQFTALVSQKLEALHRLWDELQATTKEKTQHLSAARSSDLRLQTHADLNKWISAMEDQLRSDDPGKDLTSVNRMLAKLKRVEDQVNVRKEELGELFAQVPSMGEEGGDADLSIEKRFLDLLEPLGRRKKQLESSRAKLQISRDLEDETLWVEERLPLAQSADYGTNLQTVQLFMKKNQTLQNEILGHTPRVEDVLQRGQQLVEAAEIDCQDLEERLGHLQSSWDRLREAAAGRLQRLRDANEAQQYYLDADEAEAWIGEQELYVISDEIPKDEEGAIVMLKRHLRQQRAVEDYGRNIKQLASRAQGLLSAGHPEGEQIIRLQGQVDKHYAGLKDVAEERKRKLENMYHLFQLKRETDDLEQWISEKELVASSPEMGQDFDHVTLLRDKFRDFARETGAIGQERVDNVNAFIERLIDAGHSEAATIAEWKDGLNEMWADLLELIDTRMQLLAASYDLHRYFYTGAEILGLIDEKHRELPEDVGLDASTAESFHRVHTAFERELHLLGVQVQQFQDVATRLQTAYAGEKAEAIQNKEQEVSAAWQALLDACAGRRTQLVDTADKFRFFSMARDLLSWMESIIRQIETQERPRDVSSVELLMKYHQGINAEIETRSKNFSACLELGESLLQRQHQASEEIREKLQQVMSRRKEMNEKWEARWERLRMLLEVCQFSRDASVAEAWLIAQEPYLASGDFGHTVDSVEKLIKRHEAFEKSTASWAERFAALEKPTTLELKERQIAERPAEETGPQEEEGETAGEAPVSHHAATERTSPGEEEGTWPQNLQQPPPPGQHKDGQKSTGDERPTTEPLFKVLDTPLSEGDEPATLPAPRDHGQSVQMEGYLGRKHDLEGPNKKASNRSWNNLYCVLRNSELTFYKDAKNLALGMPYHGEEPLALRHAICEIAANYKKKKHVFKLRLSNGSEWLFHGKDEEEMLSWLQGVSTAINESQSIRVKAQSLPLPSLSGPDASLGKKDKEKRFSFFPKKK

SEQ ID NO: 82913 - protein, 1028 aa, Homo sapiens
  Payload ID: 16500
  Gene Symbol: SPTB
  Gene Name: spectrin, beta, erythrocytic
  ENSP ID: ENSP00000451324
GKQLMDEKPQFTALVSQKLEALHRLWDELQATTKEKTQHLSAARSSDLRLQTHADLNKWISAMEDQLRSDDPGKDLTSVNRMLAKLKRVEDQVNVRKEELGELFAQVPSMGEEGGDADLSIEKRFLDLLEPLGRRKKQLESSRAKLQISRDLEDETLWVEERLPLAQSADYGTNLQTVQLFMKKNQTLQNEILGHTPRVEDVLQRGQQLVEAAEIDCQDLEERLGHLQSSWDRLREAAAGRLQRLRDANEAQQYYLDADEAEAWIGEQELYVISDEIPKDEEGAIVMLKRHLRQQRAVEDYGRNIKQLASRAQGLLSAGHPEGEQIIRLQGQVDKHYAGLKDVAEERKRKLENMYHLFQLKRETDDLEQWISEKELVASSPEMGQDFDHVTLLRDKFRDFARETGAIGQERVDNVNAFIERLIDAGHSEAATIAEWKDGLNEMWADLLELIDTRMQLLAASYDLHRYFYTGAEILGLIDEKHRELPEDVGLDASTAESFHRVHTAFERELHLLGVQVQQFQDVATRLQTAYAGEKAEAIQNKEQEVSAAWQALLDACAGRRTQLVDTADKFRFFSMARDLLSWMESIIRQIETQERPRDVSSVELLMKYHQGINAEIETRSKNFSACLELGESLLQRQHQASEEIREKLQQVMSRRKEMNEKWEARWERLRMLLEVCQFSRDASVAEAWLIAQEPYLASGDFGHTVDSVEKLIKRHEAFEKSTASWAERFAALEKPTTLELKERQIAERPAEETGPQEEEGETAGEAPVSHHAATERTSPGEEEGTWPQNLQQPPPPGQHKDGQKSTGDERPTTEPLFKVLDTPLSEGDEPATLPAPRDHGQSVQMEGYLGRKHDLEGPNKKASNSKGEEGEERRETEEEDEEEEETESVAVEMQQHASHVSWNNLYCVLRNSELTFYKDAKNLALGMPYHGEEPLALRHAICEIAANYKKKKHVFKLRLSNGSEWLFHGKDEEEMLSWLQGVSTAINESQSIRVKAQSLPLPSLSGPDASLGKKDKEKRFSFFPKKK

SEQ ID NO: 82914 - protein, 2328 aa, Homo sapiens; identical to SEQ ID NO: 82912
  Payload ID: 16500
  Gene Symbol: SPTB
  Gene Name: spectrin, beta, erythrocytic
  Uniprot ID: P11277
  ENSP ID: ENSP00000451752

SEQ ID NO: 82915 - protein, 2155 aa, Homo sapiens
  Payload ID: 16501
  Gene Symbol: SPTBN1
  Gene Name: spectrin, beta, non-erythrocytic 1
  Uniprot ID: Q01082
  ENSP ID: ENSP00000334156
MELQRTSSISGPLSPAYTGQVPYNYNQLEGRFKQLQDEREAVQKKTFTKWVNSHLARVSCRITDLYTDLRDGRMLIKLLEVLSGERLPKPTKGRMRIHCLENVDKALQFLKEQRVHLENMGSHDIVDGNHRLTLGLIWTIILRFQIQDISVETEDNKEKKSAKDALLLWCQMKTAGYPNVNIHNFTTSWRDGMAFNALIHKHRPDLIDFDKLKKSNAHYNLQNAFNLAEQHLGLTKLLDPEDISVDHPDEKSIITYVVTYYHYFSKMKALAVEGKRIGKVLDNAIETEKMIEKYESLASDLLEWIEQTIIILNNRKFANSLVGVQQQLQAFNTYRTVEKPPKFTEKGNLEVLLFTIQSKMRANNQKVYMPREGKLISDINKAWERLEKAEHERELALRNELIRQEKLEQLARRFDRKAAMRETWLSENQRLVSQDNFGFDLPAVEAATKKHEAIETDIAAYEERVQAVVAVARELEAENYHDIKRITARKDNVIRLWEYLLELLRARRQRLEMNLGLQKIFQEMLYIMDWMDEMKVLVLSQDYGKHLLGVEDLLQKHTLVEADIGIQAERVRGVNASAQKFATDGEGYKPCDPQVIRDRVAHMEFCYQELCQLAAERRARLEESRRLWKFFWEMAEEEGWIREKEKILSSDDYGKDLTSVMRLLSKHRAFEDEMSGRSGHFEQAIKEGEDMIAEEHFGSEKIRERIIYIREQWANLEQLSAIRKKRLEEASLLHQFQADADDIDAWMLDILKIVSSSDVGHDEYSTQSLVKKHKDVAEEIANYRPTLDTLHEQASALPQEHAESPDVRGRLSGIEERYKEVAELTRLRKQALQDTLALYKMFSEADACELWIDEKEQWLNNMQIPEKLEDLEVIQHRFESLEPEMNNQASRVAVVNQIARQLMHSGHPSEKEIKAQQDKLNTRWSQFRELVDRKKDALLSALSIQNYHLECNETKSWIREKTKVIESTQDLGNDLAGVMALQRKLTGMERDLVAIEAKLSDLQKEAEKLESEHPDQAQAILSRLAEISDVWEEMKTTLKNREASLGEASKLQQFLRDLDDFQSWLSRTQTAIASEDMPNTLTEAEKLLTQHENIKNEIDNYEEDYQKMRDMGEMVTQGQTDAQYMFLRQRLQALDTGWNELHKMWENRQNLLSQSHAYQQFLRDTKQAEAFLNNQEYVLAHTEMPTTLEGAEAAIKKQEDFMTTMDANEEKINAVVETGRRLVSDGNINSDRIQEKVDSIDDRHRKNRETASELLMRLKDNRDLQKFLQDCQELSLWINEKMLTAQDMSYDEARNLHSKWLKHQAFMAELASNKEWLDKIEKEGMQLISEKPETEAVVKEKLTGLHKMWEVLESTTQTKAQRLFDANKAELFTQSCADLDKWLHGLESQIQSDDYGKDLTSVNILLKKQQMLENQMEVRKKEIEELQSQAQALSQEGKSTDEVDSKRLTVQTKFMELLEPLNERKHNLLASKEIHQFNRDVEDEILWVGERMPLATSTDHGHNLQTVQLLIKKNQTLQKEIQGHQPRIDDIFERSQNIVTDSSSLSAEAIRQRLADLKQLWGLLIEETEKRHRRLEEAHRAQQYYFDAAEAEAWMSEQELYMMSEEKAKDEQSAVSMLKKHQILEQAVEDYAETVHQLSKTSRALVADSHPESERISMRQSKVDKLYAGLKDLAEERRGKLDERHRLFQLNREVDDLEQWIAEREVVAGSHELGQDYEHVTMLQERFREFARDTGNIGQERVDTVNHLADELINSGHSDAATIAEWKDGLNEAWADLLELIDTRTQILAASYELHKFYHDAKEIFGRIQDKHKKLPEELGRDQNTVETLQRMHTTFEHDIQALGTQVRQLQEDAARLQAAYAGDKADDIQKRENEVLEAWKSLLDACESRRVRLVDTGDKFRFFSMVRDLMLWMEDVIRQIEAQEKPRDVSSVELLMNNHQGIKAEIDARNDSFTTCIELGKSLLARKHYASEEIKEKLLQLTEKRKEMIDKWEDRWEWLRLILEVHQFSRDASVAEAWLLGQEPYLSSREIGQSVDEVEKLIKRHEAFEKSAATWDERFSALERLTTLELLEVRRQQEEEERKRRPPSPEPSTKVSEEAESQQQWDTSKGEQVSQNGLPAEQGSPRVSYRSQTYQNYKNFNSRRTASDQPWSGL

SEQ ID NO: 82916 - protein, 2364 aa, Homo sapiens
  Payload ID: 16501
  Gene Symbol: SPTBN1
  Gene Name: spectrin, beta, non-erythrocytic 1
  Uniprot ID: Q01082
  ENSP ID: ENSP00000349259
MTTTVATDYDNIEIQQQYSDVNNRWDVDDWDNENSSARLFERSRIKALADEREAVQKKTFTKWVNSHLARVSCRITDLYTDLRDGRMLIKLLEVLSGERLPKPTKGRMRIHCLENVDKALQFLKEQRVHLENMGSHDIVDGNHRLTLGLIWTIILRFQIQDISVETEDNKEKKSAKDALLLWCQMKTAGYPNVNIHNFTTSWRDGMAFNALIHKHRPDLIDFDKLKKSNAHYNLQNAFNLAEQHLGLTKLLDPEDISVDHPDEKSIITYVVTYYHYFSKMKALAVEGKRIGKVLDNAIETEKMIEKYESLASDLLEWIEQTIIILNNRKFANSLVGVQQQLQAFNTYRTVEKPPKFTEKGNLEVLLFTIQSKMRANNQKVYMPREGKLISDINKAWERLEKAEHERELALRNELIRQEKLEQLARRFDRKAAMRETWLSENQRLVSQDNFGFDLPAVEAATKKHEAIETDIAAYEERVQAVVAVARELEAENYHDIKRITARKDNVIRLWEYLLELLRARRQRLEMNLGLQKIFQEMLYIMDWMDEMKVLVLSQDYGKHLLGVEDLLQKHTLVEADIGIQAERVRGVNASAQKFATDGEGYKPCDPQVIRDRVAHMEFCYQELCQLAAERRARLEESRRLWKFFWEMAEEEGWIREKEKILSSDDYGKDLTSVMRLLSKHRAFEDEMSGRSGHFEQAIKEGEDMIAEEHFGSEKIRERIIYIREQWANLEQLSAIRKKRLEEASLLHQFQADADDIDAWMLDILKIVSSSDVGHDEYSTQSLVKKHKDVAEEIANYRPTLDTLHEQASALPQEHAESPDVRGRLSGIEERYKEVAELTRLRKQALQDTLALYKMFSEADACELWIDEKEQWLNNMQIPEKLEDLEVIQHRFESLEPEMNNQASRVAVVNQIARQLMHSGHPSEKEIKAQQDKLNTRWSQFRELVDRKKDALLSALSIQNYHLECNETKSWIREKTKVIESTQDLGNDLAGVMALQRKLTGMERDLVAIEAKLSDLQKEAEKLESEHPDQAQAILSRLAEISDVWEEMKTTLKNREASLGEASKLQQFLRDLDDFQSWLSRTQTAIASEDMPNTLTEAEKLLTQHENIKNEIDNYEEDYQKMRDMGEMVTQGQTDAQYMFLRQRLQALDTGWNELHKMWENRQNLLSQSHAYQQFLRDTKQAEAFLNNQEYVLAHTEMPTTLEGAEAAIKKQEDFMTTMDANEEKINAVVETGRRLVSDGNINSDRIQEKVDSIDDRHRKNRETASELLMRLKDNRDLQKFLQDCQELSLWINEKMLTAQDMSYDEARNLHSKWLKHQAFMAELASNKEWLDKIEKEGMQLISEKPETEAVVKEKLTGLHKMWEVLESTTQTKAQRLFDANKAELFTQSCADLDKWLHGLESQIQSDDYGKDLTSVNILLKKQQMLENQMEVRKKEIEELQSQAQALSQEGKSTDEVDSKRLTVQTKFMELLEPLNERKHNLLASKEIHQFNRDVEDEILWVGERMPLATSTDHGHNLQTVQLLIKKNQTLQKEIQGHQPRIDDIFERSQNIVTDSSSLSAEAIRQRLADLKQLWGLLIEETEKRHRRLEEAHRAQQYYFDAAEAEAWMSEQELYMMSEEKAKDEQSAVSMLKKHQILEQAVEDYAETVHQLSKTSRALVADSHPESERISMRQSKVDKLYAGLKDLAEERRGKLDERHRLFQLNREVDDLEQWIAEREVVAGSHELGQDYEHVTMLQERFREFARDTGNIGQERVDTVNHLADELINSGHSDAATIAEWKDGLNEAWADLLELIDTRTQILAASYELHKFYHDAKEIFGRIQDKHKKLPEELGRDQNTVETLQRMHTTFEHDIQALGTQVRQLQEDAARLQAAYAGDKADDIQKRENEVLEAWKSLLDACESRRVRLVDTGDKFRFFSMVRDLMLWMEDVIRQIEAQEKPRDVSSVELLMNNHQGIKAEIDARNDSFTTCIELGKSLLARKHYASEEIKEKLLQLTEKRKEMIDKWEDRWEWLRLILEVHQFSRDASVAEAWLLGQEPYLSSREIGQSVDEVEKLIKRHEAFEKSAATWDERFSALERLTTLELLEVRRQQEEEERKRRPPSPEPSTKVSEEAESQQQWDTSKGEQVSQNGLPAEQGSPRMAETVDTSEMVNGATEQRTSSKESSPIPSPTSDRKAKTALPAQSAATLPARTQETPSAQMEGFLNRKHEWEAHNKKASSRSWHNVYCVINNQEMGFYKDAKTAASGIPYHSEVPVSLKEAVCEVALDYKKKKHVFKLRLNDGNEYLFQAKDDEEMNTWIQAISSAISSDKHEVSASTQSTPASSRAQTLPTSVVTITSESSPGKREKDKEKDKEKRFSLFGKKK

SEQ ID NO: 82917 - protein, 690 aa, Homo sapiens
  Payload ID: 16501
  Gene Symbol: SPTBN1
  Gene Name: spectrin, beta, non-erythrocytic 1
  ENSP ID: ENSP00000374630
MTTTVATDYDNIEIQQQYSDVNNRWDVDDWDNENSSARLFERSRIKALADEREAVQKKTFTKWVNSHLARVSCRITDLYTDLRDGRMLIKLLEVLSGERLPKPTKGRMRIHCLENVDKALQFLKEQRVHLENMGSHDIVDGNHRLTLGLIWTIILRFQIQDISVETEDNKEKKSAKDALLLWCQMKTAGYPNVNIHNFTTSWRDGMAFNALIHKHRPDLIDFDKLKKSNAHYNLQNAFNLAEQHLGLTKLLDPEDISVDHPDEKSIITYVVTYYHYFSKMKALAVEGKRIGKVLDNAIETEKMIEKYESLASDLLEWIEQTIIILNNRKFANSLVGVQQQLQAFNTYRTVEKPPKFTEKGNLEVLLFTIQSKMRANNQKVYMPREGKLISDINKAWERLEKAEHERELALRNELIRQEKLEQLARRFDRKAAMRETWLSENQRLVSQDNFGFDLPAVEAATKKHEAIETDIAAYEERVQAVVAVARELEAENYHDIKRITARKDNVIRLWEYLLELLRARRQRLEMNLGLQKIFQEMLYIMDWMDEMKVLVLSQDYGKHLLGVEDLLQKHTLVEADIGIQAERVRGVNASAQKFATDGEGYKPCDPQVIRDRVAHMEFCYQELCQLAAERRARLEESRRLWKFFWEMAEEEGWIREKEKILSSDDYGKDLTSVMRLLSKHRAFEDEMSGR

SEQ ID NO: 82918 - protein, 2366 aa, Homo sapiens [sequence omitted]

SEQ ID NO: 82919 - protein, 2390 aa, Homo sapiens
  Payload ID: 16502
  Gene Symbol: SPTBN2
  Gene Name: spectrin, beta, non-erythrocytic 2
  Uniprot ID: O15020
  ENSP ID: ENSP00000311489
MSSTLSPTDFDSLEIQGQYSDINNRWDLPDSDWDNDSSSARLFERSRIKALADEREAVQKKTFTKWVNSHLARVTCRVGDLYSDLRDGRNLLRLLEVLSGEILPKPTKGRMRIHCLENVDKALQFLKEQKVHLENMGSHDIVDGNHRLTLGLVWTIILRFQIQDISVETEDNKEKKSAKDALLLWCQMKTAGYPNVNVHNFTTSWRDGLAFNAIVHKHRPDLLDFESLKKCNAHYNLQNAFNLAEKELGLTKLLDPEDVNVDQPDEKSIITYVATYYHYFSKMKALAVEGKRIGKVLDHAMEAERLVEKYESLASELLQWIEQTIVTLNDRQLANSLSGVQNQLQSFNSYRTVEKPPKFTEKGNLEVLLFTIQSKLRANNQKVYTPREGRLISDINKAWERLEKAEHERELALRTELIRQEKLEQLAARFDRKAAMRETWLSENQRLVSQDNFGLELAAVEAAVRKHEAIETDIVAYSGRVQAVDAVAAELAAERYHDIKRIAARQHNVARLWDFLRQMVAARRERLLLNLELQKVFQDLLYLMDWMEEMKGRLQSQDLGRHLAGVEDLLQLHELVEADIAVQAERVRAVSASALRFCNPGKEYRPCDPQLVSERVAKLEQSYEALCELAAARRARLEESRRLWRFLWEVGEAEAWVREQQHLLASADTGRDLTGALRLLNKHTALRGEMSGRLGPLKLTLEQGQQLVAEGHPGASQASARAAELQAQWERLEALAEERAQRLAQAASLYQFQADANDMEAWLVDALRLVSSPELGHDEFSTQALARQHRALEEEIRSHRPTLDALREQAAALPPTLSRTPEVQSRVPTLERHYEELQARAGERARALEAALALYTMLSEAGACGLWVEEKEQWLNGLALPERLEDLEVVQQRFETLEPEMNTLAAQITAVNDIAEQLLKANPPGKDRIVNTQEQLNHRWQQFRRLADGKKAALTSALSIQNYHLECTETQAWMREKTKVIESTQGLGNDLAGVLALQRKLAGTERDLEAIAARVGELTREANALAAGHPAQAVAINARLREVQTGWEDLRATMRRREESLGEARRLQDFLRSLDDFQAWLGRTQTAVASEEGPATLPEAEALLAQHAALRGEVERAQSEYSRLRALGEEVTRDQADPQCLFLRQRLEALGTGWEELGRMWESRQGRLAQAHGFQGFLRDARQAEGVLSSQEYVLSHTEMPGTLQAADAAIKKLEDFMSTMDANGERIHGLLEAGRQLVSEGNIHADKIREKADSIERRHKKNQDAAQQFLGRLRDNREQQHFLQDCHELKLWIDEKMLTAQDVSYDEARNLHTKWQKHQAFMAELAANKDWLDKVDKEGRELTLEKPELKALVSEKLRDLHRRWDELETTTQAKARSLFDANRAELFAQSCCALESWLESLQAQLHSDDYGKDLTSVNILLKKQQMLEWEMAVREKEVEAIQAQAKALAQEDQGAGEVERTSRAVEEKFRALCQPMRERCRRLQASREQHQFHRDVEDEILWVTERLPMASSMEHGKDLPSVQLLMKKNQTLQKEIQGHEPRIADLRERQRALGAAAAGPELAELQEMWKRLGHELELRGKRLEDALRAQQFYRDAAEAEAWMGEQELHMMGQEKAKDELSAQAEVKKHQVLEQALADYAQTIHQLAASSQDMIDHEHPESTRISIRQAQVDKLYAGLKELAGERRERLQEHLRLCQLRRELDDLEQWIQEREVVAASHELGQDYEHVTMLRDKFREFSRDTSTIGQERVDSANALANGLIAGGHAARATVAEWKDSLNEAWADLLELLDTRGQVLAAAYELQRFLHGARQALARVQHKQQQLPDGTGRDLNAAEALQRRHCAYEHDIQALSPQVQQVQDDGHRLQKAYAGDKAEEIGRHMQAVAEAWAQLQGSSAARRQLLLDTTDKFRFFKAVRELMLWMDEVNLQMDAQERPRDVSSADLVIKNQQGIKAEIEARADRFSSCIDMGKELLARSHYAAEEISEKLSQLQARRQETAEKWQEKMDWLQLVLEVLVFGRDAGMAEAWLCSQEPLVRSAELGCTVDEVESLIKRHEAFQKSAVAWEERFCALEKLTALEEREKERKRKREEEERRKQPPAPEPTASVPPGDLVGGQTASDTTWDGTQPRPPPSTQAPSVNGVCTDGEPSQPLLGQQRLEHSSFPEGPGPGSGDEANGPRGERQTRTRGPAPSAMPQSRSTESAHAATLPPRGPEPSAQEQMEGMLCRKQEMEAFGKKAANRSWQNVYCVLRRGSLGFYKDAKAASAGVPYHGEVPVSLARAQGSVAFDYRKRKHVFKLGLQDGKEYLFQAKDEAEMSSWLRVVNAAIATASSASGEPEEPVVPSTTRGMTRAMTMPPVSPVGAEGPVVLRSKDGREREREKRFSFFKKNK

SEQ ID NO: 82920 - protein, 2390 aa, Homo sapiens; identical to SEQ ID NO: 82919
  Payload ID: 16502
  Gene Symbol: SPTBN2
  Gene Name: spectrin, beta, non-erythrocytic 2
  Uniprot ID: O15020
  ENSP ID: ENSP00000432568

SEQ ID NO: 82921 - protein, 2365 aa, Homo sapiens
  Payload ID: 16502
  Gene Symbol: SPTBN2
  Gene Name: spectrin, beta, non-erythrocytic 2
  Uniprot ID: O15020
  ENSP ID: ENSP00000433593
MSSTLSPTDFDSLEIQGQYSDINNRWDLPDSDWDNDSSSARLFERSRIKALADEREAVQKKTFTKWVNSHLARVTCRVGDLYSDLRDGRNLLRLLEVLSGEILPKPTKGRMRIHCLENVDKALQFLKEQKVHLENMGSHDIVDGNHRLTLGLVWTIILRFQIQDISVETEDNKEKKSAKDALLLWCQMKTAGYPNVNVHNFTTSWRDGLAFNAIVHKHRPDLLDFESLKKCNAHYNLQNAFNLAEKELGLTKLLDPEDVNVDQPDEKSIITYVATYYHYFSKMKALAVEGKRIGKVLDHAMEAERLVEKYESLASELLQWIEQTIVTLNDRQLANSLSGVQNQLQSFNSYRTVEKPPKFTEKGNLEVLLFTIQSKLRANNQKVYTPREGRLISDINKAWERLEKAEHERELALRTELIRQEKLEQLAARFDRKAAMRETWLSENQRLVSQDNFGLELAAVEAAVRKHEAIETDIVAYSGRVQAVDAVAAELAAERYHDIKRIAARQHNVARLWDFLRQMVAARRERLLLNLELQKVFQDLLYLMDWMEEMKGRLQSQDLGRHLAGVEDLLQLHELVEADIAVQAERVRAVSASALRFCNPGKEYRPCDPQLVSERVAKLEQSYEALCELAAARRARLEESRRLWRFLWEVGEAEAWVREQQHLLASADTGRDLTGALRLLNKHTALRGEMSGRLGPLKLTLEQGQQLVAEGHPGASQASARAAELQAQWERLEALAEERAQRLAQAASLYQFQADANDMEAWLVDALRLVSSPELGHDEFSTQALARQHRALEEEIRSHRPTLDALREQAAALPPTLSRTPEVQSRVPTLERHYEELQARAGERARALEAALALYTMLSEAGACGLWVEEKEQWLNGLALPERLEDLEVVQQRFETLEPEMNTLAAQITAVNDIAEQLLKANPPGKDRIVNTQEQLNHRWQQFRRLADGKKAALTSALSIQNYHLECTETQAWMREKTKVIESTQGLGNDLAGVLALQRKLAGTERDLEAIAARVGELTREANALAAGHPAQAVAINARLREVQTGWEDLRATMRRREESLGEARRLQDFLRSLDDFQAWLGRTQTAVASEEGPATLPEAEALLAQHAALRGEVERAQSEYSRLRALGEEVTRDQADPQCLFLRQRLEALGTGWEELGRMWESRQGRLAQAHGFQGFLRDARQAEGVLSSQEYVLSHTEMPGTLQAADAAIKKLEDFMSTMDANGERIHGLLEAGRQLVSEGNIHADKIREKADSIERRHKKNQDAAQQFLGRLRDNREQQHFLQDCHELKLWIDEKMLTAQDVSYDEARNLHTKWQKHQAFMAELAANKDWLDKVDKEGRELTLEKPELKALVSEKLRDLHRRWDELETTTQAKARSLFDANRAELFAQSCCALESWLESLQAQLHSDDYGKDLTSVNILLKKQQMLEWEMAVREKEVEAIQAQAKALAQEDQGAGEVERTSRAVEEKFRALCQPMRERCRRLQASREQHQFHRDVEDEILWVTERLPMASSMEHGKDLPSVQLLMKKNQTLQKEIQGHEPRIADLRERQRALGAAAAGPELAELQEMWKRLGHELELRGKRLEDALRAQQFYRDAAEAEAWMGEQELHMMGQEKAKDELSAQAEVKKHQVLEQALADYAQTIHQLAASSQDMIDHEHPESTRISIRQAQVDKLYAGLKELAGERRERLQEHLRLCQLRRELDDLEQWIQEREVVAASHELGQDYEHVTMLRDKFREFSRDTSTIGQERVDSANALANGLIAGGHAARATVAEWKDSLNEAWADLLELLDTRGQVLAAAYELQRFLHGARQALARVQHKQQQLPDGTGRDLNAAEALQRRHCAYEHDIQALSPQVQQVQDDGHRLQKAYAGDKAEEIGRHMQAVAEAWAQLQGSSAARRQLLLDTTDKFRFFKAVRELMLWMDEVNLQMDAQERPRDVSSADLVIKNQQGIKAEIEARADRFSSCIDMGKELLARSHYAAEEISEKLSQLQARRQETAEKWQEKMDWLQLVLEVLVFGRDAGMAEAWLCSQEPLVRSAELGCTVDEVESLIKRHEAFQKSAVAWEERFCALEKLTALEEREKERKRKREEEERRKQPPAPEPTASVPPGDLVGGQTASDTTWDGTQPRPPPSTQAPSVNGVCTDGEPSQPLLGQQRLEHSSFPEGPGPGSGDEANGPRGERQTRTRGPAPSAMPQSRSTESAHAATLPPRGPEPSAQEQMEGMLCRKQEMEAFGKKAANRSWQNVYCVLRRGSLGFYKDAKAASAGVPYHGEVPVSLARAQGSVAFDYRKRKHVFKLGLQDGKEYLFQAKDEVSCPSCSSLSVPFQKLPAADSPSFPVLPLFPGLVLCGKTGCVRRPHQAALPV

SEQ ID NO: 82922 - protein, 117 aa, Homo sapiens
  Payload ID: 16502
  Gene Symbol: SPTBN2
  Gene Name: spectrin, beta, non-erythrocytic 2
  ENSP ID: ENSP00000433631
MSSTLSPTDFDSLEIQGQYSDINNRWDLPDSDWDNDSSSARLFERSRIKALADEREAVQKKTFTKWVNSHLARVTCRVGDLYSDLRDGRNLLRLLEVLSGEILPKPTKGRMRIHCLE

SEQ ID NO: 82923 - protein, 934 aa, Homo sapiens
  Payload ID: 16502
  Gene Symbol: SPTBN2
  Gene Name: spectrin, beta, non-erythrocytic 2
  ENSP ID: ENSP00000480692
MSSTLSPTDFDSLEIQGQYSDINNRWDLPDSDWDNDSSSARLFERSRIKALADEREAVQKKTFTKWVNSHLARVTCRVGDLYSDLRDGRNLLRLLEVLSGEILPKPTKGRMRIHCLENVDKALQFLKEQKVHLENMGSHDIVDGNHRLTLGLVWTIILRFQIQDISVETEDNKEKKSAKDALLLWCQMKTAGYPNVNVHNFTTSWRDGLAFNAIVHKHRPDLLDFESLKKCNAHYNLQNAFNLAEKELGLTKLLDPEDVNVDQPDEKSIITYVATYYHYFSKMKALAVEGKRIGKVLDHAMEAERLVEKYESLASELLQWIEQTIVTLNDRQLANSLSGVQNQLQSFNSYRTVEKPPKFTEKGNLEVLLFTIQSKLRANNQKVYTPREGRLISDINKAWERLEKAEHERELALRTELIRQEKLEQLAARFDRKAAMRETWLSENQRLVSQDNFGLELAAVEAAVRKHEAIETDIVAYSGRVQAVDAVAAELAAERYHDIKRIAARQHNVARLWDFLRQMVAARRERLLLNLELQKVFQDLLYLMDWMEEMKGRLQSQDLGRHLAGVEDLLQLHELVEADIAVQAERVRAVSASALRFCNPGKEYRPCDPQLVSERVAKLTALEEREKERKRKREEEERRKQPPAPEPTASVPPGDLVGGQTASDTTWDGTQPRPPPSTQAPSVNGVCTDGEPSQPLLGQQRLEHSSFPEGPGPGSGDEANGPRGERQTRTRGPAPSAMPQSRSTESAHAATLPPRGPEPSAQEQMEGMLCRKQEMEAFGKKAANRSWQNVYCVLRRGSLGFYKDAKAASAGVPYHGEVPVSLARAQGSVAFDYRKRKHVFKLGLQDGKEYLFQAKDEAEMSSWLRVVNAAIATASSASGEPEEPVVPSTTRGMTRAMTMPPVSPVGAEGPVVLRSKDGREREREKRFSFFKKNK

SEQ ID NO: 82924 - protein, 934 aa, Homo sapiens; identical to SEQ ID NO: 82923
  Payload ID: 16502
  Gene Symbol: SPTBN2
  Gene Name: spectrin, beta, non-erythrocytic 2
  ENSP ID: ENSP00000482000

SEQ ID NO: 82925 - protein, 2564 aa, Homo sapiens
  Payload ID: 16503
  Gene Symbol: SPTBN4
  Gene Name: spectrin, beta, non-erythrocytic 4
  Uniprot ID: Q9H254
  ENSP ID: ENSP00000263373
MAQVPGEVDNMEGLPAPNNNPAARWESPDRGWEREQPAASTAAASLFECSRIKALADEREAVQKKTFTKWVNSHLARVGCHIGDLYVDLRDGFVLTRLLEVLSGEQLPRPTRGRMRIHSLENVDKALQFLKEQRVHLENVGSHDIVDGNHRLTLGLVWTIILRFQIQVIKIETEDNRETRSAKDALLLWCQMKTAGYPEVNIQNFTTSWRDGLAFNALIHRHRPDLVDFSKLTKSNANYNLQRAFRTAEQHLGLARLLDPEDVNMEAPDEKSIITYVVSFYHYFSKMKALAVEGKRIGKVLDQVLEVGKIIERYEELAAELLAWIHRTVGLISNQKFANSLSGVQQQLQAFTAYCTLEKPVKFQEKGNLEVLLFSIQSKLRACNRRLFVPREGCGIWDIDKAWGELEKAEHEREAALRAELIRQEKLELLAQRFDHKVAMRESWLNENQRLVSQDNFGYELPAVEAAMKKHEAIEADIAAYEERVQGVAELAQALAAEGYYDIRRVAAQRDSVLRQWALLTGLVGARRTRLEQNLALQKVFQEMVYMVDWMEEMQAQLLSRECGQHLVEADDLLQKHGLLEGDIAAQSERVEALNAAALRFSQLQGYQPCDPQVICNRVNHVHGCLAELQEQAARRRAELEASRSLWALLQELEEAESWARDKERLLEAAGGGGAAGAAGAAGTAGGAHDLSSTARLLAQHKILQGELGGRRALLQQALRCGEELVAAGGAVGPGADTVHLVGLAERAASARRRWQRLEEAAARRERRLQEARALHQFGADLDGLLDWLRDAYRLAAAGDFGHDEASSRRLARQHRALTGEVEAHRGPVSGLRRQLATLGGASGAGPLVVALQVRVVEAEQLFAEVTEVAALRRQWLRDALAVYRMFGEVHACELWIGEKEQWLLSMRVPDSLDDVEVVQHRFESLDQEMNSLMGRVLDVNHTVQELVEGGHPSSDEVRSCQDHLNSRWNRIVELVEQRKEEMSAVLLVENHVLEVAEVRAQVREKRRAVESAPRAGGALQWRLSGLEAALQALEPRQAALLEEAALLAERFPAQAARLHQGAEELGAEWGALASAAQACGEAVAAAGRLQRFLHDLDAFLDWLVRAQEAAGGSEGPLPNSLEEADALLARHAALKEEVDQREEDYARIVAASEALLAADGAELGPGLALDEWLPHLELGWHKLLGLWEARREALVQAHIYQLFLRDLRQALVVLRNQEMALSGAELPGTVESVEEALKQHRDFLTTMELSQQKMQVAVQAAEGLLRQGNIYGEQAQEAVTRLLEKNQENQLRAQQWMQKLHDQLELQHFLRDCHELDGWIHEKMLMARDGTREDNHKLHKRWLRHQAFMAELAQNKEWLEKIEREGQQLMQEKPELAASVRKKLGEIRQCWAELESTTQAKARQLFEASKADQLVQSFAELDKKLLHMESQLQDVDPGGDLATVNSQLKKLQSMESQVEEWYREVGELQAQTAALPLEPASKELVGERQNAVGERLVRLLEPLQERRRLLLASKELHQVAHDLDDELAWVQERLPLAMQTERGNGLQAVQQHIKKNQGLRREIQAHGPRLEEVLERAGALASLRSPEAEAVRRGLEQLQSAWAGLREAAERRQQVLDAAFQVEQYYFDVAEVEAWLGEQELLMMSEDKGKDEQSTLQLLKKHLQLEQGVENYEESIAQLSRQCRALLEMGHPDSEQISRRQSQVDRLYVALKELGEERRVALEQQYWLYQLSRQVSELEHWIAEKEVVAGSPELGQDFEHVSVLQEKFSEFASETGMAGRERLAAVNQMVDELIECGHTAAATMAEWKDGLNEAWAELLELMGTRAQLLAASRELHKFFSDARELQGQIEEKRRRLPRLTTPPEPRPSASSMQRTLRAFEHDLQLLVSQVRQLQEGAAQLRTVYAGEHAEAIASREQEVLQGWKELLSACEDARLHVSSTADALRFHSQVRDLLSWMDGIASQIGAADKPRDVSSVEVLMNYHQGLKTELEARVPELTTCQELGRSLLLNKSAMADEIQAQLDKLGTRKEEVSEKWDRHWEWLQQMLEVHQFAQEAVVADAWLTAQEPLLQSRELGSSVDEVEQLIRRHEAFRKAAAAWEERFSSLRRLTTIEKIKAEQSKQPPTPLLGRKFFGDPTELAAKAAPLLRPGGYERGLEPLARRASDTLSAEVRTRVGYVRQELKPERLQPRIDRLPEIPGRVEPAALPAAPEDAAETPATPAAAEQVRPRPERQESADRAEELPRRRRPERQESVDQSEEAARRRRPERQESAEHEAAHSLTLGRYEQMERRRERRERRLERQESSEQEMPIRGDLVKGKATLADIVEQLQEKEAGPGLPAGPSLPQPRELPPGRLPNGLELPERTPRPDRPRARDRPKPRRRPRPREGGEGGGSRRSRSAPAQGGSAPAPPPPPTHTVQHEGFLLRKRELDANRKSSNRSWVSLYCVLSKGELGFYKDSKGPASGSTHGGEPLLSLHKATSEVASDYKKKKHVFKLQTQDGSEFLLQAKDEEEMNGWLEAVASSVAEHAEIARWGQTLPTTSSTDEGNPKREGGDRRASGRRK

SEQ ID NO: 82926 - protein, 2564 aa, Homo sapiens
  Payload ID: 16503
  Gene Symbol: SPTBN4
  Gene Name: spectrin, beta, non-erythrocytic 4
  ENSP ID: ENSP00000340345
MAQVPGEVDNMEGLPAPNNNPAARWESPDRGWEREQPAASTAAASLFECSRIKALADEREAVQKKTFTKWVNSHLARVGCHIGDLYVDLRDGFVLTRLLEVLSGEQLPRPTRGRMRIHSLENVDKALQFLKEQRVHLENVGSHDIVDGNHRLTLGLVWTIILRFQIQVIKIETEDNRETRSAKDALLLWCQMKTAGYPEVNIQNFTTSWRDGLAFNALIHRHRPDLVDFSKLTKSNANYNLQRAFRTAEQHLGLARLLDPEDVNMEAPDEKSIITYVVSFYHYFSKMKALAVEGKRIGKVLDQVLEVGKIIERYEELAAELLAWIHRTVGLISNQKFANSLSGVQQQLQAFTAYCTLEKPVKFQEKGNLEVLLFSIQSKLRACNRRLFVPREGCGIWDIDKAWGELEKAEHEREAALRAELIRQEKLELLAQRFDHKVAMRESWLNENQRLVSQDNFGYELPAVEAAMKKHEAIEADIAAYEERVQGVAELAQALAAEGYYDIRRVAAQRDSVLRQWALLTGLVGARRTRLEQNLALQKVFQEMVYMVDWMEEMQAQLLSRECGQHLVEADDLLQKHGLLEGDIAAQSERVEALNAAALRFSQLQGYQPCDPQVICNRVNHVHGCLAELQEQAARRRAELEASRSLWALLQELEEAESWARDKERLLEAAGGGGAAGAAGAAGTAGGAHDLSSTARLLAQHKILQGELGGRRALLQQALRCGEELVAAGGAVGPGADTVHLVGLAERAASARRRWQRLEEAAARRERRLQEARALHQFGADLDGLLDWLRDAYRLAAAGDFGHDEASSRRLARQHRALTGEVEAHRGPVSGLRRQLATLGGASGAGPLVVALQVRVVEAEQLFAEVTEVAALRRQWLRDALAVYRMFGEVHACELWIGEKEQWLLSMRVPDSLDDVEVVQHRFESLDQEMNSLMGRVLDVNHTVQELVEGGHPSSDEVRSCQDHLNSRWNRIVELVEQRKEEMSAVLLVENHVLEVAEVRAQVREKRRAVESAPRAGGALQWRLSGLEAALQALEPRQAALLEEAALLAERFPAQAARLHQGAEELGAEWGALASAAQACGEAVAAAGRLQRFLHDLDAFLDWLVRAQEAAGGSEGPLPNSLEEADALLARHAALKEEVDQREEDYARIVAASEALLAADGAELGPGLALDEWLPHLELGWHKLLGLWEARREALVQAHIYQLFLRDLRQALVVLRNQEMALSGAELPGTVESVEEALKQHRDFLTTMELSQQKMQVAVQAAEGLLRQGNIYGEQAQEAVTRLLEKNQENQLRAQQWMQKLHDQLELQHFLRDCHELDGWIHEKMLMARDGTREDNHKLHKRWLRHQAFMAELAQNKEWLEKIEREGQQLMQEKPELAASVRKKLGEIRQCWAELESTTQAKARQLFEASKADQLVQSFAELDKKLLHMESQLQDVDPGGDLATVNSQLKKLQSMESQVEEWYREVGELQAQTAALPLEPASKELVGERQNAVGERLVRLLEPLQERRRLLLASKELHQVAHDWTTSWAWVQERLPLAMQTERGNGLQAVQQHIKKNQGLRREIQAHGPRLEEVLERAGALASLRSPEAEAVRRGLEQLQSAWAGLREAAERRQQVLDAAFQVEQYYFDVAEVEAWLGEQELLMMSEDKGKDEQSTLQLLKKHLQLEQGVENYEESIAQLSRQCRALLEMGHPDSEQISRRQSQVDRLYVALKELGEERRVALEQQYWLYQLSRQVSELEHWIAEKEVVAGSPELGQDFEHVSVLQEKFSEFASETGMAGRERLAAVNQMVDELIECGHTAAATMAEWKDGLNEAWAELLELMGTRAQLLAASRELHKFFSDARELQGQIEEKRRRLPRLTTPPEPRPSASSMQRTLRAFEHDLQLLVSQVRQLQEGAAQLRTVYAGEHAEAIASREQEVLQGWKELLSACEDARLHVSSTADALRFHSQVRDLLSWMDGIASQIGAADKPRDVSSVEVLMNYHQGLKTELEARVPELTTCQELGRSLLLNKSAMADEIQAQLDKLGTRKEEVSEKWDRHWEWLQQMLEVHQFAQEAVVADAWLTAQEPLLQSRELGSSVDEVEQLIRRHEAFRKAAAAWEERFSSLRRLTTIEKIKAEQSKQPPTPLLGRKFFGDPTELAAKAAPLLRPGGYERGLEPLARRASDTLSAEVRTRVGYVRQELKPERLQPRIDRLPEIPGRVEPAALPAAPEDAAETPATPAAAEQVRPRPERQESADRAEELPRRRRPERQESVDQSEEAARRRRPERQESAEHEAAHSLTLGRYEQMERRRERRERRLERQESSEQEMPIRGDLVKGKATLADIVEQLQEKEAGPGLPAGPSLPQPRELPPGRLPNGLELPERTPRPDRPRARDRPKPRRRPRPREGGEGGGSRRSRSAPAQGGSAPAPPPPPTHTVQHEGFLLRKRELDANRKSSNRSWVSLYCVLSKGELGFYKDSKGPASGSTHGGEPLLSLHKATSEVASDYKKKKHVFKLQTQDGSEFLLQAKDEEEMNGWLEAVASSVAEHAEIARWGQTLPTTSSTDEGNPKREGGDRRASGRRK

SEQ ID NO: 82927 - protein, 678 aa, Homo sapiens
  Payload ID: 16503
  Gene Symbol: SPTBN4
  Gene Name: spectrin, beta, non-erythrocytic 4
  Uniprot ID: Q9H254
  ENSP ID: ENSP00000375877
MLMARDGTREDNHKLHKRWLRHQAFMAELAQNKEWLEKIEREGQQLMQEKPELAASVRKKLGEIRQCWAELESTTQAKARQLFEASKADQLVQSFAELDKKLLHMESQLQDVDPGGDLATVNSQLKKLQSMESQVEEWYREVGELQAQTAALPLEPASKELVGERQNAVGERLVRLLEPLQERRRLLLASKELHQVAHDLDDELAWVQERLPLAMQTERGNGLQAVQQHIKKNQGLRREIQAHGPRLEEVLERAGALASLRSPEAEAVRRGLEQLQSAWAGLREAAERRQQVLDAAFQVEQYYFDVAEVEAWLGEQELLMMSEDKGKDEQSTLQLLKKHLQLEQGVENYEESIAQLSRQCRALLEMGHPDSEQISRRQSQVDRLYVALKELGEERRVALEQQYWLYQLSRQVSELEHWIAEKEVVAGSPELGQDFEHVSVLQEKFSEFASETGMAGRERLAAVNQMVDELIECGHTAAATMAEWKDGLNEAWAELLELMGTRAQLLAASRELHKFFSDARELQGQIEEKRRRLPRLTTPPEPRPSASSMQRTLRAFEHDLQLLVSQVRQLQEGAAQLRTVYAGEHAEAIASREQEVLQGWKELLSACEDARLHVSSTADALRFHSQVRDLLSWMDGIASQIGAADKPRCPSSLLGLPASPWWPTPATPSPLTAPFSME

SEQ ID NO: 82928 - protein, 2564 aa, Homo sapiens; identical to SEQ ID NO: 82926
  Payload ID: 16503
  Gene Symbol: SPTBN4
  Gene Name: spectrin, beta, non-erythrocytic 4
  ENSP ID: ENSP00000375879

SEQ ID NO: 82929 - protein, 2564 aa, Homo sapiens; identical to SEQ ID NO: 82925
  Payload ID: 16503
  Gene Symbol: SPTBN4
  Gene Name: spectrin, beta, non-erythrocytic 4
  Uniprot ID: Q9H254
  ENSP ID: ENSP00000469242

SEQ ID NO: 82930 - protein, 2002 aa, Homo sapiens
  Payload ID: 16503
  Gene Symbol: SPTBN4
  Gene Name: spectrin, beta, non-erythrocytic 4
  ENSP ID: ENSP00000470693
MAQVPGEVDNMEGLPAPNNNPAARWESPDRGWEREQPAASTAAASLFECSRIKALADEREAVQKKTFTKWVNSHLARVGCHIGDLYVDLRDGFVLTRLLEVLSGEQLPRPTRGRMRIHSLENVDKALQFLKEQRVHLENVGSHDIVDGNHRLTLGLVWTIILRFQIQVIKIETEDNRETRSAKDALLLWCQMKTAGYPEVNIQNFTTSWRDGLAFNALIHRHRPDLVDFSKLTKSNANYNLQRAFRTAEQHLGLARLLDPEDVNMEAPDEKSIITYVVSFYHYFSKMKALAVEGKRIGKVLDQVLEVGKIIERYEELAAELLAWIHRTVGLISNQKFANSLSGVQQQLQAFTAYCTLEKPVKFQEKGNLEVLLFSIQSKLRACNRRLFVPREGCGIWDIDKAWGELEKAEHEREAALRAELIRQEKLELLAQRFDHKVAMRESWLNENQRLVSQDNFGYELPAVEAAMKKHEAIEADIAAYEERVQGVAELAQALAAEGYYDIRRVAAQRDSVLRQWALLTGLVGARRTRLEQNLALQKVFQEMVYMVDWMEEMQAQLLSRECGQHLVEADDLLQKHGLLEGDIAAQSERVEALNAAALRFSQLQGYQPCDPQVICNRVNHVHGCLAELQEQAARRRAELEASRSLWALLQELEEAESWARDKERLLEAAGGGGAAGAAGAAGTAGGAHDLSSTARLLAQHKILQGELGGRRALLQQALRCGEELVAAGGAVGPGADTVHLVGLAERAASARRRWQRLEEAAARRERRLQEARALHQFGADLDGLLDWLRDAYRLAAAGDFGHDEASSRRLARQHRALTGEVEAHRGPVSGLRRQLATLGGASGAGPLVVALQVRVVEAEQLFAEVTEVAALRRQWLRDALAVYRMFGEVHACELWIGEKEQWLLSMRVPDSLDDVEVVQHRFESLDQEMNSLMGRVLDVNHTVQELVEGGHPSSDEVRSCQDHLNSRWNRIVELVEQRKEEMSAVLLVENHVLEVAEVRAQVREKRRAVESAPRAGGALQWRLSGLEAALQALEPRQAALLEEAALLAERFPAQAARLHQGAEELGAEWGALASAAQACGEAVAAAGRLQRFLHDLDAFLDWLVRAQEAAGGSEGPLPNSLEEADALLARHAALKEEVDQREEDYARIVAASEALLAADGAELGPGLALDEWLPHLELGWHKLLGLWEARREALVQAHIYQLFLRDLRQALVVLRNQEMALSGAELPGTVESVEEALKQHRDFLTTMELSQQKMQVAVQAAEGLLRQGNIYGEQAQEAVTRLLEKNQENQLRAQQWMQKLHDQLELQHFLRDCHELDGWIHEKMLMARDGTREDNHKLHKRWLRHQAFMAELAQNKEWLEKIEREGQQLMQEKPELAASVRKKLGEIRQCWAELESTTQAKARQLFEASKADQLVQSFAELDKKLLHMESQLQDVDPGGDLATVNSQLKKLQSMESQVEEWYREVGELQAQTAALPLEPASKELVGERQNAVGERLVRLLEPLQERRRLLLASKELHQVAHDLDDELAWVQERLPLAMQTERGNGLQAVQQHIKKNQGLRREIQAHGPRLEEVLERAGALASLRSPEAEAVRRGLEQLQSAWAGLREAAERRQQVLDAAFQVEQYYFDVAEVEAWLGEQELLMMSEDKGKDEQSTLQLLKKHLQLEQGVENYEESIAQLSRQCRALLEMGHPDSEQISRRQSQVDRLYVALKELGEERRVALEQQYWLYQLSRQVSELEHWIAEKEVVAGSPELGQDFEHVSVLQEKFSEFASETGMAGRERLAAVNQMVDELIECGHTAAATMAEWKDGLNEAWAELLELMGTRAQLLAASRELHKFFSDARELQGQIEEKRRRLPRLTTPPEPRPSASSMQRTLRAFEHDLQLLVSQVRQLQEGAAQLRTVYAGEHAEAIASREQEVLQGWKELLSACEDARLHVSSTADALRFHSQVRDLLSWMDGIASQIGAADKPRCPSSLLGLPASPWWPTPATPSPLTAPFSME

SEQ ID NO: 82931 - protein, 701 aa, Homo sapiens
  Payload ID: 16503
  Gene Symbol: SPTBN4
  Gene Name: spectrin, beta, non-erythrocytic 4
  ENSP ID: ENSP00000472136
PCDPQVICNRVNHVHGCLAELQEQAARRRAELEASRSLWALLQELEEAESWARDKERLLEAAGGGGAAGAAGAAGTAGGAHDLSSTARLLAQHKILQGELGGRRALLQQALRCGEELVAAGGAVGPGADTVHLVGLAERAASARRRWQRLEEAAARRERRLQEARALHQFGADLDGLLDWLRDAYRLAAAGDFGHDEASSRRLARQHRALTGEVEAHRGPVSGLRRQLATLGGASGAGPLVVALQVRVVEAEQLFAEVTEVAALRRQWLRDALAVYRMFGEVHACELWIGEKEQWLLSMRVPDSLDDVEVVQHRFESLDQEMNSLMGRVLDVNHTVQELVEGGHPSSDEVRSCQDHLNSRWNRIVELVEQRKEEMSAVLLVENHVLEVAEVRAQVREKRRAVESAPRAGGALQWRLSGLEAALQALEPRQAALLEEAALLAERFPAQAARLHQGAEELGAEWGALASAAQACGEAVAAAGRLQRFLHDLDAFLDWLVRAQEAAGGSEGPLPNSLEEADALLARHAALKEEVDQREEDYARIVAASEALLAADGAELGPGLALDEWLPHLELGWHKLLGLWEARREALVQAHIYQLFLRDLRQALVVLRNQEMALSGAELPGTVESVEEALKQHRDFLTTMELSQQKMQVAVQAAEGLLRQGNIYGEQAQEAVTRLLEKCLIIHPALLHPPWEPPDLPRSSS

SEQ ID NO: 82932 - protein, 3674 aa, Homo sapiens
  Payload ID: 16504
  Gene Symbol: SPTBN5
  Gene Name: spectrin, beta, non-erythrocytic 5
  Uniprot ID: Q9NRC6
  ENSP ID: ENSP00000317790
MAGQPHSPRELLGAAGHRSRRPSTELRVPPSPSLTMDSQYETGHIRKLQARHMQMQEKTFTKWINNVFQCGQAGIKIRNLYTELADGIHLLRLLELISGEALPPPSRGRLRVHFLENSSRALAFLRAKVPVPLIGPENIVDGDQTLILGLIWVIILRFQISHISLDKEEFGASAALLSTKEALLVWCQRKTASYTNVNITDFSRSWSDGLGFNALIHAHRPDLLDYGSLRPDRPLHNLAFAFLVAEQELGIAQLLDPEDVAAAQPDERSIMTYVSLYYHYCSRLHQGQTVQRRLTKILLQLQETELLQTQYEQLVADLLRWIAEKQMQLEARDFPDSLPAMRQLLAAFTIFRTQEKPPRLQQRGAAEALLFRLQTALQAQNRRPFLPHEGLGLAELSQCWAGLEWAEAARSQALQQRLLQLQRLETLARRFQHKAALRESFLKDAEQVLDQARAPPASLATVEAAVQRLGMLEAGILPQEGRFQALAEIADILRQEQYHSWADVARRQEEVTVRWQRLLQHLQGQRKQVADMQAVLSLLQEVEAASHQLEELQEPARSTACGQQLAEVVELLQRHDLLEAQVSAHGAHVSHLAQQTAELDSSLGTSVEVLQAKARTLAQLQQSLVALVRARRALLEQTLQRAEFLRNCEEEEAWLKECGQRVGNAALGRDLSQIAGALQKHKALEAEVHRHQAVCVDLVRRGRDLSARRPPTQPDPGERAEAVQGGWQLLQTRVVGRGARLQTALLVLQYFADAAEAASWLRERRSSLERASCGQDQAAAETLLRRHVRLERVLRAFAAELRRLEEQGRAASARASLFTVNSALSPPGESLRNPGPWSEASCHPGPGDAWKMALPAEPDPDFDPNTILQTQDHLSQDYESLRALAQLRRARLEEAMALFGFCSSCGELQLWLEKQTVLLQRVQPQADTLEVMQLKYENFLTALAVGKGLWAEVSSSAEQLRQRYPGNSTQIQRQQEELSQRWGQLEALKREKAVQLAHSVEVCSFLQECGPTQVQLRDVLLQLEALQPGSSEDTCHALQLAQKKTLVLERRVHFLQSVVVKVEEPGYAESQPLQGQVETLQGLLKQVQEQVAQRARRQAETQARQSFLQESQQLLLWAESVQAQLRSKEVSVDVASAQRLLREHQDLLEEIHLWQERLQQLDAQSQPMAALDCPDSQEVPNTLRVLGQQGQELKVLWEQRQQWLQEGLELQKFGREVDGFTATCANHQAWLHLDNLGEDVREALSLLQQHREFGRLLSTLGPRAEALRAHGEKLVQSQHPAAHTVREQLQSIQAQWTRLQGRSEQRRRQLLASLQLQEWKQDVAELMQWMEEKGLMAAHEPSGARRNILQTLKRHEAAESELLATRRHVEALQQVGRELLSRRPCGQEDIQTRLQGLRSKWEALNRKMTERGDELQQAGQQEQLLRQLQDAKEQLEQLEGALQSSETGQDLRSSQRLQKRHQQLESESRTLAAKMAALASMAHGMAASPAILEETQKHLRRLELLQGHLAIRGLQLQASVELHQFCHLSNMELSWVAEHMPHGSPTSYTECLNGAQSLHRKHKELQVEVKAHQGQVQRVLSSGRSLAASGHPQAQHIVEQCQELEGHWAELERACEARAQCLQQAVTFQQYFLDVSELEGWVEEKRPLVSSRDYGRDEAATLRLINKHQALQEELAIYWSSMEELDQTAQTLTGPEVPEQQRVVQERLREQLRALQELAATRDRELEGTLRLHEFLREAEDLQGWLASQKQAAKGGESLGEDPEHALHLCTKFAKFQHQVEMGSQRVAACRLLAESLLERGHSAGPMVRQRQQDLQTAWSELWELTQARGHALRDTETTLRVHRDLLEVLTQVQEKATSLPNNVARDLCGLEAQLRSHQGLERELVGTERQLQELLETAGRVQKLCPGPQAHAVQQRQQAVTQAWAVLQRRMEQRRAQLERARLLARFRTAVRDYASWAARVRQDLQVEESSQEPSSGPLKLSAHQWLRAELEAREKLWQQATQLGQQALLAAGTPTKEVQEELRALQDQRDQVYQTWARKQERLQAEQQEQLFLRECGRLEEILAAQEVSLKTSALGSSVEEVEQLIRKHEVFLKVLTAQDKKEAALRERLKTLRRPRVRDRLPILLQRRMRVKELAESRGHALHASLLMASFTQAATQAEDWIQAWAQQLKEPVPPGDLRDKLKPLLKHQAFEAEVQAHEEVMTSVAKKGEALLAQSHPRAGEVSQRLQGLRKHWEDLRQAMALRGQELEDRRNFLEFLQRVDLAEAWIQEKEVKMNVGDLGQDLEHCLQLRRRLREFRGNSAGDTVGDACIRSISDLSLQLKNRDPEEVKIICQRRSQLNNRWASFHGNLLRYQQQLEGALEIHVLSRELDNVTKRIQEKEALIQALDCGKDLESVQRLLRKHEELEREVHPIQAQVESLEREVGRLCQRSPEAAHGLRHRQQEVAESWWQLRSRAQKRREALDALHQAQKLQAMLQELLVSAQRLRAQMDTSPAPRSPVEARRMLEEHQECKAELDSWTDSISLARSTGQQLLTAGHPFSSDIRQVLAGLEQELSSLEGAWQEHQLQLQQALELQLFLSSVEKMERWLCSKEDSLASEGLWDPLAPMEPLLWKHKMLEWDLEVQAGKISALEATARGLHQGGHPEAQSALGRCQAMLLRKEALFRQAGTRRHRLEELRQLQAFLQDSQEVAAWLREKNLVALEEGLLDTAMLPAQLQKQQNFQAELDASMHQQQELQREGQRLLQGGHPASEAIQERLEELGALWGELQDNSQKKVAKLQKACEALRLRRSMEELENWLEPIEVELRAPTVGQALPGVGELLGTQRELEAAVDKKARQAEALLGQAQAFVREGHCLAQDVEEQARRLLQRFKSLREPLQERRTALEARSLLLKFFRDADEEMAWVQEKLPLAAAQDYGQSLSAVRHLQEQHQNLESEMSSHEALTRVVLGTGYKLVQAGHFAAHEVAARVQQLEKAMAHLRAEAARRRLLLQQAQEAQQFLTELLEAGSWLAERGHVLDSEDMGHSAEATQALLRRLEATKRDLEAFSPRIERLQQTAALLESRKNPESPKVLAQLQAVREAHAELLRRAEARGHGLQEQLQLHQLERETLLLDAWLTTKAATAESQDYGQDLEGVKVLEEKFDAFRKEVQSLGQAKVYALRKLAGTLERGAPRRYPHIQAQRSRIEAAWERLDQAIKARTENLAAAHEVHSFQQAAAELQGRMQEKTALMKGEDGGHSLSSVRTLQQQHRRLERELEAMEKEVARLQTEACRLGQLHPAAPGGLAKVQEAWATLQAKAQERGQWLAQAAQGHAFLGRCQELLAWAQERQELASSEELAEDVAGAEQLLGQHEELGQEIRECRLQAQDLRQEGQQLVDNSHFMSAEVTECLQELEGRLQELEEAWALRWQRCAESWGLQKLRQRLEQAEAWLACWEGLLLKPDYGHSVSDVELLLHRHQDLEKLLAAQEEKFAQMQKTEMEQELLLQPQELKPGRAGSSLTSFQWRPSGHQGLGAQLAETRDPQDAKGTPTMEGSLEFKQHLLPGGRQPSSSSWDSCRGNLQGSSLSLFLDERMAAEKVASIALLDLTGARCERLRGRHGRKHTFSLRLTSGAEILFAAPSEEQAESWWRALGSTAAQSLSPKLKAKPVSSLNECTTKDARPGCLLRSDP

SEQ ID NO: 82933 - protein, 313 aa, Homo sapiens
  Payload ID: 16505
  Gene Symbol: SPDYA
  Gene Name: speedy/RINGO cell cycle regulator family member A
  Uniprot ID: Q5MJ70
  ENSP ID: ENSP00000335628
MRHNQMCCETPPTVTVYVKSGSNRSHQPKKPITLKRPICKDNWQAFEKNTHNNNKSKRPKGPCLVIQRQDMTAFFKLFDDDLIQDFLWMDCCCKIADKYLLAMTFVYFKRAKFTISEHTRINFFIALYLANTVEEDEEETKYEIFPWALGKNWRKLFPNFLKLRDQLWDRIDYRAIVSRRCCEEVMAIAPTHYIWQRERSVHHSGAVRNYNRDEVQLPRGPSATPVDCSLCGKKRRYVRLGLSSSSSLSSHTAGVTEKHSQDSYNSLSMDIIGDPSQAYTGSEVVNDHQSNKGKKTNFLKKDKSMEWFTGSEE

SEQ ID NO: 82934 - protein, 313 aa, Homo sapiens; identical to SEQ ID NO: 82933
  Payload ID: 16505
  Gene Symbol: SPDYA
  Gene Name: speedy/RINGO cell cycle regulator family member A
  Uniprot ID: Q5MJ70
  ENSP ID: ENSP00000368898

SEQ ID NO: 82935 - protein, 57 aa, Homo sapiens
  Payload ID: 16505
  Gene Symbol: SPDYA
  Gene Name: speedy/RINGO cell cycle regulator family member A
  ENSP ID: ENSP00000395240
  MOD_RES (1)..(1): Any amino acid
XLANTVEEDEEETKYEIFPWALGKNWRKLFPNFLKLRDQLWDRIDYRAIVSRRCCEE

SEQ ID NO: 82936 - protein, 127 aa, Homo sapiens
  Payload ID: 16505
  Gene Symbol: SPDYA
  Gene Name: speedy/RINGO cell cycle regulator family member A
  ENSP ID: ENSP00000414086
MRHNQMCCETPPTVTVYVKSGSNRSHQPKKPITLKRPICKDNWQAFEKNTHNNNKSKRPKGPCLVIQRQDMTAFFKLFDDDLIQDFLWMDCCCKIADKYLLAMTFVYFKRAKFTISEHTRINFFIAL

SEQ ID NO: 82937 - protein, 293 aa, Homo sapiens
  Payload ID: 16506
  Gene Symbol: SPDYC
  Gene Name: speedy/RINGO cell cycle regulator family member C
  Uniprot ID: Q5MJ68
  ENSP ID: ENSP00000366390
MLWAIPELGSPCPISISYEMSDSQDPTTSPVVTTQVELGGCSRQGGGNGFLRFRQHQEVQAFLSLLEDSFVQEFLSKDPCFQISDKYLLAMVLVYFQRAHLKLSEYTHSSLFLALYLANDMEEDLEGPKCEIFPWALGKDWCLRVGKFLHQRDKLWARMGFRAVVSRQCCEEVMAKEPFHWAWTRDRRPHHGGVQRVCPQVPVRLPRGPGLSPPHCSPCGLPQHCSSHLLKPVSSKCPSLTSECHRPPSQNYLSRVKNAWGGDFLIVLPPQMQLEPGTYSLRIFPKPPARPGH

SEQ ID NO: 82938 - protein, 336 aa, Homo sapiens
  Payload ID: 16507
  Gene Symbol: SPDYE1
  Gene Name: speedy/RINGO cell cycle regulator family member E1
  Uniprot ID: Q8NFV5
  ENSP ID: ENSP00000258704
MQKHYTVAWFLYSAPGVDPSPPCRSLGWKRKREWSDESEEEPEKELAPEPEETWVVETLCGLKMKLKQQRVSPILLEHHKDFNSQLAPGVDPSPPHRSFCWKRKMEWWDKSEESEEEPRKVLAPEPEEIWVAEMLCGLKMKLKRRRVSLVLPEHHEAFNRLLEDPVIKRFLAWDKDLRVSDKYLLAMVIAYFSRAGFPSWQYQRLHFFLALYLANDMEEDDEDSKQNIFHFLYGKNRSRIPLLRKRRFQLYRSMNPRARKNRSHIPLVRKRRFQLRRCMNPRARKNRSQIVLFQKRRFHFFCSMSCRAWVSPEELEEIQAYDPEHWVWARDRARLS

SEQ ID NO: 82939 - protein, 285 aa, Homo sapiens
  Payload ID: 16508
  Gene Symbol: SPDYE16
  Gene Name: speedy/RINGO cell cycle regulator family member E16
  ENSP ID: ENSP00000487736
MQKHYTVAWFLYSAPGVDPSPPCRSLGWKRKKEWSDESEEEPEKELAPEPEETWVVEMLCGLKMKLKQQRVSPILPEHHKDFNSQLAPGVDPSPPHRSFCWKRKREWWDESEESLEEEPRKVLAPEPEEIWVAEMLCGLKMKLKRRRVSLVLPEHHEAFNRLLEDPVIKRFLAWDKDLRVSDKYLLAMVIAYFSRAGLPSWQYQRIHFFLALYLANDMEEDDEDPKQNIFYFLKNRSQIALFQKLRFQFFCSMSGRAWVSREELEEIQAYDPEHWVWARDRARLS

SEQ ID NO: 82940 - protein, 312 aa, Homo sapiens
  Payload ID: 16508
  Gene Symbol: SPDYE16
  Gene Name: speedy/RINGO cell cycle regulator family member E16
  Uniprot ID: A6NNV3
  ENSP ID: ENSP00000487772
MQKHYTVAWFLYSAPGVDPSPPCRSLGWKRKKEWSDESEEEPEKELAPEPEETWVVEMLCGLKMKLKQQRVSPILPEHHKDFNSQLAPGVDPSPPHRSFCWKRKREWWDESEESLEEEPRKVLAPEPEEIWVVEMLCGLKMKLKRRRVSLVLPEHHEAFNRLLEDPVIKRFLAWDKDLRVSDKYLLAMVIAYFSRAGLPSWQYQRIHFFLALYLANDMEEDDEDPKQNIFYFLYGKTRSRIPLVRNRRFQLCRCMNPRARKNRSQIALFQKLRFQFFCSMSGRAWVSREELEEIQAYDPEHWVWARDRARLS

SEQ ID NO: 82941 - protein, 312 aa, Homo sapiens
  Payload ID: 16508
  Gene Symbol: SPDYE16
  Gene Name: speedy/RINGO cell cycle regulator family member E16
  ENSP ID: ENSP00000487806
MQKHYTVAWFLYSAPGVDPSPPCRSLGWKRKKEWSDESEEEPEKELAPEPEETWVVEMLCGLKMKLKQQRVSPILPEHHKDFNSQLAPGVDPSPPHRSFCWKRKREWWDESEESLEEEPRKVLAPEPEEIWVAEMLCGLKMKLKRRRVSLVLPEHHEAFNRLLEDPVIKRFLAWDKDLRVSDKYLLAMVIAYFSRAGLPSWQYQRIHFFLALYLANDMEEDDEDPKQNIFYFLYGKTRSRIPLVRNRRFQLCRCLNPRARKNRSQIALFQKLRFQFFCSMSGRAWVSREELEEIQAYDPEHWVWARDRARLS

SEQ ID NO: 82942 - protein, 352 aa, Homo sapiens
  Payload ID: 16508
  Gene Symbol: SPDYE16
  Gene Name: speedy/RINGO cell cycle regulator family member E16
  ENSP ID: ENSP00000488034
MDRTETRFRKRGQIKGKITTSRQPHPQNEQSPQRSTSGYSLQEVVDDEVLGSSAPGVDPSPPCRSLGWKRKKEWSDESEEEPEKELAPEPEETWVVEMLCGLKMKLKQQRVSPILPEHHKDFNSQLAPGVDPSPPHRSFCWKRKREWWDESEESLEEEPRKVLAPEPEEIWVVEMLCGLKMKLKRRRVSLVLPEHHEAFNRLLEDPVIKRFLAWDKDLRVSDKYLLAMVIAYFSRAGLPSWQYQRIHFFLALYLANDMEEDDEDPKQNIFYFLYGKTRSRIPLVRNRRFQLCRCMNPRARKNRSQIALFQKLRFQFFCSMSGRAWVSREELEEIQAYDPEHWVWARDRARLS

SEQ ID NO: 82943 - protein, 352 aa, Homo sapiens
  Payload ID: 16508
  Gene Symbol: SPDYE16
  Gene Name: speedy/RINGO cell cycle regulator family member E16
  ENSP ID: ENSP00000488772
MDRTETRFRKRGQIKGKITTSRQPHPQNEQSPQRSTSGYSLQEVVDDEVLGSSAPGVDPSPPCRSLGWKRKKEWSDESEEEPEKELAPEPEETWVVEMLCGLKMKLKQQRVSPILPEHHKDFNSQLAPGVDPSPPHRSFCWKRKREWWDESEESLEEEPRKVLAPEPEEIWVAEMLCGLKMKLKRRRVSLVLPEHHEAFNRLLEDPVIKRFLAWDKDLRVSDKYLLAMVIAYFSRAGLPSWQYQRIHFFLALYLANDMEEDDEDPKQNIFYFLYGKTRSRIPLVRNRRFQLCRCLNPRARKNRSQIALFQKLRFQFFCSMSGRAWVSREELEEIQAYDPEHWVWARDRARLS

SEQ ID NO: 82944 - protein, 285 aa, Homo sapiens
  Payload ID: 16508
  Gene Symbol: SPDYE16
  Gene Name: speedy/RINGO cell cycle regulator family member E16
  ENSP ID: ENSP00000488825
MQKHYTVAWFLYSAPGVDPSPPCRSLGWKRKKEWSDESEEEPEKELAPEPEETWVVEMLCGLKMKLKQQRVSPILPEHHKDFNSQLAPGVDPSPPHRSFCWKRKREWWDESEESLEEEPRKVLAPEPEEIWVVEMLCGLKMKLKRRRVSLVLPEHHEAFNRLLEDPVIKRFLAWDKDLRVSDKYLLAMVIAYFSRAGLPSWQYQRIHFFLALYLANDMEEDDEDPKQNIFYFLKNRSQIALFQKLRFQFFCSMSGRAWVSREELEEIQAYDPEHWVWARDRARLS

SEQ ID NO: 82945 - protein, 258 aa, Homo sapiens
  Payload ID: 16509
  Gene Symbol: SPDYE2
  Gene Name: speedy/RINGO cell cycle regulator family member E2
  ENSP ID: ENSP00000342628
MEWWDESEESLEEEPRKVLAPEPEEIWVAEMLCGLKMKLKRRRVSLVLPEHHEAFNRLLEDPVIKRFLAWDKDLRVSDKYLLAMVIAYFSRAGFPSWQYQRIHFFLALYLANDMEEDDEDSKQNIFHFLYRKNRSRIPLLRKPWFQLGHSMNPRARKNRSRIPLLRKRRFQLYRSTNPRARKNRSRIPLLRKRRFQLYRSMNSRARKNRSQIVLFQKRRFHFFCSMSCRAWVSPEELEEIQAYDPEHWVWARDRAHLS

SEQ ID NO: 82946 - protein, 402 aa, Homo sapiens
  Payload ID: 16509
  Gene Symbol: SPDYE2
  Gene Name: speedy/RINGO cell cycle regulator family member E2
  Uniprot ID: Q495Y8
  ENSP ID: ENSP00000395689
MDRTETRFRKRGQITGKITTSRQPHPQNEQSPQRSTSGYPLQEVVDDEMLGPSAPGVDPSPPCRSLGWKRKREWSDESEEEPEKELAPEPEETWVVEMLCGLKMKLKQQRVSPILPEHHKDFNSQLAPGVDPSPPHRSFCWKRKMEWWDESEESLEEEPRKVLAPEPEEIWVAEMLCGLKMKLKRRRVSLVLPEHHEAFNRLLEDPVIKRFLAWDKDLRVSDKYLLAMVIAYFSRAGFPSWQYQRIHFFLALYLANDMEEDDEDSKQNIFHFLYRKNRSRIPLLRKPWFQLGHSMNPRARKNRSRIPLLRKRRFQLYRSTNPRARKNRSRIPLLRKRRFQLYRSMNSRARKNRSQIVLFQKRRFHFFCSMSCRAWVSPEELEEIQAYDPEHWVWARDRAHLS

SEQ ID NO: 82947 - protein, 402 aa, Homo sapiens; identical to SEQ ID NO: 82946
  Payload ID: 16509
  Gene Symbol: SPDYE2
  Gene Name: speedy/RINGO cell cycle regulator family member E2
  Uniprot ID: Q495Y8
  ENSP ID: ENSP00000421686

SEQ ID NO: 82948 - protein, 258 aa, Homo sapiens; identical to SEQ ID NO: 82945
  Payload ID: 16510
  Gene Symbol: SPDYE2B
  Gene Name: speedy/RINGO cell cycle regulator family member E2B
  Uniprot ID: A6NHP3
  ENSP ID: ENSP00000414338

SEQ ID NO: 82949 - protein, 402 aa, Homo sapiens
  Payload ID: 16510
  Gene Symbol: SPDYE2B
  Gene Name: speedy/RINGO cell cycle regulator family member E2B
  Uniprot ID: A6NHP3
  ENSP ID: ENSP00000424058
MDRTETRFRKRGQITGKITTSRQPHPQNEQSPQRSTSGYPLQEVVDDEMLGPSAPGVDPSPPCRSLGWKRKREWSDESEEEPEKELAPEPEETWVVEMLCGLKMKLKQQRVSSILPEHHKDFNSQLAPGVDPSPPHRSFCWKRKMEWWDESEESLEEEPRKVLAPEPEEIWVAEMLCGLKMKLKRRRVSLVLPEHHEAFNRLLEDPVIKRFLAWDKDLRVSDKYLLAMVIAYFSRAGFPSWQYQRIHFFLALYLANDMEEDDEDSKQNIFHFLYRKNRSRIPLLRKPWFQLGHSMNPRARKNRSRIPLLRKRRFQLYRSTNPRARKNRSRIPLLRKRRFQLYRSMNSRARKNRSQIVLFQKRRFHFFCSMSCRAWVSPEELEEIQAYDPEHWVWARDRAHLS

SEQ ID NO: 82950 - protein, 402 aa, Homo sapiens; identical to SEQ ID NO: 82949
  Payload ID: 16510
  Gene Symbol: SPDYE2B
  Gene Name: speedy/RINGO cell cycle regulator family member E2B
  Uniprot ID: A6NHP3
  ENSP ID: ENSP00000440393

SEQ ID NO: 82951 - protein, 549 aa, Homo sapiens
  Payload ID: 16511
  Gene Symbol: SPDYE3
  Gene Name: speedy/RINGO cell cycle regulator family member E3
  Uniprot ID: A6NKU9
  ENSP ID: ENSP00000329565
MTSHQPQPQEEQSPQRSTSGYPLQEVVDDEVSGPSAPGVDPSPPRRSLGCKRKRECLDESDDEPEKELAPEPEETWVAETLCGLKMKAKRRRVSLVLPEYYEAFNRLLAPGVDPSPPRRSLGCKRKRECLDESDDEPEKELAPEPEETWVAETLCGLKMKAKRRRVSLVLPEYYEAFNRLLAPGVDPSPPRRSLGCKRKRECLDESDDEPEKELAPEPEETWVAETLCGLKMKAKRRRVSLVLPEYYEAFNRLLAPGVDPSPPRRSLGCKRKRECLDESDDEPEKELAPEPEETWVAETLCGLKMKAKRRRVSLVLPEYYEAFNRLLAPGVDPSPPRRSLGCKRKRECLDESDDEPEKELAPEPEETWVAETLCGLKMKAKRRRVSLVLPEYYEAFNRLLEDPVIKRFLAWDKDLRVSDKYLLAMVIAYFSRAGLPSWQYQRIHFFLALYLANDMEEDDEAPKQKIFYFLYGKTHSHIPLRPKHWFQLCRPMNPRARKNCSQIALFQKRRFQFFCSMRCRAWVSPEELEEIQAYDPEHWVWARDRAHLS

SEQ ID NO: 82952 - protein, 237 aa, Homo sapiens
  Payload ID: 16512
  Gene Symbol: SPDYE4
  Gene Name: speedy/RINGO cell cycle regulator family member E4
  Uniprot ID: A6NLX3
  ENSP ID: ENSP00000329522
MASGQARPPFEEESPQPSTTVRSPEVVVDDEVPGPSAPWIDPSPQPQSLGLKRKSEWSDESEEELEEELELERAPEPEDTWVVETLCGLKMKLKRKRASSVLPEHHEAFNRLLGDPVVQKFLAWDKDLRVSDKYLLAMVIAYFSRAGLFSWQYQRIHFFLALYLASDMEEDNQAPKQDIFSFLYGKNYSQRPLFHKLRYQLLCSMRWRTWVSPEEMEEIQAYDPEHWVWARDRTLIS

SEQ ID NO: 82953 - protein, 91 aa, Homo sapiens
  Payload ID: 16512
  Gene Symbol: SPDYE4
  Gene Name: speedy/RINGO cell cycle regulator family member E4
  ENSP ID: ENSP00000462742
  MOD_RES (1)..(1): Any amino acid
XRAPEPEDTWVVETLCGLKMKLKRKRASSVLPEHHEAFNRLLGDPVVQKFLAWDKDLRVSDKYLLAMVIAYFSRAGLFSWQYQRIHFFLAL

SEQ ID NO: 82954 - protein, 41 aa, Homo sapiens
  Payload ID: 16512
  Gene Symbol: SPDYE4
  Gene Name: speedy/RINGO cell cycle regulator family member E4
  ENSP ID: ENSP00000464038
MASGQARPPFEEESPQPSTTVRSPEVVVDDEVPGPSGEPLG

SEQ ID NO: 82955 - protein, 402 aa, Homo sapiens
  Payload ID: 16513
  Gene Symbol: SPDYE5
  Gene Name: speedy/RINGO cell cycle regulator family member E5
  ENSP ID: ENSP00000485398
MDRTETRFRKRGQITEKITTSRQPQPQNEQSPQRSTSGYPLQEVVDDEVLGPSAPGVDPSPPCRSLGWKRKREWSDESAEEPEKELAPEPEETWVVEMLCGLKMKLKQQRVSPILPEHHKGFNSQLAPGVDPSPPHRSFCWKRKMEWWDESEESLEEEPRKVLAPEPEEIWVAEMLCGLKMKLKRRRVSLVLPEHHEAFNRLLEDPVIKRFLAWDKDLRVSDKYLLAMVIAYFSRAGFPSWQYQRIHFFLALYLANDMEEDDEDSKQNIFHFLYGKNRSRIPLLRKRWFQLGRSMNPRARKKRSRIPLLRKRRFQLGRSMNPRARKNRSRIPLLRKRRFQLGRSMNLRARKNRSQIVLFQKRRFQFFCSMSGRAWVSPEELEEIQAYDPEHWVWARDRAHLS

SEQ ID NO: 82956 - protein, 337 aa, Homo sapiens [sequence omitted]

SEQ ID NO: 82957 - protein, 402 aa, Homo sapiens; identical to SEQ ID NO: 82955
  Payload ID: 16513
  Gene Symbol: SPDYE5
  Gene Name: speedy/RINGO cell cycle regulator family member E5
  ENSP ID: ENSP00000485662

SEQ ID NO: 82958 - protein, 402 aa, Homo sapiens
  Payload ID: 16514
  Gene Symbol: SPDYE6
  Gene Name: speedy/RINGO cell cycle regulator family member E6
  ENSP ID: ENSP00000485230
MDRTETRFRKRGQITGKITTSRQPHPQNEQSPQRSTSGYPLQEVVDDEMLGPSAPGVDPSPPCRSLGWKRKREWSDESEEEPEKELAPEPEETWVVEMLCGLKMKLKQQRVSSILPEHHKDFNSQLAPGVDPSPPHRSFCWKRKMEWWDESEESLEEEPRKVLAPEPEEIWVAEMLCGLKMKLKRRRVSLVLPEHHEAFNRLLEDPVIKRFLAWDKDLRVSDKYLLAMVIAYFSRAGFPSWQYQRIHFFLALYLANDMEEDDEDSKQNIFHFLYRKNRSRIPLLRKRWFQLGHSMNPRARKNRSRIPLLRKRRFQLYRSTNPRARKNRSRIPLLRKHRFQLYRSMNSRARKNRSQIVLFQKRRFHFFCSMSCRAWVSPEELEEIQAYDPEHWVWARDRAHLS

SEQ ID NO: 82959 - protein, 3267 aa, Homo sapiens
  Payload ID: 16515
  Gene Symbol: SPEG
  Gene Name: SPEG complex locus
  Uniprot ID: Q15772
  ENSP ID: ENSP00000311684
MQKARGTRGEDAGTRAPPSPGVPPKRAKVGAGGGAPVAVAGAPVFLRPLKNAAVCAGSDVRLRVVVSGTPQPSLRWFRDGQLLPAPAPEPSCLWLRRCGAQDAGVYSCMAQNERGRASCEAVLTVLEVGDSETAEDDISDVQGTQRLELRDDGAFSTPTGGSDTLVGTSLDTPPTSVTGTSEEQVSWWGSGQTVLEQEAGSGGGTRRLPGSPRQAQATGAGPRHLGVEPLVRASRANLVGASWGSEDSLSVASDLYGSAFSLYRGRALSIHVSVPQSGLRREEPDLQPQLASEAPRRPAQPPPSKSALLPPPSPRVGKRSPPGPPAQPAATPTSPHRRTQEPVLPEDTTTEEKRGKKSKSSGPSLAGTAESRPQTPLSEASGRLSALGRSPRLVRAGSRILDKLQFFEERRRSLERSDSPPAPLRPWVPLRKARSLEQPKSERGAPWGTPGASQEELRAPGSVAERRRLFQQKAASLDERTRQRSPASDLELRFAQELGRIRRSTSREELVRSHESLRATLQRAPSPREPGEPPLFSRPSTPKTSRAVSPAAAQPPSPSSAEKPGDEPGRPRSRGPAGRTEPGEGPQQEVRRRDQFPLTRSRAIQECRSPVPPPAADPPEARTKAPPGRKREPPAQAVRFLPWATPGLEGAAVPQTLEKNRAGPEAEKRLRRGPEEDGPWGPWDRRGARSQGKGRRARPTSPELESSDDSYVSAGEEPLEAPVFEIPLQNVVVAPGADVLLKCIITANPPPQVSWHKDGSALRSEGRLLLRAEGERHTLLLREARAADAGSYMATATNELGQATCAASLTVRPGGSTSPFSSPITSDEEYLSPPEEFPEPGETWPRTPTMKPSPSQNRRSSDTGSKAPPTFKVSLMDQSVREGQDVIMSIRVQGEPKPVVSWLRNRQPVRPDQRRFAEEAEGGLCRLRILAAERGDAGFYTCKAVNEYGARQCEARLEVRAHPESRSLAVLAPLQDVDVGAGEMALFECLVAGPTDVEVDWLCRGRLLQPALLKCKMHFDGRKCKLLLTSVHEDDSGVYTCKLSTAKDELTCSARLTVRPSLAPLFTRLLEDVEVLEGRAARFDCKISGTPPPVVTWTHFGCPMEESENLRLRQDGGLHSLHIAHVGSEDEGLYAVSAVNTHGQAHCSAQLYVEEPRTAASGPSSKLEKMPSIPEEPEQGELERLSIPDFLRPLQDLEVGLAKEAMLECQVTGLPYPTISWFHNGHRIQSSDDRRMTQYRDVHRLVFPAVGPQHAGVYKSVIANKLGKAACYAHLYVTDVVPGPPDGAPQVVAVTGRMVTLTWNPPRSLDMAIDPDSLTYTVQHQVLGSDQWTALVTGLREPGWAATGLRKGVQHIFRVLSTTVKSSSKPSPPSEPVQLLEHGPTLEEAPAMLDKPDIVYVVEGQPASVTVTFNHVEAQVVWRSCRGALLEARAGVYELSQPDDDQYCLRICRVSRRDMGALTCTARNRHGTQTCSVTLELAEAPRFESIMEDVEVGAGETARFAVVVEGKPLPDIMWYKDEVLLTESSHVSFVYEENECSLVVLSTGAQDGGVYTCTAQNLAGEVSCKAELAVHSAQTAMEVEGVGEDEDHRGRRLSDFYDIHQEIGRGAFSYLRRIVERSSGLEFAAKFIPSQAKPKASARREARLLARLQHDCVLYFHEAFERRRGLVIVTELCTEELLERIARKPTVCESEIRAYMRQVLEGIHYLHQSHVLHLDVKPENLLVWDGAAGEQQVRICDFGNAQELTPGEPQYCQYGTPEFVAPEIVNQSPVSGVTDIWPVGVVAFLCLTGISPFVGENDRTTLMNIRNYNVAFEETTFLSLSREARGFLIKVLVQDRLRPTAEETLEHPWFKTQAKGAEVSTDHLKLFLSRRRWQRSQISYKCHLVLRPIPELLRAPPERVWVTMPRRPPPSGGLSSSSDSEEEELEELPSVPRPLQPEFSGSRVSLTDIPTEDEALGTPETGAATPMDWQEQGRAPSQDQEAPSPEALPSPGQEPAAGASPRRGELRRGSSAESALPRAGPRELGRGLHKAASVELPQRRSPSPGATRLARGGLGEGEYAQRLQALRQRLLRGGPEDGKVSGLRGPLLESLGGRARDPRMARAASSEAAPHHQPPLENRGLQKSSSFSQGEAEPRGRHRRAGAPLEIPVARLGARRLQESPSLSALSEAQPSSPARPSAPKPSTPKSAEPSATTPSDAPQPPAPQPAQDKAPEPRPEPVRASKPAPPPQALQTLALPLTPYAQIIQSLQLSGHAQGPSQGPAAPPSEPKPHAAVFARVASPPPGAPEKRVPSAGGPPVLAEKARVPTVPPRPGSSLSSSIENLESEAVFEAKFKRSRESPLSLGLRLLSRSRSEERGPFRGAEEEDGIYRPSPAGTPLELVRRPERSRSVQDLRAVGEPGLVRRLSLSLSQRLRRTPPAQRHPAWEARGGDGESSEGGSSARGSPVLAMRRRLSFTLERLSSRLQRSGSSEDSGGASGRSTPLFGRLRRATSEGESLRRLGLPHNQLAAQAGATTPSAESLGSEASATSGSSAPGESRSRLRWGFSRPRKDKGLSPPNLSASVQEELGHQYVRSESDFPPVFHIKLKDQVLLEGEAATLLCLPAACPAPHISWMKDKKSLRSEPSVIIVSCKDGRQLLSIPRAGKRHAGLYECSATNVLGSITSSCTVAVARVPGKLAPPEVPQTYQDTALVLWKPGDSRAPCTYTLERRVDGESVWHPVSSGIPDCYYNVTHLPVGVTVRFRVACANRAGQGPFSNSSEKVFVRGTQDSSAVPSAAHQEAPVTSRPARARPPDSPTSLAPPLAPAAPTPPSVTVSPSSPPTPPSQALSSLKAVGPPPQTPPRRHRGLQAARPAEPTLPSTHVTPSEPKPFVLDTGTPIPASTPQGVKPVSSSTPVYVVTSFVSAPPAPEPPAPEPPPEPTKVTVQSLSPAKEVVSSPGSSPRSSPRPEGTTLRQGPPQKPYTFLEEKARGRFGVVRACRENATGRTFVAKIVPYAAEGKRRVLQEYEVLRTLHHERIMSLHEAYITPRYLVLIAESCGNRELLCGLSDRFRYSEDDVATYMVQLLQGLDYLHGHHVLHLDIKPDNLLLAPDNALKIVDFGSAQPYNPQALRPLGHRTGTLEFMAPEMVKGEPIGSATDIWGAGVLTYIMLSGRSPFYEPDPQETEARIVGGRFDAFQLYPNTSQSATLFLRKVLSVHPWSRPSLQDCLAHPWLQDAYLMKLRRQTLTFTTNRLKEFLGEQRRRRAEAATRHKVLLRSYPGGP

SEQ ID NO: 82960 - protein, 113 aa, Homo sapiens
  Payload ID: 16515
  Gene Symbol: SPEG
  Gene Name: SPEG complex locus
  Uniprot ID: Q15772
  ENSP ID: ENSP00000379917
MKPSPSQNRRSSDTGSKAPPTFKVSLMDQSVREGQDVIMSIRVQGEPKPVVSWLRNRQPVRPDQRRFAEEAEGGLCRLRILAAERGDAGFYTCKAVNEYGARQCEARLEVRGE

SEQ ID NO: 82961 - protein, 113 aa, Homo sapiens; identical to SEQ ID NO: 82960
  Payload ID: 16515
  Gene Symbol: SPEG
  Gene Name: SPEG complex locus
  Uniprot ID: Q15772
  ENSP ID: ENSP00000379919

SEQ ID NO: 82962 - protein, 113 aa, Homo sapiens; identical to SEQ ID NO: 82960
  Payload ID: 16515
  Gene Symbol: SPEG
  Gene Name: SPEG complex locus
  Uniprot ID: Q15772
  ENSP ID: ENSP00000379920

SEQ ID NO: 82963 - protein, 858 aa, Homo sapiens
  Payload ID: 16515
  Gene Symbol: SPEG
  Gene Name: SPEG complex locus
  ENSP ID: ENSP00000379926
MKKLWVKKRFQKTGHSRRAFGRLTHDSETAEDDISDVQGTQRLELRDDGAFSTPTGGSDTLVGTSLDTPPTSVTGTSEEQVSWWGSGQTVLEQEAGSGGGTRRLPGSPRQAQATGAGPRHLGVEPLVRASRANLVGASWGSEDSLSVASDLYGSAFSLYRGRALSIHVSVPQSGLRREEPDLQPQLASEAPRRPAQPPPSKSALLPPPSPRVGKRSPPGPPAQPAATPTSPHRRTQEPVLPEDTTTEEKRGKKSKSSGPSLAGTAESRPQTPLSEASGRLSALGRSPRLVRAGSRILDKLQFFEERRRSLERSDSPPAPLRPWVPLRKARSLEQPKSERGAPWGTPGASQEELRAPGSVAERRRLFQQKAASLDERTRQRSPASDLELRFAQELGRIRRSTSREELVRSHESLRATLQRAPSPREPGEPPLFSRPSTPKTSRAVSPAAAQPPSPSSAEKPGDEPGRPRSRGPAGRTEPGEGPQQEVRRRDQFPLTRSRAIQECRSPVPPPAADPPEARTKAPPGRKREPPAQAVRFLPWATPGLEGAAVPQTLEKNRAGPEAEKRLRRGPEEDGPWGPWDRRGARSQGKGRRARPTSPELESSDDSYVSAGEEPLEAPVFEIPLQNVVVAPGADVLLKCIITANPPPQVSWHKDGSALRSEGRLLLRAEGERHTLLLREARAADAGSYMATATNELGQATCAASLTVRPGGSTSPFSSPITSDEEYLSPPEEFPEPGETWPRTPTMKPSPSQNRRSSDTGSKAPPTFKVSLMDQSVREGQDVIMSIRVQGEPKPVVSWLRNRQPVRPDQRRFAEEAEGGLCRLRILAAERGDAGFYTCKAVNEYGARQCEARLEVRGE

SEQ ID NO: 82964 - protein, 53 aa, Homo sapiens
  Payload ID: 16515
  Gene Symbol: SPEG
  Gene Name: SPEG complex locus
  ENSP ID: ENSP00000383902
MKKLWVKKRFQKTGHSRRAFGRLTHGAWTVGVLALAHAYSSSWSLSLCEASSS

SEQ ID NO: 82965 - protein, 43 aa, Homo sapiens
  Payload ID: 16515
  Gene Symbol: SPEG
  Gene Name: SPEG complex locus
  ENSP ID: ENSP00000387344
  MOD_RES (1)..(1): Any amino acid
XSRANLVGASWGSEDSLSVASDLYGSAFSLYRGRALSIHVVFG

SEQ ID NO: 82966 - protein, 343 aa, Homo sapiens
  Payload ID: 16515
  Gene Symbol: SPEG
  Gene Name: SPEG complex locus
  ENSP ID: ENSP00000390353
  MOD_RES (1)..(1): Any amino acid
XMLSGRSPFYEPDPQETEARIVGGRFDAFQLYPNTSQSATLFLRKVLSVHPWSRPSLQDCLAHPWLQDAYLMKLRRQTLTFTTNRLKEFLGEQRRRRAEAATRHKMSKAAPAKKPVAVAPAPGCTLDINDPQVQSAAIRIQASYRGHRSRKELREKGPPRVLEPLKDVVLIEGSAAKLTCRISAFPDPFIRWSKDGKELRDGPKYRYVFEDPDVVALVVRDGELADLGQYSINVTNPFGQCSDSARILVEVPTKIQKGPDNTKARKGTTVTLTAEILGEPAPDVGWTKDGEDIEEDDRVFFEIGSTTTTLTIRRATPQDSGKYEVYVENSLGMDQSFARVDVA

SEQ ID NO: 82967 - protein, 187 aa, Homo sapiens
  Payload ID: 16515
  Gene Symbol: SPEG
  Gene Name: SPEG complex locus
  ENSP ID: ENSP00000393134
MLLTFQRGPAGGENRPFPPGLWPTHPCEVFRSCRKQSYDSETAEDDISDVQGTQRLELRDDGAFSTPTGGSDTLVGTSLDTPPTSVTGTSEEQVSWWGSGQTVLEQEAGSGGGTRRLPGSPSSVPQSGLRREEPDLQPQLASEAPRRPAQPPPSKSALLPPPSPRVGKRSPPGPPAQPAATPTSPHR

SEQ ID NO: 82968 - protein, 53 aa, Homo sapiens; identical to SEQ ID NO: 82964
  Payload ID: 16515
  Gene Symbol: SPEG
  Gene Name: SPEG complex locus
  ENSP ID: ENSP00000397514

SEQ ID NO: 82969 - protein, 84 aa, Homo sapiens
  Payload ID: 16515
  Gene Symbol: SPEG
  Gene Name: SPEG complex locus
  ENSP ID: ENSP00000406530
MKKLWVKKRFQKTGHSRRAFGRLTHAKFSAPAESKVTTQRRLRMTSAMCREPSAWSFGMTGPSAPPRGVLTPWWAPPWTHPRPP

SEQ ID NO: 82970 - protein, 299 aa, Homo sapiens
  Payload ID: 16515
  Gene Symbol: SPEG
  Gene Name: SPEG complex locus
  ENSP ID: ENSP00000410986
MKKLWVKKRFQKTGHSRRAFGRLTHVFRSCRKQSYDSETAEDDISDVQGTQRLELRDDGAFSTPTGGSDTLVGTSLDTPPTSVTGTSEEQVSWWGSGQTVLEQEAGSGGGTRRLPGSPSSVPQSGLRREEPDLQPQLASEAPRRPAQPPPSKSALLPPPSPRVGKRSPPGPPAQPAATPTSPHRRTQEPVLPEDTTTEEKRGKKSKSSGPSLAGTAESRPQTPLSEASGRLSALGRSPRLVRAGSRILDKLQFFEERRRSLERSDSPPAPLRPWVPLRKARSLEQPKSERGAPWGTPGA

SEQ ID NO: 82971 - protein, 184 aa, Homo sapiens
  Payload ID: 16515
  Gene Symbol: SPEG
  Gene Name: SPEG complex locus
  ENSP ID: ENSP00000414549
  MOD_RES (1)..(1): Any amino acid
XETAEDDISDVQGTQRLELRDDGAFSTPTGTSEEQVSWWGSGQTVLEQEAGSGGGTRRLPGSPRQAQATGAGPRHLGVEPLVRASRANLVGASWGSEDSLSVASDLYGSAFSLYRGRALSIHVSVPQSGLRREEPDLQPQLASEAPRRPAQPPPSKSALLPPPSPRVGKRSPPGPPAQPAATPT

SEQ ID NO: 82972 - protein, 238 aa, Homo sapiens
  Payload ID: 16515
  Gene Symbol: SPEG
  Gene Name: SPEG complex locus
  ENSP ID: ENSP00000479190
MSKAAPAKKPVAVAPAPGCTLDINDPQVQSAAIRIQASYRGHRSRKELREKGPPRVLEPLKDVVLIEGSAAKLTCRISAFPDPFIRWSKDGKELRDGPKYRYVFEDPDVVALVVRDGELADLGQYSINVTNPFGQCSDSARILVEVPTKIQKGPDNTKARKGTTVTLTAEILGEPAPDVGWTKDGEDIEEDDRVFFEIGSTTTTLTIRRATPQDSGKYEVYVENSLGMDQSFARVDVA

SEQ ID NO: 82973 - protein, 3664 aa, Homo sapiens
  Payload ID: 16516
  Gene Symbol: SPEN
  Gene Name: spen family transcriptional repressor
  Uniprot ID: Q96T58
  ENSP ID: ENSP00000364912
MVRETRHLWVGNLPENVREEKIIEHFKRYGRVESVKILPKRGSEGGVAAFVDFVDIKSAQKAHNSVNKMGDRDLRTDYNEPGTIPSAARGLDDTVSIASRSREVSGFRGGGGGPAYGPPPSLHAREGRYERRLDGASDNRERAYEHSAYGHHERGTGGFDRTRHYDQDYYRDPRERTLQHGLYYASRSRSPNRFDAHDPRYEPRAREQFTLPSVVHRDIYRDDITREVRGRRPERNYQHSRSRSPHSSQSRNQSPQRLASQASRPTRSPSGSGSRSRSSSSDSISSSSSTSSDSSDSSSSSSDDSPARSVQSAAVPAPTSQLLSSLEKDEPRKSFGIKVQNLPVRSTDTSLKDGLFHEFKKFGKVTSVQIHGTSEERYGLVFFRQQEDQEKALTASKGKLFFGMQIEVTAWIGPETESENEFRPLDERIDEFHPKATRTLFIGNLEKTTTYHDLRNIFQRFGEIVDIDIKKVNGVPQYAFLQYCDIASVCKAIKKMDGEYLGNNRLKLGFGKSMPTNCVWLDGLSSNVSDQYLTRHFCRYGPVVKVVFDRLKGMALVLYNEIEYAQAAVKETKGRKIGGNKIKVDFANRESQLAFYHCMEKSGQDIRDFYEMLAERREERRASYDYNQDRTYYESVRTPGTYPEDSRRDYPARGREFYSEWETYQGDYYESRYYDDPREYRDYRNDPYEQDIREYSYRQRERERERERFESDRDRDHERRPIERSQSPVHLRRPQSPGASPSQAERLPSDSERRLYSRSSDRSGSCSSLSPPRYEKLDKSRLERYTKNEKTDKERTFDPERVERERRLIRKEKVEKDKTDKQKRKGKVHSPSSQSSETDQENEREQSPEKPRSCNKLSREKADKEGIAKNRLELMPCVVLTRVKEKEGKVIDHTPVEKLKAKLDNDTVKSSALDQKLQVSQTEPAKSDLSKLESVRMKVPKEKGLSSHVEVVEKEGRLKARKHLKPEQPADGVSAVDLEKLEARKRRFADSNLKAEKQKPEVKKSSPEMEDARVLSKKQPDVSSREVILLREGEAERKPVRKEILKRESKKIKLDRLNTVASPKDCQELASISVGSGSRPSSDLQARLGELAGESVENQEVQSKKPIPSKPQLKQLQVLDDQGPEREDVRKNYCSLRDETPERKSGQEKSHSVNTEEKIGIDIDHTQSYRKQMEQSRRKQQMEMEIAKSEKFGSPKKDVDEYERRSLVHEVGKPPQDVTDDSPPSKKKRMDHVDFDICTKRERNYRSSRQISEDSERTGGSPSVRHGSFHEDEDPIGSPRLLSVKGSPKVDEKVLPYSNITVREESLKFNPYDSSRREQMADMAKIKLSVLNSEDELNRWDSQMKQDAGRFDVSFPNSIIKRDSLRKRSVRDLEPGEVPSDSDEDGEHKSHSPRASALYESSRLSFLLRDREDKLRERDERLSSSLERNKFYSFALDKTITPDTKALLERAKSLSSSREENWSFLDWDSRFANFRNNKDKEKVDSAPRPIPSWYMKKKKIRTDSEGKMDDKKEDHKEEEQERQELFASRFLHSSIFEQDSKRLQHLERKEEDSDFISGRIYGKQTSEGANSTTDSIQEPVVLFHSRFMELTRMQQKEKEKDQKPKEVEKQEDTENHPKTPESAPENKDSELKTPPSVGPPSVTVVTLESAPSALEKTTGDKTVEAPLVTEEKTVEPATVSEEAKPASEPAPAPVEQLEQVDLPPGADPDKEAAMMPAGVEEGSSGDQPPYLDAKPPTPGASFSQAESNVDPEPDSTQPLSKPAQKSEEANEPKAEKPDATADAEPDANQKAEAAPESQPPASEDLEVDPPVAAKDKKPNKSKRSKTPVQAAAVSIVEKPVTRKSERIDREKLKRSNSPRGEAQKLLELKMEAEKITRTASKNSAADLEHPEPSLPLSRTRRRNVRSVYATMGDHENRSPVKEPVEQPRVTRKRLERELQEAAAVPTTPRRGRPPKTRRRADEEEENEAKEPAETLKPPEGWRSPRSQKTAAGGGPQGKKGKNEPKVDATRPEATTEVGPQIGVKESSMEPKAAEEEAGSEQKRDRKDAGTDKNPPETAPVEVVEKKPAPEKNSKSKRGRSRNSRLAVDKSASLKNVDAAVSPRGAAAQAGERESGVVAVSPEKSESPQKEDGLSSQLKSDPVDPDKEPEKEDVSASGPSPEATQLAKQMELEQAVEHIAKLAEASASAAYKADAPEGLAPEDRDKPAHQASETELAAAIGSIINDISGEPENFPAPPPYPGESQTDLQPPAGAQALQPSEEGMETDEAVSGILETEAATESSRPPVNAPDPSAGPTDTKEARGNSSETSHSVPEAKGSKEVEVTLVRKDKGRQKTTRSRRKRNTNKKVVAPVESHVPESNQAQGESPAANEGTTVQHPEAPQEEKQSEKPHSTPPQSCTSDLSKIPSTENSSQEISVEERTPTKASVPPDLPPPPQPAPVDEEPQARFRVHSIIESDPVTPPSDPSIPIPTLPSVTAAKLSPPVASGGIPHQSPPTKVTEWITRQEEPRAQSTPSPALPPDTKASDVDTSSSTLRKILMDPKYVSATSVTSTSVTTAIAEPVSAAPCLHEAPPPPVDSKKPLEEKTAPPVTNNSEIQASEVLVAADKEKVAPVIAPKITSVISRMPVSIDLENSQKITLAKPAPQTLTGLVSALTGLVNVSLVPVNALKGPVKGSVTTLKSLVSTPAGPVNVLKGPVNVLTGPVNVLTTPVNATVGTVNAAPGTVNAAASAVNATASAVTVTAGAVTAASGGVTATTGTVTMAGAVIAPSTKCKQRASANENSRFHPGSMPVIDDRPADAGSGAGLRVNTSEGVVLLSYSGQKTEGPQRISAKISQIPPASAMDIEFQQSVSKSQVKPDSVTASQPPSKGPQAPAGYANVATHSTLVLTAQTYNASPVISSVKADRPSLEKPEPIHLSVSTPVTQGGTVKVLTQGINTPPVLVHNQLVLTPSIVTTNKKLADPVTLKIETKVLQPANLGSTLTPHHPPALPSKLPTEVNHVPSGPSIPADRTVSHLAAAKLDAHSPRPSGPGPSSFPRASHPSSTASTALSTNATVMLAAGIPVPQFISSIHPEQSVIMPPHSITQTVSLSHLSQGEVRMNTPTLPSITYSIRPEALHSPRAPLQPQQIEVRAPQRASTPQPAPAGVPALASQHPPEEEVHYHLPVARATAPVQSEVLVMQSEYRLHPYTVPRDVRIMVHPHVTAVSEQPRAADGVVKVPPASKAPQQPGKEAAKTPDAKAAPTPTPAPVPVPVPLPAPAPAPHGEARILTVTPSNQLQGLPLTPPVVVTHGVQIVHSSGELFQEYRYGDIRTYHPPAQLTHTQFPAASSVGLPSRTKTAAQGPPPEGEPLQPPQPVQSTQPAQPAPPCPPSQLGQPGQPPSSKMPQVSQEAKGTQTGVEQPRLPAGPANRPPEPHTQVQRAQAETGPTSFPSPVSVSMKPDLPVSLPTQTAPKQPLFVPTTSGPSTPPGLVLPHTEFQPAPKQDSSPHLTSQRPVDMVQLLKKYPIVWQGLLALKNDTAAVQLHFVSGNNVLAHRSLPLSEGGPPLRIAQRMRLEATQLEGVARRMTVETDYCLLLALPCGRDQEDVVSQTESLKAAFITYLQAKQAAGIINVPNPGSNQPAYVLQIFPPCEFSESHLSRLAPDLLASISNISPHLMIVIASV

SEQ ID NO: 82974 - protein, 373 aa, Homo sapiens
  Payload ID: 16516
  Gene Symbol: SPEN
  Gene Name: spen family transcriptional repressor
  ENSP ID: ENSP00000388021
MNVDKFLIVCYLKKEVWGFESYSLSGTTCFQWNYFVWSLRFFFSCGSSKYHLTPLPIKKVDYPHKRGQNWGSYVHNSLPRFNWDYRSCFHTWKRASDNRERAYEHSAYGHHERGTGGFDRTRHYDQDYYRDPRERTLQHGLYYASRSRSPNRFDAHDPRYEPRAREQFTLPSVVHRDIYRDDITREVRGRRPERNYQHSRSRSPHSSQSRNQSPQRLASQASRPTRSPSGSGSRSRSSSSDSISSSSSTSSDSSDSSSSSSDDSPARSVQSAAVPAPTSQLLSSLEKDEPRKSFGIKVQNLPVRSTDTSLKDGLFHEFKKFGKVTSVQIHGTSEERYGLVFFRQQEDQEKALTASKGKLFFGMQIEVTAWIGP

SEQ ID NO: 82975 - protein, 297 aa, Homo sapiens
  Payload ID: 16516
  Gene Symbol: SPEN
  Gene Name: spen family transcriptional repressor
  ENSP ID: ENSP00000400914
  MOD_RES (1)..(1): Any amino acid
XQASRPTRSPSGSGSRSRSSSSDSISSSSSTSSDSDSSSSSSDDSPARSVQSAAVPAPTSQLLSSLEKDEPRKSFGIKVQNLPVRSTDTSLKDGLFHEFKKFGKVTSVQIHGTSEERYGLVFFRQQEDQEKALTASKGKLFFGMQIEVTAWIGPETESENEFRPLDERIDEFHPKATRTLFIGNLEKTTTYHDLRNIFQRFGEIVDIDIKKVNGVPQYAFLQYCDIASVCKAIKKMDGEYLGNNRLKLGFGKSMPTNCVWLDGLSSNVSDQYLTRHFCRYGPVVKVVFDRLKGMALV

SEQ ID NO: 82976 - protein, 294 aa, Homo sapiens
  Payload ID: 16517
  Gene Symbol: SPACA1
  Gene Name: sperm acrosome associated 1
  Uniprot ID: Q9HBV2
  ENSP ID: ENSP00000237201
MSPRGTGCSAGLLMTVGWLLLAGLQSARGTNVTAAVQDAGLAHEGEGEEETENNDSETAENYAPPETEDVSNRNVVKEVEFGMCTVTCGIGVREVILTNGCPGGESKCVVRVEECRGPTDCGWGKPISESLESVRLACIHTSPLNRFKYMWKLLRQDQQSIILVNDSAILEVRKESHPLAFECDTLDNNEIVATIKFTVYTSSELQMRRSSLPATDAALIFVLTIGVIICVFIIFLLIFIIINWAAVKAFWGAKASTPEVQSEQSSVRYKDSTSLDQLPTEMPGEDDALSEWNE

SEQ ID NO: 82977 - protein, 215 aa, Homo sapiens [sequence omitted]

SEQ ID NO: 82978 - protein, 112 aa, Homo sapiens
  Payload ID: 16518
  Gene Symbol: SPACA3
  Gene Name: sperm acrosome associated 3
  ENSP ID: ENSP00000378134
MVSALRGAPLIRVCLAYFTSGFNAAALDYEADGSTNNGIFQINSRRWCSNLTPNVPNVCRMYCSDLLNPNLKDTVICAMKITQEPQGLGYWEAWRHHCQGKDLTEWVDGCDF

SEQ ID NO: 82979 - protein, 146 aa, Homo sapiens
  Payload ID: 16518
  Gene Symbol: SPACA3
  Gene Name: sperm acrosome associated 3
  Uniprot ID: Q8IXA5
  ENSP ID: ENSP00000463386
MLLALVCLLSCLLPSSEAKLYGRCELARVLHDFGLDGYRGYSLADWVCLAYFTSGFNAAALDYEADGSTNNGIFQINSRRWCSNLTPNVPNVCRMYCSDLLNPNLKDTVICAMKITQEPQGLGYWEAWRHHCQGKDLTEWVDGCDF

SEQ ID NO: 82980 - protein, 124 aa, Homo sapiens
  Payload ID: 16519
  Gene Symbol: SPACA4
  Gene Name: sperm acrosome associated 4
  Uniprot ID: Q8TDM5
  ENSP ID: ENSP00000312774
MVLCWLLLLVMALPPGTTGVKDCVFCELTDSMQCPGTYMHCGDDEDCFTGHGVAPGTGPVINKGCLRATSCGLEEPVSYRGVTYSLTTNCCTGRLCNRAPSSQTVGATTSLALGLGMLLPPRLL

SEQ ID NO: 82981 - protein, 159 aa, Homo sapiens
  Payload ID: 16520
  Gene Symbol: SPACA5
  Gene Name: sperm acrosome associated 5
  Uniprot ID: Q96QH8
  ENSP ID: ENSP00000305847
MKAWGTVVVTLATLMVVTVDAKIYERCELAARLERAGLNGYKGYGVGDWLCMAHYESGFDTAFVDHNPDGSSEYGIFQLNSAWWCDNGITPTKNLCHMDCHDLLNRHILDDIRCAKQIVSSQNGLSAWTSWRLHCSGHDLSEWLKGCDMHVKIDPKIHP

SEQ ID NO: 82982 - protein, 159 aa, Homo sapiens; identical to SEQ ID NO: 82981
  Payload ID: 16520
  Gene Symbol: SPACA5
  Gene Name: sperm acrosome associated 5
  Uniprot ID: Q96QH8
  ENSP ID: ENSP00000366139

SEQ ID NO: 82983 - protein, 159 aa, Homo sapiens; identical to SEQ ID NO: 82981
  Payload ID: 16521
  Gene Symbol: SPACA5B
  Gene Name: sperm acrosome associated 5B
  Uniprot ID: Q96QH8
  ENSP ID: ENSP00000304762

SEQ ID NO: 82984 - protein, 195 aa, Homo sapiens
  Payload ID: 16522
  Gene Symbol: SPACA7
  Gene Name: sperm acrosome associated 7
  Uniprot ID: Q96KW9
  ENSP ID: ENSP00000283550
MAVSQGDGTLCFVLLLCCWQETELRPRTVIPGSPTEIPFSSKQEDMSELLDEILVQEILDLNKTTPSEMPSTASTLSTPLHAGIDENYQAGGSENYHELLENLQFSPGIEVKISNDEANANANLHGDPSENYRGPQVSPGSEKSVSSKEKNSKNTQYENLSILDQILQNIGRSSGNIFHKEQQRTSAQRRSQGSQ

SEQ ID NO: 82985 - protein, 164 aa, Homo sapiens
  Payload ID: 16522
  Gene Symbol: SPACA7
  Gene Name: sperm acrosome associated 7
  ENSP ID: ENSP00000364851
MLWLLPTDRGRSGNGNEPQDEILVQEILDLNKTTPSEMPSTASTLSTPLHAGIDENYQAGGSENYHELLENLQFSPGIEVKISNDEANANANLHGDPSENYRGPQVSPGSEKSVSSKEKNSKNTQYENLSILDQILQNIGRSSGNIFHKEQQRTSAQRRSQGSQ

SEQ ID NO: 82986 - protein, 111 aa, Homo sapiens
  Payload ID: 16522
  Gene Symbol: SPACA7
  Gene Name: sperm acrosome associated 7
  ENSP ID: ENSP00000406733
MTFFTHLWDGDPVSQVAGSPTEIPFSSKQEDMSELLDEILVQEILDLNKTTPSEMPSTASTLSTPLHAGIDENYQAGGSENYHELLENLQFSPGIEVKISNDEANANANLH

SEQ ID NO: 82987 - protein, 104 aa, Homo sapiens
  Payload ID: 16522
  Gene Symbol: SPACA7
  Gene Name: sperm acrosome associated 7
  ENSP ID: ENSP00000416096
MLWLLPTDRGRSGNGNEPQGSPTEIPFSSKQEDMSELLDEILVQEILDLNKTTPSEMPSTASTLSTPLHAGIDENYQAGGSENYHELLENLQFSPGIEVKISND

SEQ ID NO: 82988 - protein, 195 aa, Homo sapiens; identical to SEQ ID NO: 82984
  Payload ID: 16522
  Gene Symbol: SPACA7
  Gene Name: sperm acrosome associated 7
  Uniprot ID: Q96KW9
  ENSP ID: ENSP00000480272

SEQ ID NO: 82989 - protein, 104 aa, Homo sapiens; identical to SEQ ID NO: 82987
  Payload ID: 16522
  Gene Symbol: SPACA7
  Gene Name: sperm acrosome associated 7
  ENSP ID: ENSP00000487684

SEQ ID NO: 82990 - protein, 111 aa, Homo sapiens; identical to SEQ ID NO: 82986
  Payload ID: 16522
  Gene Symbol: SPACA7
  Gene Name: sperm acrosome associated 7
  ENSP ID: ENSP00000488255

SEQ ID NO: 82991 - protein, 164 aa, Homo sapiens; identical to SEQ ID NO: 82985
  Payload ID: 16522
  Gene Symbol: SPACA7
  Gene Name: sperm acrosome associated 7
  ENSP ID: ENSP00000488452

SEQ ID NO: 82992 - protein, 509 aa, Homo sapiens
  Payload ID: 16523
  Gene Symbol: SPAM1
  Gene Name: sperm adhesion molecule 1 (PH-20 hyaluronidase, zona pellucida binding)
  Uniprot ID: P38567
  ENSP ID: ENSP00000223028
MGVLKFKHIFFRSFVKSSGVSQIVFTFLLIPCCLTLNFRAPPVIPNVPFLWAWNAPSEFCLGKFDEPLDMSLFSFIGSPRINATGQGVTIFYVDRLGYYPYIDSITGVTVNGGIPQKISLQDHLDKAKKDITFYMPVDNLGMAVIDWEEWRPTWARNWKPKDVYKNRSIELVQQQNVQLSLTEATEKAKQEFEKAGKDFLVETIKLGKLLRPNHLWGYYLFPDCYNHHYKKPGYNGSCFNVEIKRNDDLSWLWNESTALYPSIYLNTQQSPVAATLYVRNRVREAIRVSKIPDAKSPLPVFAYTRIVFTDQVLKFLSQDELVYTFGETVALGASGIVIWGTLSIMRSMKSCLLLDNYMETILNPYIINVTLAAKMCSQVLCQEQGVCIRKNWNSSDYLHLNPDNFAIQLEKGGKFTVRGKPTLEDLEQFSEKFYCSCYSTLSCKEKADVKDTDAVDVCIADGVCIDAFLKPPMETEEPQIFYNASPSTLSATMFIVSILFLIISSVASL

SEQ ID NO: 82993 - protein, 511 aa, Homo sapiens
  Payload ID: 16523
  Gene Symbol: SPAM1
  Gene Name: sperm adhesion molecule 1 (PH-20 hyaluronidase, zona pellucida binding)
  Uniprot ID: P38567
  ENSP ID: ENSP00000345849
MGVLKFKHIFFRSFVKSSGVSQIVFTFLLIPCCLTLNFRAPPVIPNVPFLWAWNAPSEFCLGKFDEPLDMSLFSFIGSPRINATGQGVTIFYVDRLGYYPYIDSITGVTVNGGIPQKISLQDHLDKAKKDITFYMPVDNLGMAVIDWEEWRPTWARNWKPKDVYKNRSIELVQQQNVQLSLTEATEKAKQEFEKAGKDFLVETIKLGKLLRPNHLWGYYLFPDCYNHHYKKPGYNGSCFNVEIKRNDDLSWLWNESTALYPSIYLNTQQSPVAATLYVRNRVREAIRVSKIPDAKSPLPVFAYTRIVFTDQVLKFLSQDELVYTFGETVALGASGIVIWGTLSIMRSMKSCLLLDNYMETILNPYIINVTLAAKMCSQVLCQEQGVCIRKNWNSSDYLHLNPDNFAIQLEKGGKFTVRGKPTLEDLEQFSEKFYCSCYSTLSCKEKADVKDTDAVDVCIADGVCIDAFLKPPMETEEPQIFYNASPSTLSATMFIWRLEVWDQGISRIGFF

SEQ ID NO: 82994 - protein, 511 aa, Homo sapiens; identical to SEQ ID NO: 82993
  Payload ID: 16523
  Gene Symbol: SPAM1
  Gene Name: sperm adhesion molecule 1 (PH-20 hyaluronidase, zona pellucida binding)
  Uniprot ID: P38567
  ENSP ID: ENSP00000386028

SEQ ID NO: 82995 - protein, 80 aa, Homo sapiens
  Payload ID: 16523
  Gene Symbol: SPAM1
  Gene Name: sperm adhesion molecule 1 (PH-20 hyaluronidase, zona pellucida binding)
  ENSP ID: ENSP00000391491
MGVLKFKHIFFRSFVKSSGVSQIVFTFLLIPCCLTLNFRAPPVIPNVPFLWAWNAPSEFCLGKFDEPLDMSLFSFIGSPR

SEQ ID NO: 82996 - protein, 509 aa, Homo sapiens; identical to SEQ ID NO: 82992
  Payload ID: 16523
  Gene Symbol: SPAM1
  Gene Name: sperm adhesion molecule 1 (PH-20 hyaluronidase, zona pellucida binding)
  Uniprot ID: P38567
  ENSP ID: ENSP00000402123

SEQ ID NO: 82997 - protein, 509 aa, Homo sapiens; identical to SEQ ID NO: 82992
  Payload ID: 16523
  Gene Symbol: SPAM1
  Gene Name: sperm adhesion molecule 1 (PH-20 hyaluronidase, zona pellucida binding)
  Uniprot ID: P38567
  ENSP ID: ENSP00000417934

SEQ ID NO: 82998 - protein, 1068 aa, Homo sapiens
  Payload ID: 16524
  Gene Symbol: SPECC1
  Gene Name: sperm antigen with calponin homology and coiled-coil domains 1
  Uniprot ID: Q5M775
  ENSP ID: ENSP00000261503
MRSAAKPWNPAIRAGGHGPDRVRPLPAASSGMKSSKSSTSLAFESRLSRLKRASSEDTLNKPGSTAASGVVRLKKTATAGAISELTESRLRSGTGAFTTTKRTGIPAPREFSVTVSRERSVPRGPSNPRKSVSSPTSSNTPTPTKHLRTPSTKPKQENEGGEKAALESQVRELLAEAKAKDSEINRLRSELKKYKEKRTLNAEGTDALGPNVDGTSVSPGDTEPMIRALEEKNKNFQKELSDLEEENRVLKEKLIYLEHSPNSEGAASHTGDSSCPTSITQESSFGSPTGNQMSSDIDEYKKNIHGNALRTSGSSSSDVTKASLSPDASDFEHITAETPSRPLSSTSNPFKSSKCSTAGSSPNSVSELSLASLTEKIQKMEENHHSTAEELQATLQELSDQQQMVQELTAENEKLVDEKTILETSFHQHRERAEQLSQENEKLMNLLQERVKNEEPTTQEGKIIELEQKCTGILEQGRFEREKLLNIQQQLTCSLRKVEEENQGALEMIKRLKEENEKLNEFLELERHNNNMMAKTLEECRVTLEGLKMENGSLKSHLQGEKQKATEASAVEQTAESCEVQEMLKVARAEKDLLELSCNELRQELLKANGEIKHVSSLLAKVEKDYSYLKEICDHQAEQLSRTSLKLQEKASESDAEIKDMKETIFELEDQVEQHRAVKLHNNQLISELESSVIKLEEQKSDLERQLKTLTKQMKEETEEWRRFQADLQTAVVVANDIKCEAQQELRTVKRKLLEEEEKNARLQKELGDVQGHGRVVTSRAAPPPVDEEPESSEVDAAGRWPGVCVSRTSPTPPESATTVKSLIKSFDLGRPGGAGQNISVHKTPRSPLSGIPVRTAPAAAVSPMQRHSTYSSVRPASRGVTQRLDLPDLPLSDILKGRTETLKPDPHLRKSPSLESLSRPPSLGFGDTRLLSASTRAWKPQSKLSVERKDPLAALAREYGGSKRNALLKWCQKKTQGYANIDITNFSSSWSDGLAFCALLHTYLPAHIPYQELNSQEKKRNLLLAFEAAESVGIKPSLELSEMLYTDRPDWQSVMQYVAQIYKYFET

SEQ ID NO: 82999 - protein, 703 aa, Homo sapiens
  Payload ID: 16524
  Gene Symbol: SPECC1
  Gene Name: sperm antigen with calponin homology and coiled-coil domains 1
  Uniprot ID: Q5M775
  ENSP ID: ENSP00000378893
MGNHSGRPEDPEPGAFTTTKRTGIPAPREFSVTVSRERSVPRGPSNPRKSVSSPTSSNTPTPTKHLRTPSTKPKQENEGGEKAALESQVRELLAEAKAKDSEINRLRSELKKYKEKRTLNAEGTDALGPNVDGTSVSPGDTEPMIRALEEKNKNFQKELSDLEEENRVLKEKLIYLEHSPNSEGAASHTGDSSCPTSITQESSFGSPTGNQMSSDIDEYKKNIHGNALRTSGSSSSDVTKASLSPDASDFEHITAETPSRPLSSTSNPFKSSKCSTAGSSPNSVSELSLASLTEKIQKMEENHHSTAEELQATLQELSDQQQMVQELTAENEKLVDEKTILETSFHQHRERAEQLSQENEKLMNLLQERVKNEEPTTQEGKIIELEQKCTGILEQGRFEREKLLNIQQQLTCSLRKVEEENQGALEMIKRLKEENEKLNEFLELERHNNNMMAKTLEECRVTLEGLKMENGSLKSHLQGEKQKATEASAVEQTAESCEVQEMLKVARAEKDLLELSCNELRQELLKANGEIKHVSSLLAKVEKDYSYLKEICDHQAEQLSRTSLKLQEKASESDAEIKDMKETIFELEDQVEQHRAVKLHNNQLISELESSVIKLEEQKSDLERQLKTLTKQMKEETEEWRRFQADLQTAVVVANDIKCEAQQELRTVKRKLLEEEEKNARLQKELGDVQGHGRVVTSRAAPP

SEQ ID NO: 83000 - protein, 709 aa, Homo sapiens
  Payload ID: 16524
  Gene Symbol: SPECC1
  Gene Name: sperm antigen with calponin homology and coiled-coil domains 1
  Uniprot ID: Q5M775
  ENSP ID: ENSP00000378896
MGNHSGRPEDPEPGAFTTTKRTGIPAPREFSVTVSRERSVPRGPSNPRKSVSSPTSSNTPTPTKHLRTPSTKPKQENEGGEKAALESQVRELLAEAKAKDSEINRLRSELKKYKEKRTLNAEGTDALGPNVDGTSVSPGDTEPMIRALEEKNKNFQKELSDLEEENRVLKEKLIYLEHSPNSEGAASHTGDSSCPTSITQESSFGSPTGNQMSSDIDEYKKNIHGNALRTSGSSSSDVTKASLSPDASDFEHITAETPSRPLSSTSNPFKSSKCSTAGSSPNSVSELSLASLTEKIQKMEENHHSTAEELQATLQELSDQQQMVQELTAENEKLVDEKTILETSFHQHRERAEQLSQENEKLMNLLQERVKNEEPTTQEGKIIELEQKCTGILEQGRFEREKLLNIQQQLTCSLRKVEEENQGALEMIKRLKEENEKLNEFLELERHNNNMMAKTLEECRVTLEGLKMENGSLKSHLQGEKQKATEASAVEQTAESCEVQEMLKVARAEKDLLELSCNELRQELLKANGEIKHVSSLLAKVEKDYSYLKEICDHQAEQLSRTSLKLQEKASESDAEIKDMKETIFELEDQVEQHRAVKLHNNQLISELESSVIKLEEQKSDLERQLKTLTKQMKEETEEWRRFQADLQTAVVVANDIKCEAQQELRTVKRKLLEEEEKNARLQKELGDVQGHGRVVTSRAAPPSLGSVS

SEQ ID NO: 83001 - protein, 1068 aa, Homo sapiens; identical to SEQ ID NO: 82998
  Payload ID: 16524
  Gene Symbol: SPECC1
  Gene Name: sperm antigen with calponin homology and coiled-coil domains 1
  Uniprot ID: Q5M775
  ENSP ID: ENSP00000378898

SEQ ID NO: 83002 - protein, 790 aa, Homo sapiens
  Payload ID: 16524
  Gene Symbol: SPECC1
  Gene Name: sperm antigen with calponin homology and coiled-coil domains 1
  Uniprot ID: Q5M775
  ENSP ID: ENSP00000378900
MRSAAKPWNPAIRAGGHGPDRVRPLPAASSGMKSSKSSTSLAFESRLSRLKRASSEDTLNKPGSTAASGVVRLKKTATAGAISELTESRLRSGTGAFTTTKRTGIPAPREFSVTVSRERSVPRGPSNPRKSVSSPTSSNTPTPTKHLRTPSTKPKQENEGGEKAALESQVRELLAEAKAKDSEINRLRSELKKYKEKRTLNAEGTDALGPNVDGTSVSPGDTEPMIRALEEKNKNFQKELSDLEEENRVLKEKLIYLEHSPNSEGAASHTGDSSCPTSITQESSFGSPTGNQMSSDIDEYKKNIHGNALRTSGSSSSDVTKASLSPDASDFEHITAETPSRPLSSTSNPFKSSKCSTAGSSPNSVSELSLASLTEKIQKMEENHHSTAEELQATLQELSDQQQMVQELTAENEKLVDEKTILETSFHQHRERAEQLSQENEKLMNLLQERVKNEEPTTQEGKIIELEQKCTGILEQGRFEREKLLNIQQQLTCSLRKVEEENQGALEMIKRLKEENEKLNEFLELERHNNNMMAKTLEECRVTLEGLKMENGSLKSHLQGEKQKATEASAVEQTAESCEVQEMLKVARAEKDLLELSCNELRQELLKANGEIKHVSSLLAKVEKDYSYLKEICDHQAEQLSRTSLKLQEKASESDAEIKDMKETIFELEDQVEQHRAVKLHNNQLISELESSVIKLEEQKSDLERQLKTLTKQMKEETEEWRRFQADLQTAVVVANDIKCEAQQELRTVKRKLLEEEEKNARLQKELGDVQGHGRVVTSRAAPPSLGSVS

SEQ ID NO: 83003 - protein, 987 aa, Homo sapiens
  Payload ID: 16524
  Gene Symbol: SPECC1
  Gene Name: sperm antigen with calponin homology and coiled-coil domains 1
  Uniprot ID: Q5M775
  ENSP ID: ENSP00000378901
MGNHSGRPEDPEPGAFTTTKRTGIPAPREFSVTVSRERSVPRGPSNPRKSVSSPTSSNTPTPTKHLRTPSTKPKQENEGGEKAALESQVRELLAEAKAKDSEINRLRSELKKYKEKRTLNAEGTDALGPNVDGTSVSPGDTEPMIRALEEKNKNFQKELSDLEEENRVLKEKLIYLEHSPNSEGAASHTGDSSCPTSITQESSFGSPTGNQMSSDIDEYKKNIHGNALRTSGSSSSDVTKASLSPDASDFEHITAETPSRPLSSTSNPFKSSKCSTAGSSPNSVSELSLASLTEKIQKMEENHHSTAEELQATLQELSDQQQMVQELTAENEKLVDEKTILETSFHQHRERAEQLSQENEKLMNLLQERVKNEEPTTQEGKIIELEQKCTGILEQGRFEREKLLNIQQQLTCSLRKVEEENQGALEMIKRLKEENEKLNEFLELERHNNNMMAKTLEECRVTLEGLKMENGSLKSHLQGEKQKATEASAVEQTAESCEVQEMLKVARAEKDLLELSCNELRQELLKANGEIKHVSSLLAKVEKDYSYLKEICDHQAEQLSRTSLKLQEKASESDAEIKDMKETIFELEDQVEQHRAVKLHNNQLISELESSVIKLEEQKSDLERQLKTLTKQMKEETEEWRRFQADLQTAVVVANDIKCEAQQELRTVKRKLLEEEEKNARLQKELGDVQGHGRVVTSRAAPPPVDEEPESSEVDAAGRWPGVCVSRTSPTPPESATTVKSLIKSFDLGRPGGAGQNISVHKTPRSPLSGIPVRTAPAAAVSPMQRHSTYSSVRPASRGVTQRLDLPDLPLSDILKGRTETLKPDPHLRKSPSLESLSRPPSLGFGDTRLLSASTRAWKPQSKLSVERKDPLAALAREYGGSKRNALLKWCQKKTQGYANIDITNFSSSWSDGLAFCALLHTYLPAHIPYQELNSQEKKRNLLLAFEAAESVGIKPSLELSEMLYTDRPDWQSVMQYVAQIYKYFET

SEQ ID NO: 83004 - protein, 78 aa, Homo sapiens
  Payload ID: 16524
  Gene Symbol: SPECC1
  Gene Name: sperm antigen with calponin homology and coiled-coil domains 1
  ENSP ID: ENSP00000461918
MRSAAKPWNPAIRAGGHGPDRVRPLPAASSGMKSSKSSTSLAFESRLSRLKRASSEDTLNKPGSTAASGVVRLKKTAT

SEQ ID NO: 83005 - protein, 73 aa, Homo sapiens
  Payload ID: 16524
  Gene Symbol: SPECC1
  Gene Name: sperm antigen with calponin homology and coiled-coil domains 1
  ENSP ID: ENSP00000461944
MRSAAKPWNPAIRAGGHGPDRVRPLPAASSGMKSSKSSTSLAFESRLSRLKRASSEDTLNKPGSTAASGVVRL

SEQ ID NO: 83006 - protein, 167 aa, Homo sapiens
  Payload ID: 16524
  Gene Symbol: SPECC1
  Gene Name: sperm antigen with calponin homology and coiled-coil domains 1
  ENSP ID: ENSP00000462092
  MOD_RES (1)..(1): Any amino acid
XATEASAVEQTAESCEVQEMLKVARAEKDLLELSCNELRQELLKANGEIKHVSSLLAKVEKDYSYLKEICDHQAEQLSRTSLKLQEKASESDAEIKDMKETIFELEDQVEQHRAVKLHNNQLISELESSVIKLEEQKSDLERQLKTLTKQMKKDSPALAMIGSRSHL

SEQ ID NO: 83007 - protein, 19 aa, Homo sapiens
  Payload ID: 16524
  Gene Symbol: SPECC1
  Gene Name: sperm antigen with calponin homology and coiled-coil domains 1
  ENSP ID: ENSP00000462266
MRSAAKPWNPAIRAGGHGP

SEQ ID NO: 83008 - protein, 534 aa, Homo sapiens
  Payload ID: 16524
  Gene Symbol: SPECC1
  Gene Name: sperm antigen with calponin homology and coiled-coil domains 1
  ENSP ID: ENSP00000462471
  MOD_RES (1)..(1): Any amino acid
XKVEEENQGALEMIKRLKEENEKLNEFLELERHNNNMMAKTLEECRVTLEGLKMENGSLKSHLQGEKQKATEASAVEQTAESCEVQEMLKVARAEKDLLELSCNELRQELLKANGEIKHVSSLLAKVEKDYSYLKEICDHQAEQLSRTSLKLQEKASESDAEIKDMKETIFELEDQVEQHRAVKLHNNQLISELESSVIKLEEQKSDLERQLKTLTKQMKEETEEWRRFQADLQTAVVVANDIKCEAQQELRTVKRKLLEEEEKNARLQKELGDVQGHGRVVTSRAAPPPVDEEPESSEVDAAGRWPGVCVSRTSPTPPESATTVKSLIKSFDLGRPGGAGQNISVHKTPRSPLSGIPVRTAPAAAVSPMQRHSTYSSVRPASRGVTQRLDLPDLPLSDILKGRTETLKPDPHLRKSPSLESLSRPPSLGFGDTRLLSASTRAWKPQSKLSVERKDPLAALAREYGGSKRNALLKWCQKKTQGYAKRNLLLAFEAAESVGIKPSLELSEMLYTDRPDWQSVMQYVAQIYKYFET

SEQ ID NO: 83009 - protein, 46 aa, Homo sapiens
  Payload ID: 16524
  Gene Symbol: SPECC1
  Gene Name: sperm antigen with calponin homology and coiled-coil domains 1
  ENSP ID: ENSP00000462987
  MOD_RES (1)..(1): Any amino acid
XPAHIPYQELNSQEKKRNLLLAFEAAESVGIKPSLVRILFCILVIL

SEQ ID NO: 83010 - protein, 101 aa, Homo sapiens
  Payload ID: 16524
  Gene Symbol: SPECC1
  Gene Name: sperm antigen with calponin homology and coiled-coil domains 1
  ENSP ID: ENSP00000463006
MRSAAKPWNPAIRAGGHGPDRVRPLPAASSGMKSSKSSTSLAFESRLSRLKRASSEDTLNKPGSTAASGVVRLKKTATAGAISELTESRLRSGTGAFTTTK

SEQ ID NO: 83011 - protein, 25 aa, Homo sapiens
  Payload ID: 16524
  Gene Symbol: SPECC1
  Gene Name: sperm antigen with calponin homology and coiled-coil domains 1
  ENSP ID: ENSP00000463130
MGNHSGRPEDPEPGGKGLFIPEGDM

SEQ ID NO: 83012 - protein, 202 aa, Homo sapiens
  Payload ID: 16524
  Gene Symbol: SPECC1
  Gene Name: sperm antigen with calponin homology and coiled-coil domains 1
  ENSP ID: ENSP00000463799
MLKVARAEKDLLELSCNELRQELLKANGEIKHVSSLLAKVEKDYSYLKEICDHQAEQLSRTSLKLQEKASESDAEIKDMKETIFELEDQVEQHRAVKLHNNQLISELESSVIKLEEQKSDLERQLKTLTKQMKEETEEWRRFQADLQTAVVVANDIKCEAQQELRTVKRKLLEEEEKNARLQKELGDVQGHGRVVTSRAAPP

SEQ ID NO: 83013 - protein, 102 aa, Homo sapiens
  Payload ID: 16524
  Gene Symbol: SPECC1
  Gene Name: sperm antigen with calponin homology and coiled-coil domains 1
  ENSP ID: ENSP00000464341
MRSAAKPWNPAIRAGGHGPDRVRPLPAASSGMKSSKSSTSLAFESRLSRLKRASSEDTLNKPGSTAASGVVRLKKTATAGAISELTESRLRSGTGAFTTTKR

SEQ ID NO: 83014 - protein, 132 aa, Homo sapiens
  Payload ID: 16524
  Gene Symbol: SPECC1
  Gene Name: sperm antigen with calponin homology and coiled-coil domains 1
  ENSP ID: ENSP00000464489
MRSAAKPWNPAIRAGGHGPDRVRPLPAASSGMKSSKSSTSLAFESRLSRLKRASSEDTLNKPGSTAASGVVRLKKTATAGAISELTESRLRSGTGAFTTTKRTGIPAPREFSVTVSRERSVPRGPSNPRKSV

SEQ ID NO: 83015 - protein, 21 aa, Homo sapiens
  Payload ID: 16524
  Gene Symbol: SPECC1
  Gene Name: sperm antigen with calponin homology and coiled-coil domains 1
  ENSP ID: ENSP00000464639
MRSAAKPWNPAIRAGGHGPDR

SEQ ID NO: 83016 - protein, 1117 aa, Homo sapiens
  Payload ID: 16525
  Gene Symbol: SPECC1L
  Gene Name: sperm antigen with calponin homology and coiled-coil domains 1-like
  Uniprot ID: Q69YQ0
  ENSP ID: ENSP00000325785
MKKASRSVGSVPKVSAISKTQTAEKIKPENSSSASTGGKLVKPGTAASLSKTKSSDDLLAGMAGGVTVTNGVKGKKSTCPSAAPSASAPAMTTVENKSKISTGTASSTKRSTSTGNKESSSTRERLRERTRLNQSKKLPSAGQGANDMALAKRSRSRTATECDVRMSKSKSDNQISDRAALEAKVKDLLTLAKTKDVEILHLRNELRDMRAQLGINEDHSEGDEKSEKETIMAHQPTDVESTLLQLQEQNTAIREELNQLKNENRMLKDRLNALGFSLEQRLDNSEKLFGYQSLSPEITPGNQSDGGGTLTSSVEGSAPGSVEDLLSQDENTLMDHQHSNSMDNLDSECSEVYQPLTSSDDALDAPSSSESEGIPSIERSRKGSSGNASEVSVACLTERIHQMEENQHSTSEELQATLQELADLQQITQELNSENERLGEEKVILMESLCQQSDKLEHFSRQIEYFRSLLDEHHISYVIDEDVKSGRYMELEQRYMDLAENARFEREQLLGVQQHLSNTLKMAEQDNKEAQEMIGALKERSHHMERIIESEQKGKAALAATLEEYKATVASDQIEMNRLKAQLENEKQKVAELYSIHNSGDKSDIQDLLESVRLDKEKAETLASSLQEDLAHTRNDANRLQDAIAKVEDEYRAFQEEAKKQIEDLNMTLEKLRSDLDEKETERSDMKETIFELEDEVEQHRAVKLHDNLIISDLENTVKKLQDQKHDMEREIKTLHRRLREESAEWRQFQADLQTAVVIANDIKSEAQEEIGDLKRRLHEAQEKNEKLTKELEEIKSRKQEEERGRVYNYMNAVERDLAALRQGMGLSRRSSTSSEPTPTVKTLIKSFDSASQVPNPAAAAIPRTPLSPSPMKTPPAAAVSPMQRHSISGPISTSKPLTALSDKRPNYGEIPVQEHLLRTSSASRPASLPRVPAMESAKTLSVSRRSSEEVKRDISAQEGASPASLMAMGTTSPQLSLSSSPTASVTPTTRSRIREERKDPLSALAREYGGSKRNALLKWCQKKTEGYQNIDITNFSSSWNDGLAFCALLHTYLPAHIPYQELNSQDKRRNFMLAFQAAESVGIKSTLDINEMVRTERPDWQNVMLYVTAIYKYFET

SEQ ID NO: 83017 - protein, 1117 aa, Homo sapiens; identical to SEQ ID NO: 83016
  Payload ID: 16525
  Gene Symbol: SPECC1L
  Gene Name: sperm antigen with calponin homology and coiled-coil domains 1-like
  Uniprot ID: Q69YQ0
  ENSP ID: ENSP00000393363

SEQ ID NO: 83018 - protein, 788 aa, Homo sapiens
  Payload ID: 16525
  Gene Symbol: SPECC1L
  Gene Name: sperm antigen with calponin homology and coiled-coil domains 1-like
  ENSP ID: ENSP00000405671
MKKASRSVGSVPKVSAISKTQTAEKIKPENSSSASTGGKLVKPGTAASLSKTKSSDDLLAGMAGGVTVTNGVKGKKSTCPSAAPSASAPAMTTVENKSKISTGTASSTKRSTSTGNKESSSTRERLRERTRLNQSKKLPSAGQGANDMALAKRSRSRTATECDVRMSKSKSDNQISDRAALEAKVKDLLTLAKTKDVEILHLRNELRDMRAQLGINEDHSEGDEKSEKETIMAHQPTDVESTLLQLQEQNTAIREELNQLKNENRMLKDRLNALGFSLEQRLDNSEKLFGYQSLSPEITPGNQSDGGGTLTSSVEGSAPGSVEDLLSQDENTLMDHQHSNSMDNLDSECSEVYQPLTSSDDALDAPSSSESEGIPSIERSRKGSSGNASEVSVACLTERIHQMEENQHSTSEELQATLQELADLQQITQELNSENERLGEEKVILMESLCQQSDKLEHFSRQIEYFRSLLDEHHISYVIDEDVKSGRYMELEQRYMDLAENARFEREQLLGVQQHLSNTLKMAEQDNKEAQEMIGALKERSHHMERIIESEQKGKAALAATLEEYKATVASDQIEMNRLKAQLENEKQKVAELYSIHNSGDKSDIQDLLESVRLDKEKAETLASSLQEDLAHTRNDANRLQDAIAKVEDEYRAFQEEAKKQIEDLNMTLEKLRSDLDEKETERSDMKETIFELEDEVEQHRAVKLHDNLIISDLENTVKKLQDQKHDMEREIKTLHRRLREESAEWRQFQADLQTAVVIANDIKSEAQEEIGDLKRRLHEAQEKNEKL

SEQ ID NO: 83019 - protein, 175 aa, Homo sapiens
  Payload ID: 16525
  Gene Symbol: SPECC1L
  Gene Name: sperm antigen with calponin homology and coiled-coil domains 1-like
  ENSP ID: ENSP00000414354
MAGGVTVTNGVKGKKSTCPSAAPSASAPAMTTVENKSKISTGTASSTKRSTSTGNKESSSTRERLRERTRLNQSKKLPSAGQGANDMALAKRSRSRTATECDVRMSKSKSDNQISDRAALEAKVKDLLTLAKTKDVEILHLRNELRDMRAQLGINEDHSEGDEKSEKETIMAHQP

SEQ ID NO: 83020 - protein, 1078 aa, Homo sapiens
  Payload ID: 16525
  Gene Symbol: SPECC1L
  Gene Name: sperm antigen with calponin homology and coiled-coil domains 1-like
  Uniprot ID: Q69YQ0
  ENSP ID: ENSP00000439633
MKKASRSVGSVPKVSAISKTQTAEKIKPENSSSASTGGKLVKPGTAASLSKTKSSDDLLAGMAGGVTVTNGVKGKKSTCPSAAPSASAPAMTTVENKSKISTGTASSTKRSTSTGNKESSSTRERLRERTRLNQSKKLPSAGQGANDMALAKRSRSRTATECDVRMSKSKSDNQISDRAALEAKVKDLLTLAKTKDVEILHLRNELRDMRAQLGINEDHSEGDEKSEKETIMAHQPTDVESTLLQLQEQNTAIREELNQLKNENRMLKDRLNALGFSLEQRLDNSEKLFGYQSLSPEITPGNQSDGGGTLTSSVEGSAPGSVEDLLSQDENTLMDHQHSNSMDNLDSECSEVYQPLTSSDDALDAPSSSESEGIPSIERSRKGSSGNASEVSVACLTERIHQMEENQHSTSEELQATLQELADLQQITQELNSENERLGEEKVILMESLCQQSDKLEHFSRQIEYFRSLLDEHHISYVIDEDVKSGRYMELEQRYMDLAENARFEREQLLGVQQHLSNTLKMAEQDNKEAQEMIGALKERSHHMERIIESEQKGKAALAATLEEYKATVASDQIEMNRLKAQLENEKQKVAELYSIHNSGDKSDIQDLLESVRLDKEKAETLASSLQEDLAHTRNDANRLQDAIAKVEDEYRAFQEEAKKQIEDLNMTLEKLRSDLDEKETERSDMKETIFELEDEVEQHRAVKLHDNLIISDLENTVKKLQDQKHDMEREIKTLHRRLREESAEWRQFQADLQTAVVIANDIKSEAQEEIGDLKRRLHEAQEKNEKLTKELEEIKSRKQEEERGRVYNYMNAVERDLAALRQGMGLSRRSSTSSEPTPTVKTLIKSFDSASQVPNPAAAAIPRTPLSPSPMKTPPAAAVSPMQRHSISGPISTSKPLTALSDKRPNYGEIPVQEHLLRTSSASRPASLPRVPAMESAKTLSVSRRSSEEVKRDISAQEGASPASLMAMGTTSPQLSLSSSPTASVTPTTRSRIREERKDPLSALAREYGGSKRNALLKWCQKKTEGYQRRNFMLAFQAAESVGIKSTLDINEMVRTERPDWQNVMLYVTAIYKYFET

SEQ ID NO: 83021 - protein, 926 aa, Homo sapiens
  Payload ID: 16526
  Gene Symbol: SPAG1
  Gene Name: sperm associated antigen 1
  Uniprot ID: Q07617
  ENSP ID: ENSP00000251809
MTTKDYPSLWGFGTTKTFKIPIEHLDFKYIEKCSDVKHLEKILCVLRSGEEGYYPELTEFCEKHLQALAPESRALRKDKPAATAASFTAEEWEKIDGDIKSWVSEIKKEEDKMHFHETETFPAMKDNLPPVRGSNSCLHVGKEKYSKRPTKKKTPRDYAEWDKFDVEKECLKIDEDYKEKTVIDKSHLSKIETRIDTAGLTEKEKDFLATREKEKGNEAFNSGDYEEAVMYYTRSISALPTVVAYNNRAQAEIKLQNWNSAFQDCEKVLELEPGNVKALLRRATTYKHQNKLREATEDLSKVLDVEPDNDLAKKTLSEVERDLKNSEAASETQTKGKRMVIQEIENSEDEEGKSGRKHEDGGGDKKPAEPAGAARAAQPCVMGNIQKKLTGKAEGGKRPARGAPQRGQTPEAGADKRSPRRASAAAAAGGGATGHPGGGQGAENPAGLKSQGNELFRSGQFAEAAGKYSAAIALLEPAGSEIADDLSILYSNRAACYLKEGNCSGCIQDCNRALELHPFSMKPLLRRAMAYETLEQYGKAYVDYKTVLQIDCGLQLANDSVNRLSRILMELDGPNWREKLSPIPAVPASVPLQAWHPAKEMISKQAGDSSSHRQQGITDEKTFKALKEEGNQCVNDKNYKDALSKYSECLKINNKECAIYTNRALCYLKLCQFEEAKQDCDQALQLADGNVKAFYRRALAHKGLKNYQKSLIDLNKVILLDPSIIEAKMELEEVTRLLNLKDKTAPFNKEKERRKIEIQEVNEGKEEPGRPAGEVSMGCLASEKGGKSSRSPEDPEKLPIAKPNNAYEFGQIINALSTRKDKEACAHLLAITAPKDLPMFLSNKLEGDTFLLLIQSLKNNLIEKDPSLVYQHLLYLSKAERFKMMLTLISKGQKELIEQLFEDLSDTPNNHFTLEDIQALKRQYEL

SEQ ID NO: 83022 - protein, 926 aa, Homo sapiens; identical to SEQ ID NO: 83021
  Payload ID: 16526
  Gene Symbol: SPAG1
  Gene Name: sperm associated antigen 1
  Uniprot ID: Q07617
  ENSP ID: ENSP00000373450

SEQ ID NO: 83023 - protein, 416 aa, Homo sapiens
  Payload ID: 16526
  Gene Symbol: SPAG1
  Gene Name: sperm associated antigen 1
  Uniprot ID: Q07617
  ENSP ID: ENSP00000427716
MTTKDYPSLWGFGTTKTFKIPIEHLDFKYIEKCSDVKHLEKILCVLRSGEEGYYPELTEFCEKHLQALAPESRALRKDKPAATAASFTAEEWEKIDGDIKSWVSEIKKEEDKMHFHETETFPAMKDNLPPVRGSNSCLHVGKEKYSKRPTKKKTPRDYAEWDKFDVEKECLKIDEDYKEKTVIDKSHLSKIETRIDTAGLTEKEKDFLATREKEKGNEAFNSGDYEEAVMYYTRSISALPTVVAYNNRAQAEIKLQNWNSAFQDCEKVLELEPGNVKALLRRATTYKHQNKLREATEDLSKVLDVEPDNDLAKKTLSEVERDLKNSEAASETQTKGKRMVIQEIENSEDEEGKSGRKHEDGGGDKSKIFFLFRLCKKLPFNMMSWLNFSIRTEIRNLSVFLALPCKFTSQFRSSFS

SEQ ID NO: 83024 - protein, 416 aa, Homo sapiens; identical to SEQ ID NO: 83023
  Payload ID: 16526
  Gene Symbol: SPAG1
  Gene Name: sperm associated antigen 1
  Uniprot ID: Q07617
  ENSP ID: ENSP00000428070

SEQ ID NO: 83025 - protein, 82 aa, Homo sapiens
  Payload ID: 16527
  Gene Symbol: SPAG11A
  Gene Name: sperm associated antigen 11A
  Uniprot ID: Q6PDA7
  ENSP ID: ENSP00000297496
MRQRLLPSVTSLLLVALLFPGSSQARHVNHSATEALGELRERAPGQGTNGFQLLRHAVKRDLLPPRTPPYQGTGQQHRQRCG

SEQ ID NO: 83026 - protein, 108 aa, Homo sapiens
  Payload ID: 16527
  Gene Symbol: SPAG11A
  Gene Name: sperm associated antigen 11A
  ENSP ID: ENSP00000316012
MRQRLLPSVTSLLLVALLFPGSSQARHVNHSATEALGELRERAPGQGTNGFQLLRHAVKRDLLPPRTPPYQGDVPLGIRNTICRMQQGICRLFFCHSGTGQQHRQRCG

SEQ ID NO: 83027 - protein, 80 aa, Homo sapiens
  Payload ID: 16527
  Gene Symbol: SPAG11A
  Gene Name: sperm associated antigen 11A
  ENSP ID: ENSP00000316648
MKVFFLFAVLFCLVQTNSGDVPLGIRNTICRMQQGICRLFFCHSGEKKRDISSDPWNRCCVSNTDEEGKEKPEMDGRSGI

SEQ ID NO: 83028 - protein, 113 aa, Homo sapiens
  Payload ID: 16527
  Gene Symbol: SPAG11A
  Gene Name: sperm associated antigen 11A
  ENSP ID: ENSP00000382990
MRQRLLPSVTSLLLVALLFPGSSQARHVNHSATEALGELRERAPGQGTNGFQLLRHAVKRDLLPPRTPPYQEPASDLKVVDCRRSEGFCQEYCNYMETQVGYCSKKKDACCLH

SEQ ID NO: 83029 - protein, 50 aa, Homo sapiens
  Payload ID: 16527
  Gene Symbol: SPAG11A
  Gene Name: sperm associated antigen 11A
  ENSP ID: ENSP00000394885
MKVFFLFAVLFCLVQTNSVHISHQEARGPSFKICVGFLGPRWARGCSTGN

SEQ ID NO: 83030 - protein, 103 aa, Homo sapiens
  Payload ID: 16527
  Gene Symbol: SPAG11A
  Gene Name: sperm associated antigen 11A
  ENSP ID: ENSP00000416991
MRQRLLPSVTSLLLVALLFPGSSQARHVNHSATEALGELRERAPGQGTNGFQLLRHAVKRDLLPPRTPPYQVHISHQEARGPSFKICVGFLGPRWARGCSTGN

SEQ ID NO: 83031 - protein, 53 aa, Homo sapiens
  Payload ID: 16527
  Gene Symbol: SPAG11A
  Gene Name: sperm associated antigen 11A
  ENSP ID: ENSP00000434968
SSQARHVNHSATEALGELRERAPGQGTNGFQLLRHAVKRDLLPPRTPPYQEMK

SEQ ID NO: 83032 - protein, 106 aa, Homo sapiens
  Payload ID: 16527
  Gene Symbol: SPAG11A
  Gene Name: sperm associated antigen 11A
  ENSP ID: ENSP00000436043
  MOD_RES (1)..(1): Any amino acid
XFPGSSQARHVNHSATEALGELRERAPGQGTNGFQLLRHAVKRDLLPPRTPPYQGTHSVAQAGVQWHCYRLLQPLPPGLKCSSHLSLPNTWDHRHAPLHTASFFRC

SEQ ID NO: 83033 - protein, 103 aa, Homo sapiens
  Payload ID: 16528
  Gene Symbol: SPAG11B
  Gene Name: sperm associated antigen 11B
  Uniprot ID: Q08648
  ENSP ID: ENSP00000297498
MRQRLLPSVTSLLLVALLFPGSSQARHVNHSATEALGELRERAPGQGTNGFQLLRHAVKRDLLPPRTPPYQVHISHREARGPSFRICVDFLGPRWARGCSTGN

SEQ ID NO: 83034 - protein, 113 aa, Homo sapiens; identical to SEQ ID NO: 83028
  Payload ID: 16528
  Gene Symbol: SPAG11B
  Gene Name: sperm associated antigen 11B
  Uniprot ID: Q08648
  ENSP ID: ENSP00000322591

SEQ ID NO: 83035 - protein, 108 aa, Homo sapiens
  Payload ID: 16528
  Gene Symbol: SPAG11B
  Gene Name: sperm associated antigen 11B
  ENSP ID: ENSP00000352797
MRQRLLPSVTSLLLVALLFPGSSQARHVNHSATEALGELRERAPGQGTNGFQLLRHAVKRDLLPPRTPPYQGDVPPGIRNTICHMQQGICRLFFCHSGTGQQHRQRCG

SEQ ID NO: 83036 - protein, 82 aa, Homo sapiens; identical to SEQ ID NO: 83025
  Payload ID: 16528
  Gene Symbol: SPAG11B
  Gene Name: sperm associated antigen 11B
  ENSP ID: ENSP00000354411

SEQ ID NO: 83037 - protein, 133 aa, Homo sapiens
  Payload ID: 16528
  Gene Symbol: SPAG11B
  Gene Name: sperm associated antigen 11B
  ENSP ID: ENSP00000381480
MRQRLLPSVTSLLLVALLFPGSSQARHVNHSATEALGELRERAPGQGTNGFQLLRHAVKRDLLPPRTPPYQGDVPPGIRNTICHMQQGICRLFFCHSGEKKRDICSDPWNRCCVSNTDEEGKEKPEMDGRSGI

SEQ ID NO: 83038 - protein, 80 aa, Homo sapiens
  Payload ID: 16528
  Gene Symbol: SPAG11B
  Gene Name: sperm associated antigen 11B
  Uniprot ID: Q08648
  ENSP ID: ENSP00000398550
MKVFFLFAVLFCLVQTNSGDVPPGIRNTICHMQQGICRLFFCHSGEKKRDICSDPWNRCCVSNTDEEGKEKPEMDGRSGI

SEQ ID NO: 83039 - protein, 50 aa, Homo sapiens
  Payload ID: 16528
  Gene Symbol: SPAG11B
  Gene Name: sperm associated antigen 11B
  Uniprot ID: Q08648
  ENSP ID: ENSP00000431230
MKVFFLFAVLFCLVQTNSVHISHREARGPSFRICVDFLGPRWARGCSTGN

SEQ ID NO: 83040 - protein, 53 aa, Homo sapiens; identical to SEQ ID NO: 83031
  Payload ID: 16528
  Gene Symbol: SPAG11B
  Gene Name: sperm associated antigen 11B
  ENSP ID: ENSP00000432257

SEQ ID NO: 83041 - protein, 106 aa, Homo sapiens
  Payload ID: 16528
  Gene Symbol: SPAG11B
  Gene Name: sperm associated antigen 11B
  ENSP ID: ENSP00000437154
LFPGSSQARHVNHSATEALGELRERAPGQGTNGFQLLRHAVKRDLLPPRTPPYQGTHSVAQAGVQWHCYRLLQPLPPGLKCSSHLSLPNTWDHRHAPLHTASFFRC

SEQ ID NO: 83042 - protein, 113 aa, Homo sapiens
  Payload ID: 16528
  Gene Symbol: SPAG11B
  Gene Name: sperm associated antigen 11B
  ENSP ID: ENSP00000477700
MRQRLLPSVTSLLLVALLFPGSSQARHVNHSATEALGELRERAPGQGTNGFQLLRHAVKRDLLQPRTPPYQEPASDLKVVDCRRSEGFCQEYCNYMETQVGYCSKKKDACCLH

SEQ ID NO: 83043 - protein, 133 aa, Homo sapiens
  Payload ID: 16528
  Gene Symbol: SPAG11B
  Gene Name: sperm associated antigen 11B
  ENSP ID: ENSP00000480728
MRQRLLPSVTSLLLVALLFPGSSQARHVNHSATEALGELRERAPGQGTNGFQLLRHAVKRDLLQPRTPPYQGDVPPGIRNTICHMQQGICRLFFCHSGEKKRDICSDPWNRCCVSNTDEEGKEKPEMDGRSGI

SEQ ID NO: 83044 - protein, 103 aa, Homo sapiens
  Payload ID: 16528
  Gene Symbol: SPAG11B
  Gene Name: sperm associated antigen 11B
  ENSP ID: ENSP00000481016
MRQRLLPSVTSLLLVALLFPGSSQARHVNHSATEALGELRERAPGQGTNGFQLLRHAVKRDLLQPRTPPYQVHISHREARGPSFRICVDFLGPRWARGCSTGN

SEQ ID NO: 83045 - protein, 50 aa, Homo sapiens; identical to SEQ ID NO: 83039
  Payload ID: 16528
  Gene Symbol: SPAG11B
  Gene Name: sperm associated antigen 11B
  Uniprot ID: Q08648
  ENSP ID: ENSP00000481630

SEQ ID NO: 83046 - protein, 108 aa, Homo sapiens
  Payload ID: 16528
  Gene Symbol: SPAG11B
  Gene Name: sperm associated antigen 11B
  ENSP ID: ENSP00000482321
MRQRLLPSVTSLLLVALLFPGSSQARHVNHSATEALGELRERAPGQGTNGFQLLRHAVKRDLLQPRTPPYQGDVPPGIRNTICHMQQGICRLFFCHSGTGQQHRQRCG

SEQ ID NO: 83047 - protein, 80 aa, Homo sapiens; identical to SEQ ID NO: 83038
  Payload ID: 16528
  Gene Symbol: SPAG11B
  Gene Name: sperm associated antigen 11B
  Uniprot ID: Q08648
  ENSP ID: ENSP00000483205

SEQ ID NO: 83048 - protein, 82 aa, Homo sapiens
  Payload ID: 16528
  Gene Symbol: SPAG11B
  Gene Name: sperm associated antigen 11B
  ENSP ID: ENSP00000483423
MRQRLLPSVTSLLLVALLFPGSSQARHVNHSATEALGELRERAPGQGTNGFQLLRHAVKRDLLQPRTPPYQGTGQQHRQRCG

SEQ ID NO: 83049 - protein, 53 aa, Homo sapiens
  Payload ID: 16528
  Gene Symbol: SPAG11B
  Gene Name: sperm associated antigen 11B
  ENSP ID: ENSP00000486300
SSQARHVNHSATEALGELRERAPGQGTNGFQLLRHAVKRDLLQPRTPPYQEMK

SEQ ID NO: 83050 - protein, 103 aa, Homo sapiens
  Payload ID: 16528
  Gene Symbol: SPAG11B
  Gene Name: sperm associated antigen 11B
  ENSP ID: ENSP00000486365
  MOD_RES (1)..(1): Any amino acid
XSSQARHVNHSATEALGELRERAPGQGTNGFQLLRHAVKRDLLQPRTPPYQGTHSVAQAGVQWHCYRLLQPLPPGLKCSSHLSLPNTWDHRHAPLHTASFFRC

SEQ ID NO: 83051 - protein, 318 aa, Homo sapiens [sequence omitted]

SEQ ID NO: 83052 - protein, 631 aa, Homo sapiens
  Payload ID: 16529
  Gene Symbol: SPAG16
  Gene Name: sperm associated antigen 16
  Uniprot ID: Q8N0X2
  ENSP ID: ENSP00000332592
MAAQRGMPSSAVRVLEEALGMGLTAAGDARDTADAVAAEGAYYLEQVTITEASEDDYEYEEIPDDNFSIPEGEEDLAKAIQMAQEQATDTEILERKTVLPSKHAVPEVIEDFLCNFLIKMGMTRTLDCFQSEWYELIQKGVTELRTVGNVPDVYTQIMLLENENKNLKKDLKHYKQAADKAREDLLKIQKERDFHRMHHKRIVQEKNKLINDLKGLKLHYASYEPTIRVLHEKHHTLLKEKMLTSLERDKVVGQISGLQETLKKLQRGHSYHGPQIKVDHSREKENAPEGPTQKGLREAREQNKCKTKMKGNTKDSEFPIDMQPNPNLNVSKESLSPAKFDYKLKNIFRLHELPVSCVSMQPHKDILVSCGEDRLWKVLGLPKCNVLLTGFGHTDWLSDCCFHPSGDKLATSSGDTTVKLWDLCKGDCILTFEGHSRAVWSCTWHSCGNFVASSSLDKTSKIWDVNSERCRCTLYGHTDSVNSIEFFPFSNTLLTSSADKTLSIWDARTGICEQSLYGHMHSINDAIFDPRGHMIASCDACGVTKLWDFRKLLPIVSIDIGPSPGNEVNFDSSGRVLAQASGNGVIHLLDLKSGEIHKLMGHENEAHTVVFSHDGEILFSGGSDGTVRTWS

SEQ ID NO: 83053 - protein, 57 aa, Homo sapiens
  Payload ID: 16529
  Gene Symbol: SPAG16
  Gene Name: sperm associated antigen 16
  ENSP ID: ENSP00000385496
MAAQRGMPSSAVRVLEEALGMGLTAAGDARDTADAVAAEGAYYLEPYLYPVPLLLND

SEQ ID NO: 83054 - protein, 251 aa, Homo sapiens
  Payload ID: 16529
  Gene Symbol: SPAG16
  Gene Name: sperm associated antigen 16
  ENSP ID: ENSP00000390494
MGVGTKARASHWRRLLSLGATPEEPLLDFKIPDDNFSIPEGEEDLAKAIQMAQEQATDTEILERKTVLPSKHAVPEVIEDFLCNFLIKMGMTRTLDCFQSEWYELIQKGVTELRTVGNVPDVYTQIMLLENENKNLKKDLKHYKQAADKAREDLLKIQKERDFHRMHHKRIVQEKNKLINDLKGLKLHYASYEPTIRVLHEKHHTLLKEKMLTSLERDKVVGQISGLQETLKKLQRGHSYHGPQIKGKCKM

SEQ ID NO: 83055 - protein, 64 aa, Homo sapiens
  Payload ID: 16529
  Gene Symbol: SPAG16
  Gene Name: sperm associated antigen 16
  ENSP ID: ENSP00000398926
MAAQRGMPSSAVRVLEEALGMGLTAAGDARDTADAVAAEGAYYLEQVTITEASEDDYEYEEVTC

SEQ ID NO: 83056 - protein, 374 aa, Homo sapiens
  Payload ID: 16529
  Gene Symbol: SPAG16
  Gene Name: sperm associated antigen 16
  ENSP ID: ENSP00000400847
MAAQRGMPSSAVRVLEEALGMGLTAAGDARDTADAVAAEGAYYLEQVTITEASEDDYEYEEIPDDNFSIPEGEEDLAKAIQMAQEQATDTEILERKTVLPSKHAVPEVIEDFLCNFLIKMGMTRTLDCFQSEWYELIQKGVTELRTVGNVPDVYTQIMLLENENKNLKKDLKHYKQAADKAREDLLKIQKERDFHRMHHKRIVQEKNKLINDLKGLKLHYASYEPTIRVLHEKHHTLLKEKMLTSLERDKVVGQISGLQETLKKLQRGHSYHGPQIKVDHSREKENAPEGPTQKGLREAREQNKCKTKMKGNTKVMRRREELWPFREPRPRSSTSQCCDTLFGAVQFQMFPSIQTPLNSHPDLGAHSRSCLECI

SEQ ID NO: 83057 - protein, 94 aa, Homo sapiens
  Payload ID: 16529
  Gene Symbol: SPAG16
  Gene Name: sperm associated antigen 16
  ENSP ID: ENSP00000404949
MAAQRGMPSSAVRVLEEALGMGLTAAGDARDTADAVAAEGAYYLEQVTITEASEDDYEYEEIPDDNFSIPEGEEDLAKAIQMAQEQATDTEILV

SEQ ID NO: 83058 - protein, 98 aa, Homo sapiens
  Payload ID: 16529
  Gene Symbol: SPAG16
  Gene Name: sperm associated antigen 16
  ENSP ID: ENSP00000411077
MAAQRGMPSSAVRVLEEALGMGLTAAGDARDTADAVAAEGAYYLEQVTITEASEDDYEYEEIKAVAHKLILNLLEVTFIDIYKEVRRKQLFIFHGSSE

SEQ ID NO: 83059 - protein, 183 aa, Homo sapiens
  Payload ID: 16529
  Gene Symbol: SPAG16
  Gene Name: sperm associated antigen 16
  Uniprot ID: Q8N0X2
  ENSP ID: ENSP00000415079
MAAQRGMPSSAVRVLEEALGMGLTAAGDARDTADAVAAEGAYYLEQVTITEASEDDYEYEEIPDDNFSIPEGEEDLAKAIQMAQEQATDTEILERKTVLPSKHAVPEVIEDFLCNFLIKMGMTRTLDCFQSEWYELIQKGVTELRTVGNVPDVYTQIMLLENENKNLKKDLKHYKQAAEYVIF

SEQ ID NO: 83060 - protein, 255 aa, Homo sapiens
  Payload ID: 16529
  Gene Symbol: SPAG16
  Gene Name: sperm associated antigen 16
  ENSP ID: ENSP00000416600
DSEFPIDMQPNPNLNVSKESLSPAKFDYKLKNIFRLHELPVSCVSMQPHKDILVSCGEDRLWKVLGLPKCNVLLTGFGHTDWLSDCCFHPSERCRCTLYGHTDSVNSIEFFPFSNTLLTSSADKTLSIWDARTGICEQSLYGHMHSINDAIFDPRGHMIASCDACGVTKLWDFRKLLPIVSIDIGPSPGNEVNFDSSGRVLAQASGNGVIHLLDLKSGEIHKLMGHENEAHTVVFSHDGEILFSGGSDGTVRTWS

SEQ ID NO: 83061 - protein, 2223 aa, Homo sapiens
  Payload ID: 16530
  Gene Symbol: SPAG17
  Gene Name: sperm associated antigen 17
  Uniprot ID: Q6Q759
  ENSP ID: ENSP00000337804
MAPKKEKGGTVNTSSKIWEPSLIAAQFNQNDWQASIAFVVGNQIEDDLLIQALTVAVQVPQRKLFSMVSWQDILQQINEINTLVGSASSKKAKKPVGGNAPLYYEVLTAAKAIMDSGEKLTLPLIGKLLKFQLLQIKFKDQQRRENEKKVIEDKPKLEKDKGKAKSPKEKKAPSAKPAKGKGKDQPEANAPVKKTTQLKRRGEDDHTNRYIDDEPDDGAQHYIIVVGFNNPQLLAIMAELGIPITSVIKISSENYEPLQTHLAAVNQQQEVLLQSEDLEAEKLKKENAIKELKTFWKYLEPVLNNEKPETNLFDVARLEYMVKAADFPSDWSDGEMMLKLGTDIFENIACLMYDILDWKRQHQHYLESMQLINVPQVVNEKPVLEAMPTSEAPQPAVPAPGKKKAQYEEPQAPPPVTSVITTEVDMRYYNYLLNPIREEFISVPLILHCMLEQVVATEEDLVPPSLREPSPRADGLDHRIAAHIVSLLPSLCLSEREKKNLHDIFLSEEENESKAVPKGPLLLNYHDAHAHKKYALQDQKNFDPVQIEQEMQSKLPLWEFLQFPLPPPWNNTKRLATIHELMHFCTSDVLSWNEVERAFKVFTFESLKLSEVDEKGKLKPSGMMCGSDSEMFNIPWDNPARFAKQIRQQYVMKMNTQEAKQKADIKIKDRTLFVDQNLSMSVQDNESNREPSDPSQCDANNMKHSDLNNLKLSVPDNRQLLEQESIMKAQPQHESLEQTTNNEIKDDAVTKADSHEKKPKKMMVEADLEDIKKTQQRSLMDWSFTEHFKPKVLLQVLQEAHKQYRCVDSYYHTQDNSLLLVFHNPMNRQRLHCEYWNIALHSNVGFRNYLELVAKSIQDWITKEEAIYQESKMNEKIIRTRAELELKSSANAKLTSASKIFSIKESKSNKGISKTEISDQEKEKEKEKIPFILEGSLKAWKEEQHRLAEEERLREEKKAEKKGKEAGKKKGKDNAEKEDSRSLKKKSPYKEKSKEEQVKIQEVTEESPHQPEPKITYPFHGYNMGNIPTQISGSNYYLYPSDGGQIEVEKTMFEKGPTFIKVRVVKDNHNFMIHLNDPKEIVKKEEKGDYYLEEEEEGDEEQSLETEVSDAKNKAFSKFGSFSATLENGICLSISYYGSNGMAPEDKDPDLETILNIPSALTPTVVPVIVTVPQSKAKGKIKGKEKPKESLKEEEHPKEEEKKEEEVEPEPVLQETLDVPTFQSLNVSCPSGLLLTFIGQESTGQYVIDEEPTWDIMVRQSYPQRVKHYEFYKTVMPPAEQEASRVITSQGTVVKYMLDGSTQILFADGAVSRSPNSGLICPPSEMPATPHSGDLMDSISQQKSETIPSEITNTKKGKSHKSQSSMAHKGEIHDPPPEAVQTVTPVEVHIGTWFTTTPEGNRIGTKGLERIADLTPLLSFQATDPVNGTVMTTREDKVVIVERKDGTRIVDHADGTRITTFYQVYEDQIILPDDQETTEGPRTVTRQVKCMRVESSRYATVIANCEDSSCCATFGDGTTIIAKPQGTYQVLPPNTGSLYIDKDCSAVYCHESSSNIYYPFQKREQLRAGRYIMRHTSEVICEVLDPEGNTFQVMADGSISTILPEKKLEDDLNEKTEGYDSLSSMHLEKNHQQIYGEHVPRFFVMYADGSGMELLRDSDIEEYLSLAYKESNTVVLQEPVQEQPGTLTITVLRPFHEASPWQVKKEDTIVPPNLRSRSWETFPSVEKKTPGPPFGTQIWKGLCIESKQLVSAPGAILKSPSVLQMRQFIQHEVIKNEVKLRLQVSLKDYINYILKKEDELQEMMVKDSRTEEERGNAADLLKLVMSFPKMEETTKSHVTEVAAHLTDLFKQSLATPPKCPPDTFGKDFFEKTWRHTASSKRWKEKIDKTRKEIETTQNYLMDIKNRIIPPFFKSELNQLYQSQYNHLDSLSKKLPSFTKKNEDANETAVQDTSDLNLDFKPHKVSEQKSSSVPSLPKPEISADKKDFTAQNQTENLTKSPEEAESYEPVKIPTQSLLQDVAGQTRKEKVKLPHYLLSSKPKSQPLAKVQDSVGGKVNTSSVASAAINNAKSSLFGFHLLPSSVKFGVLKEGHTYATVVKLKNVGVDFCRFKVKQPPPSTGLKVTYKPGPVAAGMQTELNIELFATAVGEDGAKGSAHISHNIEIMTEHEVLFLPVEATVLTSSNYDKRPKDFPQGKENPMVQRTSTIYSSTLGVFMSRKVSPH

SEQ ID NO: 83062 - protein, 660 aa, Homo sapiens
  Payload ID: 16530
  Gene Symbol: SPAG17
  Gene Name: sperm associated antigen 17
  ENSP ID: ENSP00000402749
IAKPQGTYQVLPPNTGSLYIDKDCSAVYCHESSSNIYYPFQKREQLRAGRYIMRHTSEVICEVLDPEGNTFQVMADGSISTILPEKKLEDDLNEKTEGYDSLSSMHLEKNHQQIYGEHVPRFFVMYADGSGMELLRDSDIEEYLSLAYKESNTVVLQEPVQEQPGTLTITVLRPFHEASPWQVKKEDTIVPPNLRSRSWETFPSVEKKTPGPPFGTQIWKGLCIESKQLVSAPGAILKSPSVLQMRQFIQHEVIKNEVKLRLQVSLKDYINYILKKEDELQEMMVKDSRTEEERGNAADLLKLVMSFPKMEETTKSHVTEVAAHLTDLFKQSLATPPKCPPDTFGKDFFEKTWRHTASSKRWKEKIDKTRKEIETTQNYLMDIKNRIIPPFFKSELNQLYQSQYNHLDSLSKKLPSFTKKNEDANETAVQDTSDLNLDFKPHKVSEQKSSSVPSLPKPEISADKKDFTAQNQTENLTKSPEEAESYEPVKIPTQSLLQDVAGQTRKEKVKLPHYLLSSKPKSQPLAKVQDSVGGKVNTSSVASAAINNAKSSLFGFHLLPSSVKFGVLKEGHTYATVVKLKNVGVDFCRFKVKQPPPSTGLKVTYKPGPVAAGMQTELNIELFATAVGEDGAKGSAHISHNIEIMTEHEVLFLPVEANIL

SEQ ID NO: 83063 - protein, 437 aa, Homo sapiens
  Payload ID: 16531
  Gene Symbol: SPAG4
  Gene Name: sperm associated antigen 4
  Uniprot ID: Q9NPE6
  ENSP ID: ENSP00000363391
MRRSSRPGSASSSRKHTPNFFSENSSMSITSEDSKGLRSAEPGPGEPEGRRARGPSCGEPALSAGVPGGTTWAGSSQQKPAPRSHNWQTACGAATVRGGASEPTGSPVVSEEPLDLLPTLDLRQEMPPPRVFKSFLSLLFQGLSVLLSLAGDVLVSMYREVCSIRFLFTAVSLLSLFLSAFWLGLLYLVSPLENEPKEMLTLSEYHERVRSQGQQLQQLQAELDKLHKEVSTVRAANSERVAKLVFQRLNEDFVRKPDYALSSVGASIDLQKTSHDYADRNTAYFWNRFSFWNYARPPTVILEPHVFPGNCWAFEGDQGQVVIQLPGRVQLSDITLQHPPPSVEHTGGANSAPRDFAVFGLQVYDETEVSLGKFTFDVEKSEIQTFHLQNDPPAAFPKVKIQILSNWGHPRFTCLYRVRAHGVRTSEGAEGSAQGPH

SEQ ID NO: 83064 - protein, 214 aa, Homo sapiens
  Payload ID: 16531
  Gene Symbol: SPAG4
  Gene Name: sperm associated antigen 4
  ENSP ID: ENSP00000396670
MPPPRVFKSFLSLLFQGLSVLLSLAGDVLVSMYREVCSIRFLFTAVSLLSLFLSAFWLGLLYLVSPLENEPKEMLTLSEYHERVRSQGQQLQQLQAELDKLHKEVSTVRAANSERVAKLVFQRLNEDFVRKPDYALSSVGASIDLQKTSHDYADRNTAYFWNRFSFWNYARPPTVILEPHVFPGNCWAFEGDQGQVVIQLPGRVQLSDITLQHP

SEQ ID NO: 83065 - protein, 141 aa, Homo sapiens
  Payload ID: 16531
  Gene Symbol: SPAG4
  Gene Name: sperm associated antigen 4
  ENSP ID: ENSP00000399231
VFPGNCWAFEGDQGQVVIQLPGRVQLSDITLQHPPPSVEHTGGANSAPRDFAVFFLLSFFTHQGLQVYDETEVSLGKFTFDVEKSEIQTFHLQNDPPAAFPKVKIQILSNWGHPRFTCLYRVRAHGVRTSEGAEGSAQGPH

SEQ ID NO: 83066 - protein, 1193 aa, Homo sapiens
  Payload ID: 16532
  Gene Symbol: SPAG5
  Gene Name: sperm associated antigen 5
  Uniprot ID: Q96R06
  ENSP ID: ENSP00000323300
MWRVKKLSLSLSPSPQTGKPSMRTPLRELTLQPGALTNSGKRSPACSSLTPSLCKLGLQEGSNNSSPVDFVNNKRTDLSSEHFSHSSKWLETCQHESDEQPLDPIPQISSTPKTSEEAVDPLGNYMVKTIVLVPSPLGQQQDMIFEARLDTMAETNSISLNGPLRTDDLVREEVAPCMGDRFSEVAAVSEKPIFQESPSHLLEESPPNPCSEQLHCSKESLSSRTEAVREDLVPSESNAFLPSSVLWLSPSTALAADFRVNHVDPEEEIVEHGAMEEREMRFPTHPKESETEDQALVSSVEDILSTCLTPNLVEMESQEAPGPAVEDVGRILGSDTESWMSPLAWLEKGVNTSVMLENLRQSLSLPSMLRDAAIGTTPFSTCSVGTWFTPSAPQEKSTNTSQTGLVGTKHSTSETEQLLCGRPPDLTALSRHDLEDNLLSSLVILEVLSRQLRDWKSQLAVPHPETQDSSTQTDTSHSGITNKLQHLKESHEMGQALQQARNVMQSWVLISKELISLLHLSLLHLEEDKTTVSQESRRAETLVCCCFDLLKKLRAKLQSLKAEREEARHREEMALRGKDAAEIVLEAFCAHASQRISQLEQDLASMREFRGLLKDAQTQLVGLHAKQEELVQQTVSLTSTLQQDWRSMQLDYTTWTALLSRSRQLTEKLTVKSQQALQERDVAIEEKQEVSRVLEQVSAQLEECKGQTEQLELENSRLATDLRAQLQILANMDSQLKELQSQHTHCAQDLAMKDELLCQLTQSNEEQAAQWQKEEMALKHMQAELQQQQAVLAKEVRDLKETLEFADQENQVAHLELGQVECQLKTTLEVLRERSLQCENLKDTVENLTAKLASTIADNQEQDLEKTRQYSQKLGLLTEQLQSLTLFLQTKLKEKTEQETLLLSTACPPTQEHPLPNDRTFLGSILTAVADEEPESTPVPLLGSDKSAFTRVASMVSLQPAETPGMEESLAEMSIMTTELQSLCSLLQESKEEAIRTLQRKICELQARLQAQEEQHQEVQKAKEADIEKLNQALCLRYKNEKELQEVIQQQNEKILEQIDKSGELISLREEVTHLTRSLRRAETETKVLQEALAGQLDSNCQPMATNWIQEKVWLSQEVDKLRVMFLEMKNEKEKLMIKFQSHRNILEENLRRSDKELEKLDDIVQHIYKTLLSIPEVVRGCKELQGLLEFLS

SEQ ID NO: 83067 - protein, 272 aa, Homo sapiens
  Payload ID: 16532
  Gene Symbol: SPAG5
  Gene Name: sperm associated antigen 5
  ENSP ID: ENSP00000444223
MWRVKKLSLSLSPSPQTGKPSMRTPLRELTLQPGALTNSGKRSPACSSLTPSLCKLGLQVRFAWTASRLGCLPREGSNNSSPVDFVNNKRTDLSSEHFSHSSKWLETCQHESDEQPLDPIPQISSTPKTSEEAVDPLGNYMVKTIVLVPSPLGQQQDMIFEARLDTMAETNSISLNGPLRTDDLVREEVAPCMGDRFSEVAAVSEKPIFQESPSHLLEESPPNPCSEQLHCSKESLSSRTEAVREDLVPSESNAFLPSSVLWLSPSTALAAD

SEQ ID NO: 83068 - protein, 72 aa, Homo sapiens
  Payload ID: 16532
  Gene Symbol: SPAG5
  Gene Name: sperm associated antigen 5
  ENSP ID: ENSP00000462663
MWRVKKLSLSLSPSPQTGKPSMRTPLRELTLQPGALTNSGKRSPACSSLTPSLCKLGLQISVSIMWTQRRKL

SEQ ID NO: 83069 - protein, 238 aa, Homo sapiens
  Payload ID: 16532
  Gene Symbol: SPAG5
  Gene Name: sperm associated antigen 5
  ENSP ID: ENSP00000463095
  MOD_RES (1)..(1): Any amino acid
XPHPETQDSSTQTDTSHSGITNKLQHLKESHEMGQALQQARNVMQSWVLISKELISLLHLSLLHLEEDKTTVSQESRRAETLVCCCFDLLKKLRAKLQSLKAEREEARHREEMALRGKDAVGLHAKQEELVQQTVSLTSTLQQDWRSMQLDYTTWTALLSRSRQLTEKLTVKSQQALQERDVAIEEKQEVSRVLEQVSAQLEECKGQTEQLELENSRLATDLRAQLQILANMDSQLKE

SEQ ID NO: 83070 - protein, 57 aa, Homo sapiens
  Payload ID: 16532
  Gene Symbol: SPAG5
  Gene Name: sperm associated antigen 5
  ENSP ID: ENSP00000464280
QEQDLEKTRQYSQKLGLLTEQLQSLTLFLQTKLKEKTMFQESRNIAFFGLPAVCTKQ

SEQ ID NO: 83071 - protein, 73 aa, Homo sapiens
  Payload ID: 16532
  Gene Symbol: SPAG5
  Gene Name: sperm associated antigen 5
  ENSP ID: ENSP00000464400
MWRVKKLSLSLSPSPQTGKPSMRTPLRELTLQPGALTNSGKRSPACSSLTPSLCKLGLQQISVSIMWTQRRKL

SEQ ID NO: 83072 - protein, 129 aa, Homo sapiens
  Payload ID: 16532
  Gene Symbol: SPAG5
  Gene Name: sperm associated antigen 5
  ENSP ID: ENSP00000464474
SRRAETLVCCCFDLLKKLRAKLQSLKAEREEARHREEMALRGKDAVGLHAKQEELVQQTVSLTSTLQQDWRSMQLDYTTWTALLSRSRQLTEKLTVKSQQALQERDVAIEEKQEISGLSCRFWPTWTAS

SEQ ID NO: 83073 - protein, 186 aa, Homo sapiens
  Payload ID: 16532
  Gene Symbol: SPAG5
  Gene Name: sperm associated antigen 5
  ENSP ID: ENSP00000466021
  MOD_RES (1)..(1): Any amino acid
XLATDLRAQLQILANMDSQLKELQSQHTHCAQDLAMKDELLCQLTQSNEEQAAQWQKEEMALKHMQAELQQQQAVLAKEVRDLKETLEFADQENQVAHLELGQVECQLKTTLEVLRERSLQCENLKDTVENLTAKLASTIADNQEQDLEKTRQYSQKLGLLTEQLQSLTLFLQTKLKEKLFFLLCP

SEQ ID NO: 83074 - protein, 185 aa, Homo sapiens
  Payload ID: 16532
  Gene Symbol: SPAG5
  Gene Name: sperm associated antigen 5
  ENSP ID: ENSP00000466061
  MOD_RES (1)..(1): Any amino acid
XESKEEAIRTLQRKICELQARLQAQEEQHQEVQKAKEADIEKLNQALCLRYKNEKELQEVIQQQNEKILEQIDKSGELISLREEVTHLTRSLRRAETETKVLQEALAGQLDSNCQPMATNWIQEKVWLSQEVDKLRVMFLEMKNEKEKLMIKFQSHRNILEENLRRSDKELEKLDDIVQHIYKRW

SEQ ID NO: 83075 - protein, 458 aa, Homo sapiens
  Payload ID: 16533
  Gene Symbol: SPAG6
  Gene Name: sperm associated antigen 6
  Uniprot ID: O75602
  ENSP ID: ENSP00000323599
MSQRQVLQVFEQYQKARTQFVQMVAELATRPQNIETLQNAGVMSLLRTLLLDVVPTIQQTAALALGRLANYNDDLAEAVVKCDILPQLVYSLAEQNRFYKKAAAFVLRAVGKHSPQLAQAIVDCGALDTLVICLEDFDPGVKEAAAWALRYIARHNAELSQAVVDAGAVPLLVLCIQEPEIALKRIAASALSDIAKHSPELAQTVVDAGAVAHLAQMILNPDAKLKHQILSALSQVSKHSVDLAEMVVEAEIFPVVLTCLKDKDEYVKKNASTLIREIAKHTPELSQLVVNAGGVAAVIDCIGSCKGNTRLPGIMMLGYVAAHSENLAMAVIISKGVPQLSVCLSEEPEDHIKAAAAWALGQIGRHTPEHARAVAVTNTLPVLLSLYMSTESSEDLQVKSKKAIKNILQKCTYLPALEPFLYDAPPNILKHVVGQFSKVLFPWIFRYTSAEGGQLSTT

SEQ ID NO: 83076 - protein, 484 aa, Homo sapiens
  Payload ID: 16533
  Gene Symbol: SPAG6
  Gene Name: sperm associated antigen 6
  ENSP ID: ENSP00000365788
MVAELATRPQNIETLQNAGVMSLLRTLLLDVVPTIQQTAALALGRLANYNDDLAEAVVKCDILPQLVYSLAEQNRFYKKAAAFVLRAVGKHSPQLAQAIVDCGALDTLVICLEDFDPGVKEAAAWALRYIARHNAELSQAVVDAGAVPLLVLCIQEPEIALKRIAASALSDIAKHSPELAQTVVDAGAVAHLAQMILNPDAKLKHQILSALSQVSKHSVDLAEMVVEAEIFPVVLTCLKDKDEYVKKNASTLIREIAKHTPELSQLVVNAGGVAAVIDCIGSCKGNTRLPGIMMLGYVAAHSENLAMAVIISKGVPQLSVCLSEEPEDHIKAAAAWALGQIGRHTPEHARAVAVTNTLPVLLSLYMSTESSEDLQVKSKKAIKNILQKCTYLPALEPFLYDAPPNILKHVVGQFSKVLPHDSKARRLFVTSGGLKKVQEIKAEPGSLLQEYINSINSCYPEEIVSKFFPELQVCALFRKFMRTP

SEQ ID NO: 83077 - protein, 509 aa, Homo sapiens
  Payload ID: 16533
  Gene Symbol: SPAG6
  Gene Name: sperm associated antigen 6
  Uniprot ID: O75602
  ENSP ID: ENSP00000365811
MSQRQVLQVFEQYQKARTQFVQMVAELATRPQNIETLQNAGVMSLLRTLLLDVVPTIQQTAALALGRLANYNDDLAEAVVKCDILPQLVYSLAEQNRFYKKAAAFVLRAVGKHSPQLAQAIVDCGALDTLVICLEDFDPGVKEAAAWALRYIARHNAELSQAVVDAGAVPLLVLCIQEPEIALKRIAASALSDIAKHSPELAQTVVDAGAVAHLAQMILNPDAKLKHQILSALSQVSKHSVDLAEMVVEAEIFPVVLTCLKDKDEYVKKNASTLIREIAKHTPELSQLVVNAGGVAAVIDCIGSCKGNTRLPGIMMLGYVAAHSENLAMAVIISKGVPQLSVCLSEEPEDHIKAAAAWALGQIGRHTPEHARAVAVTNTLPVLLSLYMSTESSEDLQVKSKKAIKNILQKCTYLPALEPFLYDAPPNILKHVVGQFSKVLPHDSKARRLFVTSGGLKKVQEIKAEPGSLLQEYINSINSCYPEEIVRYYSPGYSDTLLQRVDSYQPLNN

SEQ ID NO: 83078 - protein, 246 aa, Homo sapiens
  Payload ID: 16533
  Gene Symbol: SPAG6
  Gene Name: sperm associated antigen 6
  ENSP ID: ENSP00000406594
MSQRQVLQVFEQYQKARTQFVQMVAELATRPQNIETLQNAGEPGARTPVAPRALSPRRLRPAALPVELLGSRSVGTGVRKSIHSFQRVFGGQAERVKLPDGCGRCALSLFPSSLHTGVMSLLRTLLLDVVPTIQQTAALALGRLANYNDDLAEAVVKCDILPQLVYSLAEQNRFYKKAAAFVLRAVGKHSPQLAQAIVDCGALDTLVICLEDFDPGVKEAAAWALRYIARHNAELSQAVVDAGAVP

SEQ ID NO: 83079 - protein, 191 aa, Homo sapiens
  Payload ID: 16533
  Gene Symbol: SPAG6
  Gene Name: sperm associated antigen 6
  ENSP ID: ENSP00000411111
MSQRQVLQVFEQYQKARTQFVQMVAELATRPQNIETLQNAGVMSLLRTLLLDVVPTIQQTAALALGRLANYNDDLAEAVVKCDILPQLVYSLAEQNGVPQLSVCLSEEPEDHIKAAAAWALGQIGRHTPEHARAVAVTNTLPVLLSLYMSTESSEDLQVKSKKAIKNILQKCTYLPALEPFLYDAPPNILK

SEQ ID NO: 83080 - protein, 484 aa, Homo sapiens
  Payload ID: 16533
  Gene Symbol: SPAG6
  Gene Name: sperm associated antigen 6
  Uniprot ID: O75602
  ENSP ID: ENSP00000441325
MHSLTMDLWIPNGQAGVMSLLRTLLLDVVPTIQQTAALALGRLANYNDDLAEAVVKCDILPQLVYSLAEQNRFYKKAAAFVLRAVGKHSPQLAQAIVDCGALDTLVICLEDFDPGVKEAAAWALRYIARHNAELSQAVVDAGAVPLLVLCIQEPEIALKRIAASALSDIAKHSPELAQTVVDAGAVAHLAQMILNPDAKLKHQILSALSQVSKHSVDLAEMVVEAEIFPVVLTCLKDKDEYVKKNASTLIREIAKHTPELSQLVVNAGGVAAVIDCIGSCKGNTRLPGIMMLGYVAAHSENLAMAVIISKGVPQLSVCLSEEPEDHIKAAAAWALGQIGRHTPEHARAVAVTNTLPVLLSLYMSTESSEDLQVKSKKAIKNILQKCTYLPALEPFLYDAPPNILKHVVGQFSKVLPHDSKARRLFVTSGGLKKVQEIKAEPGSLLQEYINSINSCYPEEIVRYYSPGYSDTLLQRVDSYQPLNN

SEQ ID NO: 83081 - protein, 227 aa, Homo sapiens
  Payload ID: 16534
  Gene Symbol: SPAG7
  Gene Name: sperm associated antigen 7
  Uniprot ID: O75391
  ENSP ID: ENSP00000206020
MADLLGSILSSMEKPPSLGDQETRRKAREQAARLKKLQEQEKQQKVEFRKRMEKEVSDFIQDSGQIKKKFQPMNKIERSILHDVVEVAGLTSFSFGEDDDCRYVMIFKKEFAPSDEELDSYRRGEEWDPQKAEEKRKLKELAQRQEEEAAQQGPVVVSPASDYKDKYSHLIGKGAAKDAAHMLQANKTYGCVPVANKRDTRSIEEAMNEIRAKKRLRQSGEELPPTS

SEQ ID NO: 83082 - protein, 87 aa, Homo sapiens
  Payload ID: 16534
  Gene Symbol: SPAG7
  Gene Name: sperm associated antigen 7
  ENSP ID: ENSP00000458264
MEKPPSLGDQETRRKAREQAARLKKLQEQEKQQKVEFRKRMEKEVSDFIQDSGQIKKKFQPMNKIERSILLIPPPRPRNEMKHLYGL

SEQ ID NO: 83083 - protein, 176 aa, Homo sapiens
  Payload ID: 16534
  Gene Symbol: SPAG7
  Gene Name: sperm associated antigen 7
  ENSP ID: ENSP00000458405
MEKEVSDFIQDSGQIKKKFQPMNKIERSILHDVVEVAGLTSFSFGEDDDCRYVMIFKKEFAPSDEELDSYRRGEEWDPQKAEEKRKLKELAQRQEEEAAQQGPVVVSPASDYKDKYSHLIGKGAAKDAAHMLQANKTYGCVPVANKRDTRSIEEAMNEIRAKKRLRQSGEELPPTS

SEQ ID NO: 83084 - protein, 194 aa, Homo sapiens
  Payload ID: 16534
  Gene Symbol: SPAG7
  Gene Name: sperm associated antigen 7
  ENSP ID: ENSP00000461145
MEKPPSLGDQETRRKAREQAARLKKLQEQEKQQKVEFRKRMEKEVSDFIQDSGQIKKKFQPMNKIERSILHDVVEVAGLTSFSFGEDDDCRYVMIFKKEFAPSDEELDSYRRGEEWDPQKAEEKRKLKELAQRQEEEAAQQGPVVVSPASDYKDKYSHLIGKGAAKDAAHMLQANKTYGCGEATVRLGVAGRGA

SEQ ID NO: 83085 - protein, 501 aa, Homo sapiens
  Payload ID: 16535
  Gene Symbol: SPAG8
  Gene Name: sperm associated antigen 8
  Uniprot ID: Q99932
  ENSP ID: ENSP00000340982
METNESTEGSRSRSRSLDIQPSSEGLGPTSEPFPSSDDSPRSALAAATAAAAAAASAAAATAAFTTAKAAALSTKTPAPCSEFMEPSSDPSLLGEPCAGPGFTHNIAHGSLGFEPVYVSCIAQDTCTTTDHSSNPGPVPGSSSGPVLGSSSGAGHGSGSGSGPGCGSVPGSGSGPGPGSGPGSGPGHGSGSHPGPASGPGPDTGPDSELSPCIPPGFRNLVADRVPNYTSWSQHCPWEPQKQPPWEFLQVLEPGARGLWKPPDIKGKLMVCYETLPRGQCLLYNWEEERATNHLDQVPSMQDGSESFFFRHGHRGLLTMQLKSPMPSSTTQKDSYQPPGNVYWPLRGKREAMLEMLLQHQICKEVQAEQEPTRKLFEVESVTHHDYRMELAQAGTPAPTKPHDYRQEQPETFWIQRAPQLPTWWPLPTQVPAAEDYLTWKEWGFTGVQEVLSALLRATPGEYSVNICGMNEHPVCSRTWTNRLCHQEMGSKKTVTQEDRGW

SEQ ID NO: 83086 - protein, 485 aa, Homo sapiens
  Payload ID: 16535
  Gene Symbol: SPAG8
  Gene Name: sperm associated antigen 8
  Uniprot ID: Q99932
  ENSP ID: ENSP00000379878
METNESTEGSRSRSRSLDIQPSSEGLGPTSEPFPSSDDSPRSALAAATAAAAAAASAAAATAAFTTAKAAALSTKTPAPCSEFMEPSSDPSLLGEPCAGPGFTHNIAHGSLGFEPVYVSCIAQDTCTTTDHSSNPGPVPGSSSGPVLGSSSGAGHGSGSGSGPGCGSVPGSGSGPGPGSGPGSGPGHGSGSHPGPASGPGPDTGPDSELSPCIPPGFRNLVADRVPNYTSWSQHCPWEPQKQPPWEFLQVLEPGARGLWKPPDIKGKLMVCYETLPRGQCLLYNWEEERATNHLDQVPSMQDGSESFFFRHGHRGLLTMQLKSPMPSSTTQKDSYQPPGNVYWPLRGKREAMLEMLLQHQICKEVQAEQEPTRKLFEVESVTHHDYRMELAQAGTPAPTKPHDYRQEQPETFWIQRAPQLPGVSNIRTLDTPFRKNCSFSTPVPLSLGKLLPYEPENYPYQLGEISSLPCPGGRLGGGGGRMTPF

SEQ ID NO: 83087 - protein, 483 aa, Homo sapiens
  Payload ID: 16535
  Gene Symbol: SPAG8
  Gene Name: sperm associated antigen 8
  ENSP ID: ENSP00000417462
  MOD_RES (1)..(1): Any amino acid
XETNESTEGSRSRSLDIQPSSEGLGPTSEPFPSSDDSPRSALAAATAAAAAAASAAAATAAFTTAKAAALSTKTPAPCSEFMEPSSDPSLLGEPCAGPGFTHNIAHGSLGFEPVYVSCIAQDTCTTTDHSSNPGPVPGSSSGPVLGSSSGAGHGSGSGSGPGCGSVPGSGSGPGPGSGPGSGPGHGSGSHPGPASGPGPDTGPDSELSPCIPPGFRNLVADRVPNYTSWSQHCPWEPQKQPPWEFLQVLEPGARGLWKPPDIKGKLMVCYETLPRGQCLLYNWEEERATNHLDQVPSMQDGSESFFFRHGHRGLLTMQLKSPMPSSTTQKDSYQPPGNVYWPLRGKREAMLEMLLQHQICKEVQAEQEPTRKLFEVESVTHHDYRMELAQAGTPAPTKPHDYRQEQPETFWIQRAPQLPGVSNIRTLDTPFRKNCSFSTPVPLSLGKLLPYEPENYPYQLGEISSLPCPGGRLGGGGGRMTPF

SEQ ID NO: 83088 - protein, 477 aa, Homo sapiens
  Payload ID: 16535
  Gene Symbol: SPAG8
  Gene Name: sperm associated antigen 8
  ENSP ID: ENSP00000418072
METNESTEGSRSRSLDIQPSSEGLGPTSEPFPSSDDSPRSALAAATAAAAAAASAAAATAAFTTAKAAALSTKTPAPCSEFMEPSSDPSLLGEPCAGPGFTHNIAHGSLGFEPVYVSCIAQDTCTTTDHSSNPGPVPGSSSGPVLGSSSGAGHGSGSGSGPGCGSVPGSGSGPGPGSGPGSGPGHGSGSHPGPASGPGPDTGPDSELSPCIPPGFRNLVADRVPNYTSWSQHCPWEPQKQPPWEFLQVLEPGARGLWKPPDIKGKLMVCYETLPRGQCLLYNWEEERATNHLDQVPSMQDGSESFFFRHGHRGLLTMQLKSPMPSSTTQKDSYQPPGNVYWPLRGKREAMLEMLLQHQICKEVQAEQEPTRKLFEVESVTHHDYRMELAQAGTPAPTKEQPETFWIQRAPQLPGVSNIRTLDTPFRKNCSFSTPVPLSLGKLLPYEPENYPYQLGEISSLPCPGGRLGGGGGRMTPF

SEQ ID NO: 83089 - protein, 96 aa, Homo sapiens
  Payload ID: 16535
  Gene Symbol: SPAG8
  Gene Name: sperm associated antigen 8
  ENSP ID: ENSP00000418215
METNESTEGSRSRSRSLDIQPSSEGLGPTSEPFPSSDDSPRSALAAATAAAAAAASAAAATAAFTTAKAAALSTKTPAPCSEFMEPSSDPSLLGEP

SEQ ID NO: 83090 - protein, 426 aa, Homo sapiens
  Payload ID: 16535
  Gene Symbol: SPAG8
  Gene Name: sperm associated antigen 8
  Uniprot ID: Q99932
  ENSP ID: ENSP00000418530
METNESTEGSRSRSRSLDIQPSSEGLGPTSEPFPSSDDSPRSALAAATAAAAAAASAAAATAAFTTAKAAALSTKTPAPCSEFMEPSSDPSLLGEPCAGPGFTHNIAHGSLGFEPVYVSCIAQDTCTTTDHSSNPGPVPGSSSGPVLGSSSGAGHGSGSGSGPGCGSVPGSGSGPGPGSGPGSGPGHGSGSHPGPASGPGPDTGPDSELSPCIPPGFRNLVADRVPNYTSWSQHCPWEPQKQPPWEFLQVLEPGARGLWKPPDIKGKLMVCYETLPRGQCLLYNWEEERATNHLDQVPSMQDGSESFFFRHGHRGLLTMQLKSPMPSSTTQKDSYQPPGNVYWPLRGKREAMLEMLLQHQICKEVQAEQEPTRKLFEVESVTHHDYRMELAQAGTPAPTKPHDYRQEQPETFWIQRAPQLPVCEGD

SEQ ID NO: 83091 - protein, 69 aa, Homo sapiens
  Payload ID: 16535
  Gene Symbol: SPAG8
  Gene Name: sperm associated antigen 8
  ENSP ID: ENSP00000419280
METNESTEGSRSRSRSLDIQPSSEGLGPTSEPFPSSDDSPREPPTTWIKSQACRMALRVFSSDTDTGDC

SEQ ID NO: 83092 - protein, 69 aa, Homo sapiens; identical to SEQ ID NO: 83091
  Payload ID: 16535
  Gene Symbol: SPAG8
  Gene Name: sperm associated antigen 8
  ENSP ID: ENSP00000420413

SEQ ID NO: 83093 - protein, 1321 aa, Homo sapiens
  Payload ID: 16536
  Gene Symbol: SPAG9
  Gene Name: sperm associated antigen 9
  Uniprot ID: O60271
  ENSP ID: ENSP00000262013
MELEDGVVYQEEPGGSGAVMSERVSGLAGSIYREFERLIGRYDEEVVKELMPLVVAVLENLDSVFAQDQEHQVELELLRDDNEQLITQYEREKALRKHAEEKFIEFEDSQEQEKKDLQTRVESLESQTRQLELKAKNYADQISRLEEREAELKKEYNALHQRHTEMIHNYMEHLERTKLHQLSGSDQLESTAHSRIRKERPISLGIFPLPAGDGLLTPDAQKGGETPGSEQWKFQELSQPRSHTSLKVSNSPEPQKAVEQEDELSDVSQGGSKATTPASTANSDVATIPTDTPLKEENEGFVKVTDAPNKSEISKHIEVQVAQETRNVSTGSAENEEKSEVQAIIESTPELDMDKDLSGYKGSSTPTKGIENKAFDRNTESLFEELSSAGSGLIGDVDEGADLLGMGREVENLILENTQLLETKNALNIVKNDLIAKVDELTCEKDVLQGELEAVKQAKLKLEEKNRELEEELRKARAEAEDARQKAKDDDDSDIPTAQRKRFTRVEMARVLMERNQYKERLMELQEAVRWTEMIRASRENPAMQEKKRSSIWQFFSRLFSSSSNTTKKPEPPVNLKYNAPTSHVTPSVKKRSSTLSQLPGDKSKAFDFLSEETEASLASRREQKREQYRQVKAHVQKEDGRVQAFGWSLPQKYKQVTNGQGENKMKNLPVPVYLRPLDEKDTSMKLWCAVGVNLSGGKTRDGGSVVGASVFYKDVAGLDTEGSKQRSASQSSLDKLDQELKEQQKELKNQEELSSLVWICTSTHSATKVLIIDAVQPGNILDSFTVCNSHVLCIASVPGARETDYPAGEDLSESGQVDKASLCGSMTSNSSAETDSLLGGITVVGCSAEGVTGAATSPSTNGASPVMDKPPEMEAENSEVDENVPTAEEATEATEGNAGSAEDTVDISQTGVYTEHVFTDPLGVQIPEDLSPVYQSSNDSDAYKDQISVLPNEQDLVREEAQKMSSLLPTMWLGAQNGCLYVHSSVAQWRKCLHSIKLKDSILSIVHVKGIVLVALADGTLAIFHRGVDGQWDLSNYHLLDLGRPHHSIRCMTVVHDKVWCGYRNKIYVVQPKAMKIEKSFDAHPRKESQVRQLAWVGDGVWVSIRLDSTLRLYHAHTYQHLQDVDIEPYVSKMLGTGKLGFSFVRITALMVSCNRLWVGTGNGVIISIPLTETNKTSGVPGNRPGSVIRVYGDENSDKVTPGTFIPYCSMAHAQLCFHGHRDAVKFFVAVPGQVISPQSSSSGTDLTGDKAGPSAQEPGSQTPLKSMLVISGGEGYIDFRMGDEGGESELLGEDLPLEPSVTKAERSHLIVWQVMYGNE

SEQ ID NO: 83094 - protein, 1307 aa, Homo sapiens
  Payload ID: 16536
  Gene Symbol: SPAG9
  Gene Name: sperm associated antigen 9
  Uniprot ID: O60271
  ENSP ID: ENSP00000349636
MELEDGVVYQEEPGGSGAVMSERVSGLAGSIYREFERLIGRYDEEVVKELMPLVVAVLENLDSVFAQDQEHQVELELLRDDNEQLITQYEREKALRKHAEEKFIEFEDSQEQEKKDLQTRVESLESQTRQLELKAKNYADQISRLEEREAELKKEYNALHQRHTEMIHNYMEHLERTKLHQLSGSDQLESTAHSRIRKERPISLGIFPLPAGDGLLTPDAQKGGETPGSEQWKFQELSQPRSHTSLKDELSDVSQGGSKATTPASTANSDVATIPTDTPLKEENEGFVKVTDAPNKSEISKHIEVQVAQETRNVSTGSAENEEKSEVQAIIESTPELDMDKDLSGYKGSSTPTKGIENKAFDRNTESLFEELSSAGSGLIGDVDEGADLLGMGREVENLILENTQLLETKNALNIVKNDLIAKVDELTCEKDVLQGELEAVKQAKLKLEEKNRELEEELRKARAEAEDARQKAKDDDDSDIPTAQRKRFTRVEMARVLMERNQYKERLMELQEAVRWTEMIRASRENPAMQEKKRSSIWQFFSRLFSSSSNTTKKPEPPVNLKYNAPTSHVTPSVKKRSSTLSQLPGDKSKAFDFLSEETEASLASRREQKREQYRQVKAHVQKEDGRVQAFGWSLPQKYKQVTNGQGENKMKNLPVPVYLRPLDEKDTSMKLWCAVGVNLSGGKTRDGGSVVGASVFYKDVAGLDTEGSKQRSASQSSLDKLDQELKEQQKELKNQEELSSLVWICTSTHSATKVLIIDAVQPGNILDSFTVCNSHVLCIASVPGARETDYPAGEDLSESGQVDKASLCGSMTSNSSAETDSLLGGITVVGCSAEGVTGAATSPSTNGASPVMDKPPEMEAENSEVDENVPTAEEATEATEGNAGSAEDTVDISQTGVYTEHVFTDPLGVQIPEDLSPVYQSSNDSDAYKDQISVLPNEQDLVREEAQKMSSLLPTMWLGAQNGCLYVHSSVAQWRKCLHSIKLKDSILSIVHVKGIVLVALADGTLAIFHRGVDGQWDLSNYHLLDLGRPHHSIRCMTVVHDKVWCGYRNKIYVVQPKAMKIEKSFDAHPRKESQVRQLAWVGDGVWVSIRLDSTLRLYHAHTYQHLQDVDIEPYVSKMLGTGKLGFSFVRITALMVSCNRLWVGTGNGVIISIPLTETNKTSGVPGNRPGSVIRVYGDENSDKVTPGTFIPYCSMAHAQLCFHGHRDAVKFFVAVPGQVISPQSSSSGTDLTGDKAGPSAQEPGSQTPLKSMLVISGGEGYIDFRMGDEGGESELLGEDLPLEPSVTKAERSHLIVWQVMYGNE

SEQ ID NO: 83095 - protein, 1177 aa, Homo sapiens
  Payload ID: 16536
  Gene Symbol: SPAG9
  Gene Name: sperm associated antigen 9
  Uniprot ID: O60271
  ENSP ID: ENSP00000423165
MSPGCMLLFVFGFVGGAVVINSAILVSLSVLLLVHFSISTGVPALTQNLPRILRKERPISLGIFPLPAGDGLLTPDAQKGGETPGSEQWKFQELSQPRSHTSLKDELSDVSQGGSKATTPASTANSDVATIPTDTPLKEENEGFVKVTDAPNKSEISKHIEVQVAQETRNVSTGSAENEEKSEVQAIIESTPELDMDKDLSGYKGSSTPTKGIENKAFDRNTESLFEELSSAGSGLIGDVDEGADLLGMGREVENLILENTQLLETKNALNIVKNDLIAKVDELTCEKDVLQGELEAVKQAKLKLEEKNRELEEELRKARAEAEDARQKAKDDDDSDIPTAQRKRFTRVEMARVLMERNQYKERLMELQEAVRWTEMIRASRENPAMQEKKRSSIWQFFSRLFSSSSNTTKKPEPPVNLKYNAPTSHVTPSVKKRSSTLSQLPGDKSKAFDFLSEETEASLASRREQKREQYRQVKAHVQKEDGRVQAFGWSLPQKYKQVTNGQGENKMKNLPVPVYLRPLDEKDTSMKLWCAVGVNLSGGKTRDGGSVVGASVFYKDVAGLDTEGSKQRSASQSSLDKLDQELKEQQKELKNQEELSSLVWICTSTHSATKVLIIDAVQPGNILDSFTVCNSHVLCIASVPGARETDYPAGEDLSESGQVDKASLCGSMTSNSSAETDSLLGGITVVGCSAEGVTGAATSPSTNGASPVMDKPPEMEAENSEVDENVPTAEEATEATEGNAGSAEDTVDISQTGVYTEHVFTDPLGVQIPEDLSPVYQSSNDSDAYKDQISVLPNEQDLVREEAQKMSSLLPTMWLGAQNGCLYVHSSVAQWRKCLHSIKLKDSILSIVHVKGIVLVALADGTLAIFHRGVDGQWDLSNYHLLDLGRPHHSIRCMTVVHDKVWCGYRNKIYVVQPKAMKIEKSFDAHPRKESQVRQLAWVGDGVWVSIRLDSTLRLYHAHTYQHLQDVDIEPYVSKMLGTGKLGFSFVRITALMVSCNRLWVGTGNGVIISIPLTETVILHQGRLLGLRANKTSGVPGNRPGSVIRVYGDENSDKVTPGTFIPYCSMAHAQLCFHGHRDAVKFFVAVPGQVISPQSSSSGTDLTGDKAGPSAQEPGSQTPLKSMLVISGGEGYIDFRMGDEGGESELLGEDLPLEPSVTKAERSHLIVWQVMYGNE

SEQ ID NO: 83096 - protein, 152 aa, Homo sapiens
  Payload ID: 16536
  Gene Symbol: SPAG9
  Gene Name: sperm associated antigen 9
  ENSP ID: ENSP00000423346
TSNSSAETDSLLGGITVVGCSAEGVTGAATSPSTNGASPVMDKPPEMEAENSEVDENVPTAEEATEATEGNAGSAEDTVDISQTGVYTEHVFTDPLGVQIPEDLSPVYQSSNDSDAYKDQISVLPNEQDLVREEAQKMSSLLPTMWLGAQNG

SEQ ID NO: 83097 - protein, 156 aa, Homo sapiens
  Payload ID: 16536
  Gene Symbol: SPAG9
  Gene Name: sperm associated antigen 9
  ENSP ID: ENSP00000426061
MSPGCMLLFVFGFVGGAVVINSAILVSLSVLLLVHFSISTGVPALTQNLPRILRKERPISLGIFPLPAGDGLLTPDAQKGGETPGSEQWKFQELSQPRSHTSLKVSNSPEPQKAVEQEDELSDVSQGGSKATTPASTANSDVATIPTDTPLKEENE

SEQ ID NO: 83098 - protein, 1311 aa, Homo sapiens
  Payload ID: 16536
  Gene Symbol: SPAG9
  Gene Name: sperm associated antigen 9
  Uniprot ID: O60271
  ENSP ID: ENSP00000426900
MELEDGVVYQEEPGGSGAVMSERVSGLAGSIYREFERLIGRYDEEVVKELMPLVVAVLENLDSVFAQDQEHQVELELLRDDNEQLITQYEREKALRKHAEEKFIEFEDSQEQEKKDLQTRVESLESQTRQLELKAKNYADQISRLEEREAELKKEYNALHQRHTEMIHNYMEHLERTKLHQLSGSDQLESTAHSRIRKERPISLGIFPLPAGDGLLTPDAQKGGETPGSEQWKFQELSQPRSHTSLKDELSDVSQGGSKATTPASTANSDVATIPTDTPLKEENEGFVKVTDAPNKSEISKHIEVQVAQETRNVSTGSAENEEKSEVQAIIESTPELDMDKDLSGYKGSSTPTKGIENKAFDRNTESLFEELSSAGSGLIGDVDEGADLLGMGREVENLILENTQLLETKNALNIVKNDLIAKVDELTCEKDVLQGELEAVKQAKLKLEEKNRELEEELRKARAEAEDARQKAKDDDDSDIPTAQRKRFTRVEMARVLMERNQYKERLMELQEAVRWTEMIRASRENPAMQEKKRSSIWQFVPTRFSRLFSSSSNTTKKPEPPVNLKYNAPTSHVTPSVKKRSSTLSQLPGDKSKAFDFLSEETEASLASRREQKREQYRQVKAHVQKEDGRVQAFGWSLPQKYKQVTNGQGENKMKNLPVPVYLRPLDEKDTSMKLWCAVGVNLSGGKTRDGGSVVGASVFYKDVAGLDTEGSKQRSASQSSLDKLDQELKEQQKELKNQEELSSLVWICTSTHSATKVLIIDAVQPGNILDSFTVCNSHVLCIASVPGARETDYPAGEDLSESGQVDKASLCGSMTSNSSAETDSLLGGITVVGCSAEGVTGAATSPSTNGASPVMDKPPEMEAENSEVDENVPTAEEATEATEGNAGSAEDTVDISQTGVYTEHVFTDPLGVQIPEDLSPVYQSSNDSDAYKDQISVLPNEQDLVREEAQKMSSLLPTMWLGAQNGCLYVHSSVAQWRKCLHSIKLKDSILSIVHVKGIVLVALADGTLAIFHRGVDGQWDLSNYHLLDLGRPHHSIRCMTVVHDKVWCGYRNKIYVVQPKAMKIEKSFDAHPRKESQVRQLAWVGDGVWVSIRLDSTLRLYHAHTYQHLQDVDIEPYVSKMLGTGKLGFSFVRITALMVSCNRLWVGTGNGVIISIPLTETNKTSGVPGNRPGSVIRVYGDENSDKVTPGTFIPYCSMAHAQLCFHGHRDAVKFFVAVPGQVISPQSSSSGTDLTGDKAGPSAQEPGSQTPLKSMLVISGGEGYIDFRMGDEGGESELLGEDLPLEPSVTKAERSHLIVWQVMYGNE

SEQ ID NO: 83099 - protein, 174 aa, Homo sapiens
  Payload ID: 16536
  Gene Symbol: SPAG9
  Gene Name: sperm associated antigen 9
  ENSP ID: ENSP00000429343
GSAENEEKSEVQAIIESTPELDMDKDLSGYKGSSTPTKGIENKAFDRNTESLFEELSSAGSGLIGDVDEGADLLGEYSDHNFFGMGREVENLILENTQLLETKNALNIVKNDLIAKVDELTCEKDVLQGELEAVKQAKLKLEEKNRELEEELRKARAEAEDARQKAKDDDDSDI

SEQ ID NO: 83100 - protein, 250 aa, Homo sapiens
  Payload ID: 16536
  Gene Symbol: SPAG9
  Gene Name: sperm associated antigen 9
  ENSP ID: ENSP00000430205
  MOD_RES (1)..(1): Any amino acid
XEQQKELKNQEELSSLVWICTSTHSATKVLIIDAVQPGNILDSFTVCNSHVLCIASVPGARETDYPAGEDLSESGQVDKASLCGSMTSNSSAETDSLLGGITVVGCSAEGVTGAATSPSTNGASPVMDKPPAEEATEATEGNAGSAEDTVDISQTGVYTEHVFTDPLGVQIPEDLSPVYQSSNDSDAYKDQISVLPNEQDLVREEAQKMSSLLPTMWLGAQNGCLYVHSSVAQWRKCLHSIKLKDSILSI

SEQ ID NO: 83101 - protein, 1312 aa, Homo sapiens [sequence omitted]

SEQ ID NO: 83102 - protein, 151 aa, Homo sapiens
  Payload ID: 16537
  Gene Symbol: SPA17
  Gene Name: sperm autoantigenic protein 17
  Uniprot ID: Q15506
  ENSP ID: ENSP00000227135
MSIPFSNTHYRIPQGFGNLLEGLTREILREQPDNIPAFAAAYFESLLEKREKTNFDPAEWGSKVEDRFYNNHAFEEQEPPEKSDPKQEESQISGKEEETSVTILDSSEEDKEKEEVAAVKIQAAFRGHIAREEAKKMKTNSLQNEEKEENK

SEQ ID NO: 83103 - protein, 151 aa, Homo sapiens; identical to SEQ ID NO: 83102
  Payload ID: 16537
  Gene Symbol: SPA17
  Gene Name: sperm autoantigenic protein 17
  Uniprot ID: Q15506
  ENSP ID: ENSP00000432305

SEQ ID NO: 83104 - protein, 350 aa, Homo sapiens
  Payload ID: 16538
  Gene Symbol: SPESP1
  Gene Name: sperm equatorial segment protein 1
  Uniprot ID: Q6UW49
  ENSP ID: ENSP00000312284
MKPLVLLVALLLWPSSVPAYPSITVTPDEEQNLNHYIQVLENLVRSVPSGEPGREKKSNSPKHVYSIASKGSKFKELVTHGDASTENDVLTNPISEETTTFPTGGFTPEIGKKKHTESTPFWSIKPNNVSIVLHAEEPYIENEEPEPEPEPAAKQTEAPRMLPVVTESSTSPYVTSYKSPVTTLDKSTGIGISTESEDVPQLSGETAIEKPEEFGKHPESWNNDDILKKILDINSQVQQALLSDTSNPAYREDIEASKDHLKRSLALAAAAEHKLKTMYKSQLLPVGRTSNKIDDIETVINMLCNSRSKLYEYLDIKCVPPEMREKAATVFNTLKNMCRSRRVTALLKVY

SEQ ID NO: 83105 - protein, 236 aa, Homo sapiens
  Payload ID: 16539
  Gene Symbol: SPEF1
  Gene Name: sperm flagellar 1
  Uniprot ID: Q9Y4P9
  ENSP ID: ENSP00000369080
MASSVDEEALHQLYLWVDNIPLSRPKRNLSRDFSDGVLVAEVIKFYFPKMVEMHNYVPANSLQQKLSNWGHLNRKVLKRLNFSVPDDVMRKIAQCAPGVVELVLIPLRQRLEERQRRRKQGAGSLQELAPQDGSGYMDVGVSQKARGEGVPDPQGGGQLSWDRPPAPRPPAYNRALQGDPSFVLQIAEKEQELLASQETVQVLQMKVRRLEHLLQLKNVRIEDLSRRLQQAERKQR

SEQ ID NO: 83106 - protein, 514 aa, Homo sapiens
  Payload ID: 16540
  Gene Symbol: SPEF2
  Gene Name: sperm flagellar 2
  Uniprot ID: Q9C093
  ENSP ID: ENSP00000282469
MSEILCQWLNKELKVSRTVSPKSFAKAFSSGYLLGEVLHKFELQDDFSEFLDSRVSSAKLNNFSRLEPTLNLLGVQFDQNVAHGIITEKPGVATKLLYQLYIALQKKKKSGLTGVEMQTMQRLTNLRLQNMKSDTFQERLRHMIPRQTDFNLMRITYRFQEKYKHVKEDLAHLHFEKLERFQKLKEEQRCFDIEKQYLNRRRQNEIMAKIQAAIIQIPKPASNRTLKALEAQKMMKKKKEAEDVADEIKKFEALIKKDLQAKESASKTSLDTAGQTTTDLLNTYSDDEYIKKIQKRLEEDAFAREQREKRRRKLLMDQLIAHEAQEEAYREEQLINRLMRQSQQERRIAVQLMHVRHEKEVLWQNRIFREKQHEERRLKDFQDALDREAALAKQAKIDFEEQFLKEKRFHDQIAVERAQARYEKHYSVCAEILDQIVDLSTKVADYRMLTNNLIPYKLMHDWKELFFNAKPIYEQASVKTLPANPSREQLTELEKRDLLDTNDYEEYKVPTDMK

SEQ ID NO: 83107 - protein, 1822 aa, Homo sapiens
  Payload ID: 16540
  Gene Symbol: SPEF2
  Gene Name: sperm flagellar 2
  Uniprot ID: Q9C093
  ENSP ID: ENSP00000348314
MSEILCQWLNKELKVSRTVSPKSFAKAFSSGYLLGEVLHKFELQDDFSEFLDSRVSSAKLNNFSRLEPTLNLLGVQFDQNVAHGIITEKPGVATKLLYQLYIALQKKKKSGLTGVEMQTMQRLTNLRLQNMKSDTFQERLRHMIPRQTDFNLMRITYRFQEKYKHVKEDLAHLHFEKLERFQKLKEEQRCFDIEKQYLNRRRQNEIMAKIQAAIIQIPKPASNRTLKALEAQKMMKKKKEAEDVADEIKKFEALIKKDLQAKESASKTSLDTAGQTTTDLLNTYSDDEYIKKIQKRLEEDAFAREQREKRRRKLLMDQLIAHEAQEEAYREEQLINRLMRQSQQERRIAVQLMHVRHEKEVLWQNRIFREKQHEERRLKDFQDALDREAALAKQAKIDFEEQFLKEKRFHDQIAVERAQARYEKHYSVCAEILDQIVDLSTKVADYRMLTNNLIPYKLMHDWKELFFNAKPIYEQASVKTLPANPSREQLTELEKRDLLDTNDYEEYKNMVGEWALPEEMVDNLPPSNNCILGHILHRLAEKSLPPRAESTTPELPSFAVKGCLLGKTLSGKTTILRSLQKDFPIQILSIDTLVQEAIQAFHDNEKVSEVLPIQKNDEEDALPVLQEEIKESQDPQHVFSAGPVSDEVLPETEGETMLSANADKTPKAEEVKSSDSFLKLTTRAQLGAKSEQLLKKGKSIPDVLLVDIIVNAINEIPVNQDCILDGFPMTLNQAQLLEEALTGCNRNLTEVERKKAQKSTLAIDPATSKEIPLPSPAFDFVILLDVSDTSSMSRMNDIIAEELSYKTAHEDISQRVAAENQDKDGDQNLRDQIQHRIIGFLDNWPLLEQWFSEPENILIKINAEIDKESLCEKVKEILTTEIAKKKNKVEKKLEEKEAEKKAAASLAELPLPTPPPAPPPEPEKEKEIHQSHVASKTPTAKGKPQSEAPHGKQESLQEGKGKKGETALKRKGSPKGKSSGGKVPVKKSPADSTDTSPVAIVPQPPKPGSEEWVYVNEPVPEEMPLFLVPYWELIENSYINTIKTVLRHLREDQHTVLAYLYEIRTSFQEFLKRPDHKQDFVAQWQADFNSLPDDLWDDEETKAELHQRVNDLRDRLWDICDARKEEAEQERLDIINESWLQDTLGMTMNHFFSLMQAELNRFQDTKRLLQDYYWGMESKIPVEDNKRFTRIPLVQLDSKDNSESQLRIPLVPRISISLETVTPKPKTKSVLKGKMDNSLENVESNFEADEKLVMDTWQQASLAVSHMVAAEIHQRLMEEEKENQPADPKEKSPQMGANKKVKKEPPKKKQEDKKPKGKSPPMAEATPVIVTTEEIAEIKRKNELRVKIKEEHLAALQFEEIATQFRLELIKTKALALLEDLVTKVVDVYKLMEKWLGERYLNEMASTEKLTDVARYHIETSTKIQNELYLSQEDFFINGNIKVFPDPPPSIRPPPVEKEEDGTLTIEQLDSLRDQFLDMAPKGIIGNKAFTDILIDLVTLNLGTNNFPSNWMHLTQPELQELTSLLTVNSEFVDWRKFLLVTSMPWPIPLEEELLETLQKFKAVDKEQLGTITFEQYMQAGLWFTGDEDIKIPENPLEPLPFNRQEHLIEFFFRLFADYEKDPPQLDYTQMLLYFACHPDTVEGVYRALSVAVGTHVFQQVKASIPSAEKTSSTDAGPAEEFPEPEENAAREERKLKDDTEKREQKDEEIPENANNEKMSMETLLKVFKGGSEAQDSNRFASHLKIENIYAEGFIKTFQDLGAKNLEPIEVAVLLKHPFIQDLISNYSDYKFPDIKIILQRSEHVQGSDGERSPSRHTEEKK

SEQ ID NO: 83108 - protein, 1818 aa, Homo sapiens
  Payload ID: 16540
  Gene Symbol: SPEF2
  Gene Name: sperm flagellar 2
  Uniprot ID: Q9C093
  ENSP ID: ENSP00000412125
MSEILCQWLNKELKVSRTVSPKSFAKAFSSGYLLGEVLHKFELQDDFSEFLDSRVSSAKLNNFSRLEPTLNLLGVQFDQNVAHGIITEKPGVATKLLYQLYIALQKKKKSGLTGVEMQTMQRLTNLRLQNMKSDTFQERLRHMIPRQTDFNLMRITYRFQEKYKHVKEDLAHLHFEKLERFQKLKEEQRCFDIEKQYLNRRRQNEIMAKIQAAIIQIPKPASNRTLKALEAQKMMKKKKEAEDVADEIKKFEALIKKDLQAKESASKTSLDTAGQTTTDLLNTYSDDEYIKKIQKRLEEDAFAREQREKRRRKLLMDQLIAHEAQEEAYREEQLINRLMRQSQQERRIAVQLMHVRHEKEVLWQNRIFREKQHEERRLKDFQDALDREAALAKQAKIDFEEQFLKEKRFHDQIAVERAQARYEKHYSVCAEILDQIVDLSTKVADYRMLTNNLIPYKLMHDWKELFFNAKPIYEQASVKTLPANPSREQLTELEKRDLLDTNDYEEYKNMVGEWALPEEMVDNLPPSNNCILGHILHRLAEKSLPPRAESTTPELPSFAVKGCLLGKTLSGKTTILRSLQKDFPIQILSIDTLVQEAIQAFHDNEKVSEVLPIQKNDEEDALPVLQEEIKESQDPQHVFSAGPVSDEVLPETEGANADKTPKAEEVKSSDSFLKLTTRAQLGAKSEQLLKKGKSIPDVLLVDIIVNAINEIPVNQDCILDGFPMTLNQAQLLEEALTGCNRNLTEVERKKAQKSTLAIDPATSKEIPLPSPAFDFVILLDVSDTSSMSRMNDIIAEELSYKTAHEDISQRVAAENQDKDGDQNLRDQIQHRIIGFLDNWPLLEQWFSEPENILIKINAEIDKESLCEKVKEILTTEIAKKKNKVEKKLEEKEAEKKAAASLAELPLPTPPPAPPPEPEKEKEIHQSHVASKTPTAKGKPQSEAPHGKQESLQEGKGKKGETALKRKGSPKGKSSGGKVPVKKSPADSTDTSPVAIVPQPPKPGSEEWVYVNEPVPEEMPLFLVPYWELIENSYINTIKTVLRHLREDQHTVLAYLYEIRTSFQEFLKRPDHKQDFVAQWQADFNSLPDDLWDDEETKAELHQRVNDLRDRLWDICDARKEEAEQERLDIINESWLQDTLGMTMNHFFSLMQAELNRFQDTKRLLQDYYWGMESKIPVEDNKRFTRIPLVQLDSKDNSESQLRIPLVPRISISLETVTPKPKTKSVLKGKMDNSLENVESNFEADEKLVMDTWQQASLAVSHMVAAEIHQRLMEEEKENQPADPKEKSPQMGANKKVKKEPPKKKQEDKKPKGKSPPMAEATPVIVTTEEIAEIKRKNELRVKIKEEHLAALQFEEIATQFRLELIKTKALALLEDLVTKVVDVYKLMEKWLGERYLNEMASTEKLTDVARYHIETSTKIQNELYLSQEDFFINGNIKVFPDPPPSIRPPPVEKEEDGTLTIEQLDSLRDQFLDMAPKGIIGNKAFTDILIDLVTLNLGTNNFPSNWMHLTQPELQELTSLLTVNSEFVDWRKFLLVTSMPWPIPLEEELLETLQKFKAVDKEQLGTITFEQYMQAGLWFTGDEDIKIPENPLEPLPFNRQEHLIEFFFRLFADYEKDPPQLDYTQMLLYFACHPDTVEGVYRALSVAVGTHVFQQVKASIPSAEKTSSTDAGPAEEFPEPEENAAREERKLKDDTEKREQKDEEIPENANNEKMSMETLLKVFKGGSEAQDSNRFASHLKIENIYAEGFIKTFQDLGAKNLEPIEVAVLLKHPFIQDLISNYSDYKFPVHIIYVVEMIVCAKGWAPLPSGKQCARWRN

SEQ ID NO: 83109 - protein, 115 aa, Homo sapiens
  Payload ID: 16540
  Gene Symbol: SPEF2
  Gene Name: sperm flagellar 2
  ENSP ID: ENSP00000421062
QKSTLAIDPATSKEIPLPSPAFDFVILLDVSDTSSMSRMNDIIDQQDPGLSGSLATRVGCNMQFCSARGLWRNLKNIFTEKHTTSKATWATKSCQGWAELKNCPIKLLTKISVNV

SEQ ID NO: 83110 - protein, 943 aa, Homo sapiens
  Payload ID: 16540
  Gene Symbol: SPEF2
  Gene Name: sperm flagellar 2
  ENSP ID: ENSP00000421593
MSEILCQWLNKELKVSRTVSPKSFAKAFSSGYLLGEVLHKFELQDDFSEFLDSRVSSAKLNNFSRLEPTLNLLGVQFDQNVAHGIITEKPGVATKLLYQLYIALQKKKKSGLTGVEMQTMQRLTNLRLQNMKSDTFQERLRHMIPRQTDFNLMRITYRFQEKYKHVKEDLAHLHFEKLERFQKLKEEQRCFDIEKQYLNRRRQNEIMAKIQAAIIQIPKPASNRTLKALEAQKMMKKKKEAEDVADEIKKFEALIKKDLQAKESASKTSLDTAGQTTTDLLNTYSDDEYIKKIQKRLEEDAFAREQREKRRRKLLMDQLIAHEAQEEAYREEQLINRLMRQSQQERRIAVQLMHVRHEKEVLWQNRIFREKQHEERRLKDFQDALDREAALAKQAKIDFEEQFLKEKRFHDQIAVERAQARYEKHYSVCAEILDQIVDLSTKVADYRMLTNNLIPYKLMHDWKELFFNAKPIYEQASVKTLPANPSREQLTELEKRDLLDTNDYEEYKNMVGEWALPEEMVDNLPPSNNCILGHILHRLAEKSLPPRAESTTPELPSFAVKGCLLGKTLSGKTTILRSLQKDFPIQILSIDTLVQEAIQAFHDNEKVSEVLPIQKNDEEDALPVLQEEIKESQDPQHVFSAGPVSDEVLPETEGANADKTPKAEEVKSSDSFLKLTTRAQLGAKSEQLLKKGKSIPDVLLVDIIVNAINEIPVNQDCILDGFPMTLNQAQLLEEALTGCNRNLTEVERKKAQKSTLAIDPATSKEIPLPSPAFDFVILLDVSDTSSMSRMNDIIAEELSYKTAHEDISQRVAAENQDKDGDQNLRDQIQHRIIGFLDNWPLLEQWFSEPENILIKINAEIDKESLCEKVKEILTTEIAKKKNKVEKKLEEKEAEKKAAASLAELPLPTPPPAPPPEPEKEKEIHQSHVASKTPTAKGKPQSGD

SEQ ID NO: 83111 - protein, 388 aa, Homo sapiens
  Payload ID: 16540
  Gene Symbol: SPEF2
  Gene Name: sperm flagellar 2
  ENSP ID: ENSP00000421744
MNLGHVKGIWLQIINTGDKNMVGEWALPEEMVDNLPPSNNCILGHILHRLAEKSLPPRAESTTPELPSFAVKGCLLGKTLSGKTTILRSLQKDFPIQILSIDTLVQEAIQAFHDNEKVSEVLPIQKNDEEDALPVLQEEIKESQDPQHVFSAGPVSDEVLPETEGANADKTPKAEEVKSSDSFLKLTTRAQLGAKSEQLLKKGKSIPDVLLVDIIVNAINEIPVNQDCILDGFPMTLNQAQLLEEALTGCNRNLTEVERKKAQKSTLAIDPATSKEIPLPSPAFDFVILLDVSDTSSMSRMNDIIAEELSYKTAHEDISQRVAAENQDKDGDQNLRDQIQHRIIGFLDNWPLLEQWFSEPENILIKINAEIDKESLCEKVKEILTTEI

SEQ ID NO: 83112 - protein, 120 aa, Homo sapiens
  Payload ID: 16540
  Gene Symbol: SPEF2
  Gene Name: sperm flagellar 2
  ENSP ID: ENSP00000422710
PKPKTKSVLKGKMDNSLENVESNFEADEKLVMDTWQQASLAVSHMVLGLPRCLLFSQHAKPSSSFHEISHSNRKQHQLSKRFCESGRRGPCSTDLTANKISNWALSKSLLGLSAFRLLFL

SEQ ID NO: 83113 - protein, 115 aa, Homo sapiens
  Payload ID: 16540
  Gene Symbol: SPEF2
  Gene Name: sperm flagellar 2
  ENSP ID: ENSP00000423400
  MOD_RES (1)..(1): Any amino acid
XIQNELYLSQEDFFINGNIKVFPDPPPSIRPPPVEKEEDGTLTIEQLDSLRDQFLDMAPKECSENCFQRPSPSTCDAFSNRRQEVASWITGSPPELSQGISCNCSATALSRQRQK

SEQ ID NO: 83114 - protein, 145 aa, Homo sapiens
  Payload ID: 16540
  Gene Symbol: SPEF2
  Gene Name: sperm flagellar 2
  ENSP ID: ENSP00000425448
MSEILCQWLNKELKVSRTVSPKSFAKAFSSGYLLGEVLHKFELQDDFSEFLDSRVSSAKLNNFSRLEPTLNLLGVQFDQNVAHGIITEKPGVATKLLYQLYIALQKKKKSGLTGVEMQTMQRLTNLRLQNMKSDTFQERLGPLIS

SEQ ID NO: 83115 - protein, 240 aa, Homo sapiens
  Payload ID: 16540
  Gene Symbol: SPEF2
  Gene Name: sperm flagellar 2
  ENSP ID: ENSP00000426259
MSEILCQWLNKELKVSRTVSPKSFAKAFSSGYLLGEVLHKFELQDDFSEFLDSRVSSAKLNNFSRLEPTLNLLGVQFDQNVAHGIITEKPGVATKLLYQLYIALQKKKKSGLTGVEMQTMQRLTNLRLQNMKSDTFQEQYLNRRRQNEIMAKIQAAIIQIPKPASNRTLKALEAQKMMKKKKEAEDVADEIKKFEALIKKDLQAKESASKTSLDTAGQTTTDLLNTYSDDEYIKKIQKRL

SEQ ID NO: 83116 - protein, 151 aa, Homo sapiens
  Payload ID: 16540
  Gene Symbol: SPEF2
  Gene Name: sperm flagellar 2
  ENSP ID: ENSP00000426624
  MOD_RES (1)..(1): Any amino acid
XEHLAALQFEEIATQFRLELIKTKALALLEDLVTKVVDVYKLMEKWLGERYLNEMASTEKLTDVARYHIETSTKIQNELYLSQEDFFINGNIKVFPDPPPSIRPPPVEKEEDGTLTIEQLDSLRDQFLDMAPKGLNFSMHIISARLMPRPH

SEQ ID NO: 83117 - protein, 116 aa, Homo sapiens
  Payload ID: 16541
  Gene Symbol: SMCP
  Gene Name: sperm mitochondria-associated cysteine-rich protein
  Uniprot ID: P49901
  ENSP ID: ENSP00000357754
MCDQTKHSKCCPAKGNQCCPPQQNQCCQSKGNQCCPPKQNQCCQPKGSQCCPPKHNHCCQPKPPCCIQARCCGLETKPEVSPLNMESEPNSPQTQDKGCQTQQQPHSPQNESRPSK

SEQ ID NO: 83118 - protein, 97 aa, Homo sapiens; identical to SEQ ID NO: 82706
  Payload ID: 16542
  Gene Symbol: SPANXA1
  Gene Name: sperm protein associated with the nucleus, X-linked, family member A1
  Uniprot ID: Q9NS26
  ENSP ID: ENSP00000359550

SEQ ID NO: 83119 - protein, 97 aa, Homo sapiens; identical to SEQ ID NO: 82706
  Payload ID: 16542
  Gene Symbol: SPANXA1
  Gene Name: sperm protein associated with the nucleus, X-linked, family member A1
  Uniprot ID: Q9NS26
  ENSP ID: ENSP00000484283

SEQ ID NO: 83120 - protein, 1256 aa, Homo sapiens
  Payload ID: 16543
  Gene Symbol: SSFA2
  Gene Name: sperm specific antigen 2
  Uniprot ID: P28290
  ENSP ID: ENSP00000314669
MDRPLSSSAEAEEELEWQVASRRRKAWAKCRSSWQASETEDLSTEATTQDEEEDEEEDLPGAQLPAAGGRGNVPNEKIAIWLKDCRTPLGASLDEQSSSTLKGVLVRNGGSFEDDLSLGAEANHLHESDAQIENCNNILAKERRLQFHQKGRSMNSTGSGKSSGTVSSVSELLELYEEDPEEILYNLGFGRDEPDIASKIPSRFFNSSSFAKGIDIKVFLSAQMQRMEVENPNYALTSRFRQIEVLTTVANAFSSLYSQVSGTPLQRIGSMSSVTSNKETDPPPPLTRSNTANRLMKTLSKLNLCVDKTEKGESSSPSPSAEKGKILNVSVIEESGNKNDQKSQKIMKKKESSSMLATVKEEVSGSSAAVTENADSDRISDEANSNFNQGTENEQSKETQSHESKLGEESGIVESKLDSDFNISSHSELENSSELKSVHISTPEKEPCAPLTIPSIRNIMTQQKDSFEMEEVQSTEGEAPHVPATYQLGLTKSKRDHLLRTASQHSDSSGFAEDSTDCLSLNHLQVQESLQAMGSSADSCDSETTVTSLGEDLATPTAQDQPYFNESEEESLVPLQKGLEKAAAVADKRKSGSQDFPQCNTIENTGTKQSTCSPGDHIIEITEVEEDLFPAETVELLREASAESDVGKSSESEFTQYTTHHILKSLASIEAKCSDMSSENTTGPPSSMDRVNTALQRAQMKVCSLSNQRMGRSLLKSKDLLKQRYLFAKAGYPLRRSQSLPTTLLSPVRVVSSVNVRLSPGKETRCSPPSFTYKYTPEEEQELEKRVMEHDGQSLVKSTIFISPSSVKKEEAPQSEAPRVEECHHGRTPTCSRLAPPPMSQSTCSLHSIHSEWQERPLCEHTRTLSTHSVPNISGATCSAFASPFGCPYSHRHATYPYRVCSVNPPSAIEMQLRRVLHDIRNSLQNLSQYPMMRGPDPAAAPYSTQKSSVLPLYENTFQELQVMRRSLNLFRTQMMDLELAMLRQQTMVYHHMTEEERFEVDQLQGLRNSVRMELQDLELQLEERLLGLEEQLRAVRMPSPFRSSALMGMCGSRSADNLSCPSPLNVMEPVTELMQEQSYLKSELGLGLGEMGFEIPPGESSESVFSQATSESSSVCSGPSHANRRTGVPSTASVGKSKTPLVARKKVFRASVALTPTAPSRTGSVQTPPDLESSEEVDAAEGAPEVVGPKSEVEEGHGKLPSMPAAEEMHKNVEQDELQQVIREVGMDPISCVILELSMICTGGGVICALEDTCC

SEQ ID NO: 83121 - protein, 768 aa, Homo sapiens
  Payload ID: 16543
  Gene Symbol: SSFA2
  Gene Name: sperm specific antigen 2
  ENSP ID: ENSP00000386916
MTTEDHLLRTASQHSDSSGFAEDSTDCLSLNHLQVQESLQAMGSSADSCDSETTVTSLGEDLATPTAQDQPYFNESEEESLVPLQKGLEKAAAVADKRKSGSQDFPQCNTIENTGTKQSTCSPGDHIIEITEVEEDLFPAETVELLREASAESDVGKSSESEFTQYTTHHILKSLASIEAKCSDMSSENTTGPPSSMDRVNTALQRAQMKVCSLSNQRMGRSLLKSKDLLKQRYLFAKAGYPLRRSQSLPTTLLSPVRVVSSVNVRLSPGKETRCSPPSFTYKYTPEEEQELEKRVMEHDGQSLVKSTIFISPSSVKKEEAPQSEAPRVEECHHGRTPTCSRLAPPPMSQSTCSLHSIHSEWQERPLCEHTRTLSTHSVPNISGATCSAFASPFGCPYSHRHATYPYRVCSVNPPSAIEMQLRRVLHDIRNSLQNLSQYPMMRGPDPAAAPYSTQKSSVLPLYENTFQELQVMRRSLNLFRTQMMDLELAMLRQQTMVYHHMTEEERFEVDQLQGLRNSVRMELQDLELQLEERLLGLEEQLRAVRMPSPFRSSALMGMCGSRSADNLSCPSPLNVMEPVTELMQEQSYLKSELGLGLGEMGFEIPPGESSESVFSQATSESSSVCSGPSHANRRTGVPSTASVGKSKTPLVARKKVFRASVALTPTAPSRTGSVQTPPDLESSEEVDAAEGAPEVVGPKSEVEEGHGKLPSMPAAEEMHKNVEQDELQQVIREIKESIVGEIRREIVSGLLAAVSSSKASNSKQDYH

SEQ ID NO: 83122 - protein, 1237 aa, Homo sapiens
  Payload ID: 16543
  Gene Symbol: SSFA2
  Gene Name: sperm specific antigen 2
  ENSP ID: ENSP00000387319
MDRPLSSSAEAEEELEWQVASRRRKAWAKCRSSWQASETEDLSTEATTQDEEEDEEEDLPGAQLPAAGGRGNVPNEKIAIWLKDCRTPLGASLDEQSSSTLKGVLVRNGGSFEDDLSLGAEANHLHESDAQIENCNNILAKERRLQFHQKGRSMNSTGSGKSSGTVSSVSELLELYEEDPEEILYNLGFGRDEPDIASKIPSRFFNSSSFAKGIDIKVFLSAQMQRMEVENPNYALTSRFRQIEVLTTVANAFSSLYSQVSGTPLQRIGSMSSVTSNKETDPPPPLTRSNTANRLMKTLSKLNLCVDKTEKGESSSPSPSAEKGKILNVSVIEESGNKNDQKSQKIMKKKESSSMLATVKEEVSGSSAAVTENADSDRISDEANSNFNQGTENEQSKETQSHESKLGEESGIVESKLDSDFNISSHSELENSSELKSVHISTPEKEPCAPLTIPSIRNIMTQQKDSFEMEEVQSTEGEAPHVPATYQLGLTKSKRDHLLRTASQHSDSSGFAEDSTDCLSLNHLQVQESLQAMGSSADSCDSETTVTSLGEDLATPTAQDQPYFNESEEESLVPLQKGLEKAAAVADKRKSGSQDFPQCNTIENTGTKQSTCSPGDHIIEITEVEEDLFPAETVELLREASAESDVGKSSESEFTQYTTHHILKSLASIEAKCSDMSSENTTGPPSSMDRVNTALQRAQMKVCSLSNQRMGRSLLKSKDLLKQRYLFAKAGYPLRRSQSLPTTLLSPVRVVSSVNVRLSPGKETRCSPPSFTYKYTPEEEQELEKRVMEHDGQSLVKSTIFISPSSVKKEEAPQSEAPRVEECHHGRTPTCSRLAPPPMSQSTCSLHSIHSEWQERPLCEHTRTLSTHSVPNISGATCSAFASPFGCPYSHRHATYPYRVCSVNPPSAIEMQLRRVLHDIRNSLQNLSQYPMMRGPDPAAAPYSTQKSSVLPLYENTFQELQVMRRSLNLFRTQMMDLELAMLRQQTMVYHHMTEEERFEVDQLQGLRNSVRMELQDLELQLEERLLGLEEQLRAVRMPSPFRSSALMVTELMQEQSYLKSELGLGLGEMGFEIPPGESSESVFSQATSESSSVCSGPSHANRRTGVPSTASVGKSKTPLVARKKVFRASVALTPTAPSRTGSVQTPPDLESSEEVDAAEGAPEVVGPKSEVEEGHGKLPSMPAAEEMHKNVEQDELQQVIREIKESIVGEIRREIVSGLLAAVSSSKASNSKQDYH

SEQ ID NO: 83123 - protein, 201 aa, Homo sapiens
  Payload ID: 16543
  Gene Symbol: SSFA2
  Gene Name: sperm specific antigen 2
  ENSP ID: ENSP00000387420
GSRSADNLSCPSPLNVTELMQEQSYLKSELGLGLGEMGFEIPPGESSESVFSQATSESSSVCSGPSHANRRTGVPSTASVGKSKTPLVARKKVFRASVALTPTAPSRTGSVQTPPDLESSEEVDAAEGAPEVVGPKSEVEEGHGKLPSMPAAEEMHKNVEQDELQQVIREVGMDPISCVILELSMICTGGGVICALEDTCC

SEQ ID NO: 83124 - protein, 1259 aa, Homo sapiens
  Payload ID: 16543
  Gene Symbol: SSFA2
  Gene Name: sperm specific antigen 2
  Uniprot ID: P28290
  ENSP ID: ENSP00000388731
MDRPLSSSAEAEEELEWQVASRRRKAWAKCRSSWQASETEDLSTEATTQDEEEDEEEDLPGAQLPAAGGRGNVPNEKIAIWLKDCRTPLGASLDEQSSSTLKGVLVRNGGSFEDDLSLGAEANHLHESDAQIENCNNILAKERRLQFHQKGRSMNSTGSGKSSGTVSSVSELLELYEEDPEEILYNLGFGRDEPDIASKIPSRFFNSSSFAKGIDIKVFLSAQMQRMEVENPNYALTSRFRQIEVLTTVANAFSSLYSQVSGTPLQRIGSMSSVTSNKETDPPPPLTRSNTANRLMKTLSKLNLCVDKTEKGESSSPSPSAEKGKILNVSVIEESGNKNDQKSQKIMKKKESSSMLATVKEEVSGSSAAVTENADSDRISDEANSNFNQGTENEQSKETQSHESKLGEESGIVESKLDSDFNISSHSELENSSELKSVHISTPEKEPCAPLTIPSIRNIMTQQKDSFEMEEVQSTEGEAPHVPATYQLGLTKSKRDHLLRTASQHSDSSGFAEDSTDCLSLNHLQVQESLQAMGSSADSCDSETTVTSLGEDLATPTAQDQPYFNESEEESLVPLQKGLEKAAAVADKRKSGSQDFPQCNTIENTGTKQSTCSPGDHIIEITEVEEDLFPAETVELLREASAESDVGKSSESEFTQYTTHHILKSLASIEAKCSDMSSENTTGPPSSMDRVNTALQRAQMKVCSLSNQRMGRSLLKSKDLLKQRYLFAKAGYPLRRSQSLPTTLLSPVRVVSSVNVRLSPGKETRCSPPSFTYKYTPEEEQELEKRVMEHDGQSLVKSTIFISPSSVKKEEAPQSEAPRVEECHHGRTPTCSRLAPPPMSQSTCSLHSIHSEWQERPLCEHTRTLSTHSVPNISGATCSAFASPFGCPYSHRHATYPYRVCSVNPPSAIEMQLRRVLHDIRNSLQNLSQYPMMRGPDPAAAPYSTQKSSVLPLYENTFQELQVMRRSLNLFRTQMMDLELAMLRQQTMVYHHMTEEERFEVDQLQGLRNSVRMELQDLELQLEERLLGLEEQLRAVRMPSPFRSSALMGMCGSRSADNLSCPSPLNVMEPVTELMQEQSYLKSELGLGLGEMGFEIPPGESSESVFSQATSESSSVCSGPSHANRRTGVPSTASVGKSKTPLVARKKVFRASVALTPTAPSRTGSVQTPPDLESSEEVDAAEGAPEVVGPKSEVEEGHGKLPSMPAAEEMHKNVEQDELQQVIREIKESIVGEIRREIVSGLLAAVSSSKASNSKQDYH

SEQ ID NO: 83125 - protein, 46 aa, Homo sapiens
  Payload ID: 16543
  Gene Symbol: SSFA2
  Gene Name: sperm specific antigen 2
  ENSP ID: ENSP00000392049
MEEVLKMICHWELKPTTSMKVMLKLKTAIISWPKREDYSFIRKGEV

SEQ ID NO: 83126 - protein, 46 aa, Homo sapiens; identical to SEQ ID NO: 83125
  Payload ID: 16543
  Gene Symbol: SSFA2
  Gene Name: sperm specific antigen 2
  ENSP ID: ENSP00000403754

SEQ ID NO: 83127 - protein, 46 aa, Homo sapiens; identical to SEQ ID NO: 83125
  Payload ID: 16543
  Gene Symbol: SSFA2
  Gene Name: sperm specific antigen 2
  ENSP ID: ENSP00000415625

SEQ ID NO: 83128 - protein, 448 aa, Homo sapiens
  Payload ID: 16544
  Gene Symbol: SPERT
  Gene Name: spermatid associated
  Uniprot ID: Q8NA61
  ENSP ID: ENSP00000309189
MSPLECSECFGDQLLHRTYTWQLTLHSRPNYTRKRDTRSESLEIPISVVLPQRGTAEPFPRLHNLYSTPRCAQQAALPRLSRRMASQHSYPLNRFSSVPLDPMERPMSQADLELDYNPPRVQLSDEMFVFQDGRWVNENCRLQSPYFSPSASFHHKLHHKRLAKECMLQEENKSLREENKALREENRMLSKENKILQVFWEEHKASLGREESRAPSPLLHKDSASLEVVKKDHVALQVPRGKEDSTLQLLREENRALQQLLEQKQAYWAQAEDTAAPAEESKPAPSPHEEPCSPGLLQDQGSGLSSRFEEPKGPPARQEDSKELRALRKMVSNMSGPSGEEEAKVGPGLPDGCQPLQLLREMRQALQALLKENRLLQEENRTLQVLRAEHRGFQEENKALWENNKLKLQQKLVIDTVTEVTARMEMLIEELYAFMPARSQDPKKPSRV

SEQ ID NO: 83129 - protein, 412 aa, Homo sapiens
  Payload ID: 16544
  Gene Symbol: SPERT
  Gene Name: spermatid associated
  Uniprot ID: Q8NA61
  ENSP ID: ENSP00000368249
MQPEGLKCRMEESNAERGTAEPFPRLHNLYSTPRCAQQAALPRLSRRMASQHSYPLNRFSSVPLDPMERPMSQADLELDYNPPRVQLSDEMFVFQDGRWVNENCRLQSPYFSPSASFHHKLHHKRLAKECMLQEENKSLREENKALREENRMLSKENKILQVFWEEHKASLGREESRAPSPLLHKDSASLEVVKKDHVALQVPRGKEDSTLQLLREENRALQQLLEQKQAYWAQAEDTAAPAEESKPAPSPHEEPCSPGLLQDQGSGLSSRFEEPKGPPARQEDSKELRALRKMVSNMSGPSGEEEAKVGPGLPDGCQPLQLLREMRQALQALLKENRLLQEENRTLQVLRAEHRGFQEENKALWENNKLKLQQKLVIDTVTEVTARMEMLIEELYAFMPARSQDPKKPSRV

SEQ ID NO: 83130 - protein, 160 aa, Homo sapiens
  Payload ID: 16544
  Gene Symbol: SPERT
  Gene Name: spermatid associated
  ENSP ID: ENSP00000435230
MSPLECSECFGDQLLHRTYTWQLTLRGTAEPFPRLHNLYSTPRCAQQAALPRLSRRMASQHSYPLNRFSSVPLDPMERPMSQADLELDYNPPRVQLSDEMFVFQDGRWVNENCRLQSPYFSPSASFHHKLHHKRLAKECMLQEENKSLREENKALREENR

SEQ ID NO: 83131 - protein, 412 aa, Homo sapiens; identical to SEQ ID NO: 83129
  Payload ID: 16544
  Gene Symbol: SPERT
  Gene Name: spermatid associated
  Uniprot ID: Q8NA61
  ENSP ID: ENSP00000480148

SEQ ID NO: 83132 - protein, 309 aa, Homo sapiens
  Payload ID: 16545
  Gene Symbol: SPEM1
  Gene Name: spermatid maturation 1
  Uniprot ID: Q8N4L4
  ENSP ID: ENSP00000315554
MAMVERPRPEWASYHNCNSNSCQDLGNSVLLLLGLIICINISINIVTLLWSRFRGVLYQVFHDTICEKEAPKSSLLRKQTQPPKKQSSPAVHLRCTMDPVMMTVSPPPAHRHRRRGSPTRCAHCPVAWAPDTDDEKPHQYPAICSYHWDVPEDWEGFQHTQGTWVPWSQDAPESPPQTIRFQPTVEERPLKTGIWSELGLRAYVYPVNPPPPSPEAPSHKNGGEGAVPEAEAAQYQPVPAPTLGPAVIPEFSRHRSSGRIVYDARDMRRRLRELTREVEALSGCYPLASGSSTAEETSKNWVYRSLTGR

SEQ ID NO: 83133 - protein, 672 aa, Homo sapiens
  Payload ID: 16546
  Gene Symbol: STRBP
  Gene Name: spermatid perinuclear RNA binding protein
  Uniprot ID: Q96SI9
  ENSP ID: ENSP00000321347
MRSIRSFANDDRHVMVKHSTIYPSPEELEAVQNMVSTVECALKHVSDWLDETNKGTKTEGETEVKKDEAGENYSKDQGGRTLCGVMRIGLVAKGLLIKDDMDLELVLMCKDKPTETLLNTVKDNLPIQIQKLTEEKYQVEQCVNEASIIIRNTKEPTLTLKVILTSPLIRDELEKKDGENVSMKDPPDLLDRQKCLNALASLRHAKWFQARANGLKSCVIVLRILRDLCNRVPTWAPLKGWPLELICEKSIGTCNRPLGAGEALRRVMECLASGILLPGGPGLHDPCERDPTDALSYMTIQQKEDITHSAQHALRLSAFGQIYKVLEMDPLPSSKPFQKYSWSVTDKEGAGSSALKRPFEDGLGDDKDPNKKMKRNLRKILDSKAIDLMNALMRLNQIRPGLQYKLLSQSGPVHAPVFTMSVDVDGTTYEASGPSKKTAKLHVAVKVLQAMGYPTGFDADIECMSSDEKSDNESKNETVSSNSSNNTGNSTTETSSTLEVRTQGPILTASGKNPVMELNEKRRGLKYELISETGGSHDKRFVMEVEVDGQKFRGAGPNKKVAKASAALAALEKLFSGPNAANNKKKKIIPQAKGVVNTAVSAAVQAVRGRGRGTLTRGAFVGATAAPGYIAPGYGTPYGYSTAAPAYGLPKRMVLLPVMKFPTYPVPHYSFF

SEQ ID NO: 83134 - protein, 658 aa, Homo sapiens
  Payload ID: 16546
  Gene Symbol: STRBP
  Gene Name: spermatid perinuclear RNA binding protein
  Uniprot ID: Q96SI9
  ENSP ID: ENSP00000354271
MVKHSTIYPSPEELEAVQNMVSTVECALKHVSDWLDETNKGTKTEGETEVKKDEAGENYSKDQGGRTLCGVMRIGLVAKGLLIKDDMDLELVLMCKDKPTETLLNTVKDNLPIQIQKLTEEKYQVEQCVNEASIIIRNTKEPTLTLKVILTSPLIRDELEKKDGENVSMKDPPDLLDRQKCLNALASLRHAKWFQARANGLKSCVIVLRILRDLCNRVPTWAPLKGWPLELICEKSIGTCNRPLGAGEALRRVMECLASGILLPGGPGLHDPCERDPTDALSYMTIQQKEDITHSAQHALRLSAFGQIYKVLEMDPLPSSKPFQKYSWSVTDKEGAGSSALKRPFEDGLGDDKDPNKKMKRNLRKILDSKAIDLMNALMRLNQIRPGLQYKLLSQSGPVHAPVFTMSVDVDGTTYEASGPSKKTAKLHVAVKVLQAMGYPTGFDADIECMSSDEKSDNESKNETVSSNSSNNTGNSTTETSSTLEVRTQGPILTASGKNPVMELNEKRRGLKYELISETGGSHDKRFVMEVEVDGQKFRGAGPNKKVAKASAALAALEKLFSGPNAANNKKKKIIPQAKGVVNTAVSAAVQAVRGRGRGTLTRGAFVGATAAPGYIAPGYGTPYGYSTAAPAYGLPKRMVLLPVMKFPTYPVPHYSFF

SEQ ID NO: 83135 - protein, 94 aa, Homo sapiens
  Payload ID: 16546
  Gene Symbol: STRBP
  Gene Name: spermatid perinuclear RNA binding protein
  ENSP ID: ENSP00000384292
MRSIRSFANDDRHVMVKHSTIYPSPEELEAVQNMVSTVECALKHVSDWLDETNKGTKTEGETEVKKDEAGENYSKWSDIVWCNEDWPGCKRLAD

SEQ ID NO: 83136 - protein, 672 aa, Homo sapiens; identical to SEQ ID NO: 83133
  Payload ID: 16546
  Gene Symbol: STRBP
  Gene Name: spermatid perinuclear RNA binding protein
  Uniprot ID: Q96SI9
  ENSP ID: ENSP00000415968

SEQ ID NO: 83137 - protein, 89 aa, Homo sapiens
  Payload ID: 16546
  Gene Symbol: STRBP
  Gene Name: spermatid perinuclear RNA binding protein
  ENSP ID: ENSP00000431190
KVAKASAALAALEKLFSGPNAANNKKKKIIPQAKGVVNTAVSAAVQAVRGRGRGTLTRGAFVGATAAPGYIAPGYGTPYGYSTAAPAYG

SEQ ID NO: 83138 - protein, 74 aa, Homo sapiens
  Payload ID: 16546
  Gene Symbol: STRBP
  Gene Name: spermatid perinuclear RNA binding protein
  ENSP ID: ENSP00000431531
MRSIRSFANDDRHVMVKHSTIYPSPEELEAVQNMVSTVECALKHVSDWLDETNKGTKTEGETEVKKDEAGENYS

SEQ ID NO: 83139 - protein, 57 aa, Homo sapiens
  Payload ID: 16546
  Gene Symbol: STRBP
  Gene Name: spermatid perinuclear RNA binding protein
  ENSP ID: ENSP00000432626
AKGVVNTAVSAAVQAVRGRGRGTLTRGAFVGATAAPGYIAPGYGTPYGYSTAAPAYG

SEQ ID NO: 83140 - protein, 84 aa, Homo sapiens
  Payload ID: 16546
  Gene Symbol: STRBP
  Gene Name: spermatid perinuclear RNA binding protein
  ENSP ID: ENSP00000433106
  MOD_RES (1)..(1): Any amino acid
XKGVVNTAVSAAVQAVRGRGRGTLTRGAFVGATAAPGYIAPGYGTPYGYSTAAPAYEATLKEYGSHHLGGKKPMEIGTWGTQES

SEQ ID NO: 83141 - protein, 591 aa, Homo sapiens
  Payload ID: 16547
  Gene Symbol: SPATC1
  Gene Name: spermatogenesis and centriole associated 1
  Uniprot ID: Q76KD6
  ENSP ID: ENSP00000366690
MSLLTNYEGLRHQIERLVRENEELKKLVRLIRENHELKSAIKTQAGGLGISGFTSGLGEATAGLSSRQNNGVFLPPSPAVANERVLEEVGIMALAPLAEMLTSLQPSATPGSLMSPLTGTLSTLLSGPAPTSQSSPLTSFLTSPIAGPLTGTLASSLGLPSTGTLTPSSLVAGPVAMSQSSPLIAPVMGTVAVSLSSPLLSSTATPPGVSQNLLANPMSNLVLPEAPRLRLAEPLRGGPTGPQSPACVVPTATTKVPLSTEPPQSTQDPEPLSMAFAGAPLQTSTPIGAMGTPAPKTAFSFNTSDTQAQPSAAQEQVVPASVPTSPTTSPTVTVLASAPALAPQVATSYTPSSTTHIAQGAPHPPSRMHNSPTQNLPVPHCPPHNAHSPPRTSSSPASVNDSRGPRTTEPSTKSMMEVERKLAHRKTSKFPENPRESKQLAWERLVGEIAFQLDRRILSSIFPERVRLYGFTVSNIPEKIIQASLNPSDHKLDEKLCQRLTQRYVSVMNRLQSLGYNGRVHPALTEQLVNAYGILRERPELAASEGGPYTVDFLQRVVVETVHPGMLADALLLLSCLSQLAHDDGKPMFIW

SEQ ID NO: 83142 - protein, 441 aa, Homo sapiens
  Payload ID: 16547
  Gene Symbol: SPATC1
  Gene Name: spermatogenesis and centriole associated 1
  Uniprot ID: Q76KD6
  ENSP ID: ENSP00000387613
MSLLTNYEGLRHQIERLVRENEELKKLVRLIRENHELKSAIKTQAGGLGISGFTSGLGEATAGLSSRQNNGVFLPPSPAVANERVLEEVGIMALAPLAEMLTSLQPSATPGSLMSPLTGTLSTLLSGPAPTSQSSPLTSFLTSPIAGPLTGTLASSLGLPSTGTLTPSSLVAGPVAMSQSSPLIAPVMGTVAVSLSSPLLSSTATPPGVSQNLLANPMSNLVLPEAPRLRLAEPLRGGPTGPQSPACVVPTATTKVPLSTEPPQSTQDPEPLSMAFAGAPLQTSTPIGAMGTPAPKTAFSFNTSDTQAQPSAAQEQVVPASVPTSPTTSPTVTVLASAPALAPQVATSYTPSSTTHIAQGAPHPPSRMHNSPTQNLPVPHCPPHNAHSPPRTSSSPASVNDSRGPRTTEPSTKSMMEVERKLAHRKTSKFPENPRGFPEPQ

SEQ ID NO: 83143 - protein, 340 aa, Homo sapiens
  Payload ID: 16548
  Gene Symbol: SPATC1L
  Gene Name: spermatogenesis and centriole associated 1-like
  Uniprot ID: Q9H0A9
  ENSP ID: ENSP00000291672
MAEGGELMSRLLSENADLKKQVRLLKENQMLRRLLSQSCQEGGGHDLLPPRAHAYPEAGSPGSGVPDFGRFTSVADTPSQLQTSSLEDLLCSHAPLSSEDDTSPGCAAPSQAPFKAFLSPPEPHSHRGTDRKLSPLLSPLQDSLVDKTLLEPREMVRPKKVCFSESSLPTGDRTRRSYYLNEIQSFAGAEKDARVVGEIAFQLDRRILAYVFPGVTRLYGFTVANIPEKIEQTSTKSLDGSVDERKLRELTQRYLALSARLEKLGYSRDVHPAFSEFLINTYGILKQRPDLRANPLHSSPAALRKLVIDVVPPKFLGDSLLLLNCLCELSKEDGKPLFAW

SEQ ID NO: 83144 - protein, 186 aa, Homo sapiens
  Payload ID: 16548
  Gene Symbol: SPATC1L
  Gene Name: spermatogenesis and centriole associated 1-like
  Uniprot ID: Q9H0A9
  ENSP ID: ENSP00000333869
MVRPKKVCFSESSLPTGDRTRRSYYLNEIQSFAGAEKDARVVGEIAFQLDRRILAYVFPGVTRLYGFTVANIPEKIEQTSTKSLDGSVDERKLRELTQRYLALSARLEKLGYSRDVHPAFSEFLINTYGILKQRPDLRANPLHSSPAALRKLVIDVVPPKFLGDSLLLLNCLCELSKEDGKPLFAW

SEQ ID NO: 83145 - protein, 186 aa, Homo sapiens; identical to SEQ ID NO: 83144
  Payload ID: 16548
  Gene Symbol: SPATC1L
  Gene Name: spermatogenesis and centriole associated 1-like
  Uniprot ID: Q9H0A9
  ENSP ID: ENSP00000478124

SEQ ID NO: 83146 - protein, 340 aa, Homo sapiens; identical to SEQ ID NO: 83143
  Payload ID: 16548
  Gene Symbol: SPATC1L
  Gene Name: spermatogenesis and centriole associated 1-like
  Uniprot ID: Q9H0A9
  ENSP ID: ENSP00000483544

SEQ ID NO: 83147 - protein, 328 aa, Homo sapiens
  Payload ID: 16549
  Gene Symbol: SOHLH1
  Gene Name: spermatogenesis and oogenesis specific basic helix-loop-helix 1
  Uniprot ID: Q5JUK2
  ENSP ID: ENSP00000298466
MASRCSEPYPEVSRIPTVRGCNGSLSGALSCCEDSARGSGPPKAPTVAEGPSSCLRRNVISERERRKRMSLSCERLRALLPQFDGRREDMASVLEMSVQFLRLASALGPSQEQHAILASSKEMWHSLQEDVLQLTLSSQIQAGVPDPGTGASSGTRTPDVKAFLESPWSLDPASASPEPVPHILASSRQWDPASCTSLGTDKCEALLGLCQVRGGLPPFSEPSSLVPWPPGRSLPKAVRPPLSWPPFSQQQTLPVMSGEALGWLGQAGPLAMGAAPLGEPAKEDPMLAQEAGSALGSDVDDGTSFLLTAGPSSWPGEWGPGFRAGPPA

SEQ ID NO: 83148 - protein, 387 aa, Homo sapiens
  Payload ID: 16549
  Gene Symbol: SOHLH1
  Gene Name: spermatogenesis and oogenesis specific basic helix-loop-helix 1
  Uniprot ID: Q5JUK2
  ENSP ID: ENSP00000404438
MASRCSEPYPEVSRIPTVRGCNGSLSGALSCCEDSARGSGPPKAPTVAEGPSSCLRRNVISERERRKRMSLSCERLRALLPQFDGRREDMASVLEMSVQFLRLASALGPSQEQHAILASSKEMWHSLQEDVLQLTLSSQIQAGVPDPGTGASSGTRTPDVKAFLESPWSLDPASASPEPVPHILASSRQWDPASCTSLGTDKCEALLGLCQVRGGLPPFSEPSSLVPWPPGRSLPKAVRPPLSWPPFSQQQTLPVMSGEALGWLGQAGPLAMGAAPLGEPAKEDPMLAQEAGSALGSDVDDGTSFLLTAGPSSWPGSLEGRGGSGPAWAPAESSPLDVGEPGFLGDPELGSQELQDSPLEPWGLDVDCAGLALKDEVESIFPDFFAC

SEQ ID NO: 83149 - protein, 225 aa, Homo sapiens
  Payload ID: 16550
  Gene Symbol: SOHLH2
  Gene Name: spermatogenesis and oogenesis specific basic helix-loop-helix 2
  Uniprot ID: Q9NX45
  ENSP ID: ENSP00000326838
MASSIICQEHCQISGQAKIDILLVGDVTVGYLADTVQKLFANIAEVTITISDTKEAAALLDDCIFNMVLLKVPSSLSAEELEAIKLIRFGKKKNTHSLFVFIIPENFKGCISGHGMDIALTEPLTMEKMSNVVKYWTTCPSNTVKTENATGPEELGLPLQRSYSEHLGYFPTDLFACSESLRNGNGLELNASLSEFEKNKKISLLHSSKEKLRRLYRKHSSFCFW

SEQ ID NO: 83150 - protein, 425 aa, Homo sapiens
  Payload ID: 16550
  Gene Symbol: SOHLH2
  Gene Name: spermatogenesis and oogenesis specific basic helix-loop-helix 2
  Uniprot ID: Q9NX45
  ENSP ID: ENSP00000369210
MASSIICQEHCQISGQAKIDILLVGDVTVGYLADTVQKLFANIAEVTITISDTKEAAALLDDCIFNMVLLKVPSSLSAEELEAIKLIRFGKKKNTHSLFVFIIPENFKGCISGHGMDIALTEPLTMEKMSNVVKYWTTCPSNTVKTENATGPEELGLPLQRSYSEHLGYFPTDLFACSESLRNGNGLELNASLSEFEKNKKISLLHSSKEKLRRERIKYCCEQLRTLLPYVKGRKNDAASVLEATVDYVKYIREKISPAVMAQITEALQSNMRFCKKQQTPIELSLPGTVMAQRENSVMSTYSPERGLQFLTNTCWNGCSTPDAESSLDEAVRVPSSSASENAIGDPYKTHISSAALSLNSLHTVRYYSKVTPSYDATAVTNQNISIHLPSAMPPVSKLLPRHCTSGLGQTCTTHPNCLQQFWAY

SEQ ID NO: 83151 - protein, 190 aa, Homo sapiens
  Payload ID: 16551
  Gene Symbol: SPATA12
  Gene Name: spermatogenesis associated 12
  Uniprot ID: Q7Z6I5
  ENSP ID: ENSP00000335392
MSSSALTCGSTLEKSGDTWEMKALDSSRLVPWPPRGLGSSTQHPNKPHCALASCQGPGVLPGAASALPELTFQGDVCQSETCQRYLQAAISLDIAVSQINLLGRPSSPPALLIQQGSCEQVIHNSTPQFLGMEDGDNERTTGWLWRLCEDIDAEPSSTGCSRSNQLTFTEGCFVRSLSTVYSNTHIHTHL

SEQ ID NO: 83152 - protein, 596 aa, Homo sapiens
  Payload ID: 16552
  Gene Symbol: SPATA13
  Gene Name: spermatogenesis associated 13
  Uniprot ID: Q96N96
  ENSP ID: ENSP00000343631
MGFIIHIQQVKKQRKKLDQGLILKKEKYRKEKKCASLSFEVSSDGGTEPSALVDDNGSEEDFSYEDLCQASPRYLQPGGEQLAINELISDGNVVCAEALWDHVTMDDQELGFKAGDVIQVLEASNKDWWWGRSEDKEAWFPASFVRLRVNQEELSENSSSTPSEEQDEEASQSRHRHCENKQQMRTNVIREIMDTERVYIKHLRDICEGYIRQCRKHTGMFTVAQLATIFGNIEDIYKFQRKFLKDLEKQYNKEEPHLSEIGSCFLQNQEGFAIYSEYCNNHPGACLELANLMKQGKYRHFFEACRLLQQMIDIAIDGFLLTPVQKICKYPLQLAELLKYTTQEHGDYSNIKAAYEAMKNVACLINERKRKLESIDKIARWQVSIVGWEGLDILDRSSELIHSGELTKITKQGKSQQRTFFLFDHQLVSCKKDLLRRDMLYYKGRLDMDEMELVDLGDGRDKDCNLSVKNAFKLVSRTTDEVYLFCAKKQEDKARWLQACADERRRVQEDKEMGMEISENQKKLAMLNAQKAGHGKSKGYNRCPVAPPHQGLHPIHQRHITMPTSVPQQQVFGLAEPKRKSSLFWHTFNRLTPFRK

SEQ ID NO: 83153 - protein, 652 aa, Homo sapiens
  Payload ID: 16552
  Gene Symbol: SPATA13
  Gene Name: spermatogenesis associated 13
  Uniprot ID: Q96N96
  ENSP ID: ENSP00000371527
MTSASPEDQNAPVGCPKGARRRRPISVIGGVSLYGTNQTEELDNLLTQPASRPPMPAHQVPPYKAVSARFRPFTFSQSTPIGLDRVGRRRQMRASNVSSDGGTEPSALVDDNGSEEDFSYEDLCQASPRYLQPGGEQLAINELISDGNVVCAEALWDHVTMDDQELGFKAGDVIQVLEASNKDWWWGRSEDKEAWFPASFVRLRVNQEELSENSSSTPSEEQDEEASQSRHRHCENKQQMRTNVIREIMDTERVYIKHLRDICEGYIRQCRKHTGMFTVAQLATIFGNIEDIYKFQRKFLKDLEKQYNKEEPHLSEIGSCFLQNQEGFAIYSEYCNNHPGACLELANLMKQGKYRHFFEACRLLQQMIDIAIDGFLLTPVQKICKYPLQLAELLKYTTQEHGDYSNIKAAYEAMKNVACLINERKRKLESIDKIARWQVSIVGWEGLDILDRSSELIHSGELTKITKQGKSQQRTFFLFDHQLVSCKKDLLRRDMLYYKGRLDMDEMELVDLGDGRDKDCNLSVKNAFKLVSRTTDEVYLFCAKKQEDKARWLQACADERRRVQEDKEMGMEISENQKKLAMLNAQKAGHGKSKGYNRCPVAPPHQGLHPIHQRHITMPTSVPQQQVFGLAEPKRKSSLFWHTFNRLTPFRK

SEQ ID NO: 83154 - protein, 1277 aa, Homo sapiens
  Payload ID: 16552
  Gene Symbol: SPATA13
  Gene Name: spermatogenesis associated 13
  Uniprot ID: Q96N96
  ENSP ID: ENSP00000371542
MTQAAVRPWAPCLENMTTAPNGLGPGPAAPCAGSDLKDAKMVTSLACGNGVCGCSPGGDTDTQEAKLSPAKLVRLFSTSRKRTGAHPERPHSMVLVGNSSTWNTLASFRKMGSFKKLKSSVLKGIQSREGSNACSKGEASEHGLGKSIPNGAVPGAQASRGSPLAPGPACGALRPAEWGTLDGSDLEDTDDAFQRSTHRSRSLRRAYGLGRICLLDAPQNHATPTIATGQVPAVCEILVRDPENNSMGYRRSKSTDNLAFLKKSSFKRKSTSNLADLRTAHDARVPQRTLSSSSTDSQKLGSGRTKRWRSPIRAKDFDRVFKLVSNVTEAAWRRESPRSGAPSPGEASLRLQAHSRLHDDYSRRVSRSTEQDSRRGGAVMHGTTATCTVAPGFGSATSKGPHLDADTAVFPLETKSSWAVESDSSCTCSSLPSPIVQDVLSKDSCDPNAGSQLTFDPEQPPTPLRPTTPKPQSPQSPQSPGAGSASCHSNHSALSANSEESEGRAEEPAQREPGPVSLQDPLEATHGDEGSKDLLVNIGVAAGPEEKEKEEVVPDGPWRRSSSQDEERTEAQRTPKRRWGSGRRPRPRPFSDYGQLASRSLSIPEDSVAADPQKEDRVDEDPQASMTSASPEDQNAPVGCPKGARRRRPISVIGGVSLYGTNQTEELDNLLTQPASRPPMPAHQVPPYKAVSARFRPFTFSQSTPIGLDRVGRRRQMRASNVSSDGGTEPSALVDDNGSEEDFSYEDLCQASPRYLQPGGEQLAINELISDGNVVCAEALWDHVTMDDQELGFKAGDVIQVLEASNKDWWWGRSEDKEAWFPASFVRLRVNQEELSENSSSTPSEEQDEEASQSRHRHCENKQQMRTNVIREIMDTERVYIKHLRDICEGYIRQCRKHTGMFTVAQLATIFGNIEDIYKFQRKFLKDLEKQYNKEEPHLSEIGSCFLQNQEGFAIYSEYCNNHPGACLELANLMKQGKYRHFFEACRLLQQMIDIAIDGFLLTPVQKICKYPLQLAELLKYTTQEHGDYSNIKAAYEAMKNVACLINERKRKLESIDKIARWQVSIVGWEGLDILDRSSELIHSGELTKITKQGKSQQRTFFLFDHQLVSCKKDLLRRDMLYYKGRLDMDEMELVDLGDGRDKDCNLSVKNAFKLVSRTTDEVYLFCAKKQEDKARWLQACADERRRVQEDKEMGMEISENQKKLAMLNAQKAGHGKSKGYNRCPVAPPHQGLHPIHQRHITMPTSVPQQQVFGLAEPKRKSSLFWHTFNRLTPFRK

SEQ ID NO: 83155 - protein, 574 aa, Homo sapiens
  Payload ID: 16552
  Gene Symbol: SPATA13
  Gene Name: spermatogenesis associated 13
  Uniprot ID: Q96N96
  ENSP ID: ENSP00000382830
MVARGEIARFWSLESLHLVSSDGGTEPSALVDDNGSEEDFSYEDLCQASPRYLQPGGEQLAINELISDGNVVCAEALWDHVTMDDQELGFKAGDVIQVLEASNKDWWWGRSEDKEAWFPASFVRLRVNQEELSENSSSTPSEEQDEEASQSRHRHCENKQQMRTNVIREIMDTERVYIKHLRDICEGYIRQCRKHTGMFTVAQLATIFGNIEDIYKFQRKFLKDLEKQYNKEEPHLSEIGSCFLQNQEGFAIYSEYCNNHPGACLELANLMKQGKYRHFFEACRLLQQMIDIAIDGFLLTPVQKICKYPLQLAELLKYTTQEHGDYSNIKAAYEAMKNVACLINERKRKLESIDKIARWQVSIVGWEGLDILDRSSELIHSGELTKITKQGKSQQRTFFLFDHQLVSCKKDLLRRDMLYYKGRLDMDEMELVDLGDGRDKDCNLSVKNAFKLVSRTTDEVYLFCAKKQEDKARWLQACADERRRVQEDKEMGMEISENQKKLAMLNAQKAGHGKSKGYNRCPVAPPHQGLHPIHQRHITMPTSVPQQQVFGLAEPKRKSSLFWHTFNRLTPFRK

SEQ ID NO: 83156 - protein, 512 aa, Homo sapiens
  Payload ID: 16552
  Gene Symbol: SPATA13
  Gene Name: spermatogenesis associated 13
  ENSP ID: ENSP00000386471
MVARGEIARFWSLESLHLVSSDGGTEPSALVDDNGSEEDFSYEDLCQASPRYLQPGGEQLAINELISDGNVVCAEALWDHVTMDDQELGFKAGDVIQVLEASNKDWWWGRSEDKEAWFPASFVRGYIRQCRKHTGMFTVAQLATIFGNIEDIYKFQRKFLKDLEKQYNKEEPHLSEIGSCFLQNQEGFAIYSEYCNNHPGACLELANLMKQGKYRHFFEACRLLQQMIDIAIDGFLLTPVQKICKYPLQLAELLKYTTQEHGDYSNIKAAYEAMKNVACLINERKRKLESIDKIARWQVSIVGWEGLDILDRSSELIHSGELTKITKQGKSQQRTFFLFDHQLVSCKKDLLRRDMLYYKGRLDMDEMELVDLGDGRDKDCNLSVKNAFKLVSRTTDEVYLFCAKKQEDKARWLQACADERRRVQEDKEMGMEISENQKKLAMLNAQKAGHGKSKGYNRCPVAPPHQGLHPIHQRHITMPTSVPQQQVFGLAEPKRKSSLFWHTFNRLTPFRK

SEQ ID NO: 83157 - protein, 146 aa, Homo sapiens
  Payload ID: 16552
  Gene Symbol: SPATA13
  Gene Name: spermatogenesis associated 13
  ENSP ID: ENSP00000397498
MGFIIHIQQVKKQRKKLDQGLILKKEKYRKEKKCASLSFEVSSDGGTEPSALVDDNGSEEDFSYEDLCQASPRYLQPGGEQLAINELISDGNVVCAEALWDHVTMDDQELGFKAGDVIQVLEASNKDWWWGRSEDKEAWFPASFVR

SEQ ID NO: 83158 - protein, 1277 aa, Homo sapiens; identical to SEQ ID NO: 83154
  Payload ID: 16552
  Gene Symbol: SPATA13
  Gene Name: spermatogenesis associated 13
  Uniprot ID: Q96N96
  ENSP ID: ENSP00000398560

SEQ ID NO: 83159 - protein, 550 aa, Homo sapiens
  Payload ID: 16552
  Gene Symbol: SPATA13
  Gene Name: spermatogenesis associated 13
  ENSP ID: ENSP00000401605
TDFAFFLQPASRPPMPAHQVPPYKAVSARFRPFTFSQSTPIGLDRVGRRRQMRASNVSSDGGTEPSALVDDNGSEEDFSYEDLCQASPRYLQPGGEQLAINELISDGNVVCAEALWDHVTMDDQELGFKAGDVIQVLEASNKDWWWGRSEDKEAWFPASFVRGYIRQCRKHTGMFTVAQLATIFGNIEDIYKFQRKFLKDLEKQYNKEEPHLSEIGSCFLQNQEGFAIYSEYCNNHPGACLELANLMKQGKYRHFFEACRLLQQMIDIAIDGFLLTPVQKICKYPLQLAELLKYTTQEHGDYSNIKAAYEAMKNVACLINERKRKLESIDKIARWQVSIVGWEGLDILDRSSELIHSGELTKITKQGKSQQRTFFLFDHQLVSCKKDLLRRDMLYYKGRLDMDEMELVDLGDGRDKDCNLSVKNAFKLVSRTTDEVYLFCAKKQEDKARWLQACADERRRVQEDKEMGMEISENQKKLAMLNAQKAGHGKSKGYNRCPVAPPHQGLHPIHQRHITMPTSVPQQQVFGLAEPKRKSSLFWHTFNRLTPFRK

SEQ ID NO: 83160 - protein, 23 aa, Homo sapiens
  Payload ID: 16552
  Gene Symbol: SPATA13
  Gene Name: spermatogenesis associated 13
  ENSP ID: ENSP00000477296
MGFIIHIQQVKKQRKKLDQGLIL

SEQ ID NO: 83161 - protein, 23 aa, Homo sapiens
  Payload ID: 16552
  Gene Symbol: SPATA13
  Gene Name: spermatogenesis associated 13
  ENSP ID: ENSP00000477304
MGFIIHIQQVKKQRKKLDQGLIL

SEQ ID NO: 83162 - protein, 569 aa, Homo sapiens
  Payload ID: 16553
  Gene Symbol: SPATA16
  Gene Name: spermatogenesis associated 16
  Uniprot ID: Q9BXB7
  ENSP ID: ENSP00000341765
MDAGSSRSLENAVNRIYHDQLVPKINTSKKMSTLAHPPNILEMSQEIKKNCGGKQVEITLERTKMTKGIKEKQSNDLEKAAFKRKAEGEEKPTRKKQAKITELDNQLITMPLPHIPLKNIMDVEMKLVYIDEMGVRYEFVESFMSTGSQPTCQAAEIVDPLSVHNFSFLPQIDKWLQVALKDASSCYRQKKYALAAGQFRTALELCSKGAVLGEPFDAPAEDIASVASFIETKLVTCYLRMRKPDLALNHAHRSIVLNPAYFRNHLRQATVFRCLERYSEAARSAMIADYMFWLGGGREESISKLIKLYWQAMIEEAITRAESFSVMYTPFATKIRADKIEKVKDAFTKTHPAYAEYMYTDLQALHMLPQTVDWSSFPPQQYLLTLGFKNKDDGKFLEKISSRKLPIFTEHKTPFGLTREDTVRQMETMGKRILPILDFIRSTQLNGSFPASSGVMEKLQYASLLSQLQRVKEQSQVINQAMAELATIPYLQDISQQEAELLQSLMADAMDTLEGRRNNNERVWNMIQKVGQIEDFLYQLEDSFLKTKKLRTARRQKTKMKRLQTVQQR

SEQ ID NO: 83163 - protein, 361 aa, Homo sapiens
  Payload ID: 16554
  Gene Symbol: SPATA17
  Gene Name: spermatogenesis associated 17
  Uniprot ID: Q96L03
  ENSP ID: ENSP00000355900
MATLARLQARSSTVGNQYYFRNSVVDPFRKKENDAAVKIQSWFRGCQVRAYIRHLNRIVTIIQKWWRSFLGRKQYQLTVQVAYYTMMMNLYNAMAVRIQRRWRGYRVRKYLFNYYYLKEYLKVVSETNDAIRKALEEFAEMKEREEKKANLEREEKKRDYQARKMHYLLSTKQIPGIYNSPFRKEPDPWELQLQKAKPLTHRRPKVKQKDSTSLTDWLACTSARSFPRSEILPPINRKQCQGPFRDITEVLEQRYRPLEPTLRVAEPIDELKLAREELRREEWLQNVNDNMFLPFSSYHKNEKYIPSMHLSSKYGPISYKEQFRSENPKKWICDKDFQTVLPSFELFSKYGKLYSKAGQIV

SEQ ID NO: 83164 - protein, 80 aa, Homo sapiens
  Payload ID: 16554
  Gene Symbol: SPATA17
  Gene Name: spermatogenesis associated 17
  ENSP ID: ENSP00000473514
MATLARLQARSSTVGNQYYFRNSVVDPFRKKENDAAVKIQSWFRGCQVRAYIRHLNRIVTIIQKWWRSFLGRKQYQLTVQ

SEQ ID NO: 83165 - protein, 538 aa, Homo sapiens
  Payload ID: 16555
  Gene Symbol: SPATA18
  Gene Name: spermatogenesis associated 18
  Uniprot ID: Q8TC71
  ENSP ID: ENSP00000295213
MAENLKRLVSNETLRTLQEKLDFWLKEYNTNTCDQNLNHCLELIEQVAKVQGQLFGILTAAAQEGGRNDGVETIKSRLLPWLEASFTAASLGKSVDSKVPSLQDTFDRERHKDPSPRDRDMQQLDSNLNSTRSQCNQVQDDLVETEKNLEESKNRSAISLLAAEEEINQLKKQLKSLQAQEDARHRNTDQRSSENRRSEPWSLEERKREQWNSLKQNADQQDTEAMSDYKKQLRNLKEEIAVLSAEKSALQGRSSRSRSPSPAPRSRSCSRSRSASPSTAVKVRRPSPNRSKLSNVARKAALLSRFSDSYSQARLDAQCLLRRCIDKAETVQRIIYIATVEAFHVAKMAFRHFKIHVRKSLTPSYVGSNDFENAVLDYVICHLDLYDSQSSVNDVIRAMNVNPKISFPPVVDFCLLSDFIQEICCIAFAMQALEPPLDIAYGADGEVFNDCKYRRSYDSDFTAPLVLYHVWPALMENDCVIMKGEAVTRRGAFWNSVRSVSRCRSRSLSPICPRSQIGLNTMSRSRSPSPIRCGLPRF

SEQ ID NO: 83166 - protein, 506 aa, Homo sapiens
  Payload ID: 16555
  Gene Symbol: SPATA18
  Gene Name: spermatogenesis associated 18
  Uniprot ID: Q8TC71
  ENSP ID: ENSP00000415309
MAENLKRLVSNETLRTLQEKLDFWLKEYNTNTCDQNLNHCLELIEQVAKVQGQLFGILTAAAQEGGRNDGVETIKSRLLPWLEASFTAASLGKSVDSKVPSLQDTFDRERHKDPSPRDRDMQQLDSNLNSTRSQCNQVQDELKSLQAQEDARHRNTDQRSSENRRSEPWSLEERKREQWNSLKQNADQQDTEAMSDYKKQLRNLKEEIAVLSAEKSALQGRSSRSRSPSPAPRSRSCSRSRSASPSTAVKVRRPSPNRSKLSNVARKAALLSRFSDSYSQARLDAQCLLRRCIDKAETVQRIIYIATVEAFHVAKMAFRHFKIHVRKSLTPSYVGSNDFENAVLDYVICHLDLYDSQSSVNDVIRAMNVNPKISFPPVVDFCLLSDFIQEICCIAFAMQALEPPLDIAYGADGEVFNDCKYRRSYDSDFTAPLVLYHVWPALMENDCVIMKGEAVTRRGAFWNSVRSVSRCRSRSLSPICPRSQIGLNTMSRSRSPSPIRCGLPRF

SEQ ID NO: 83167 - protein, 516 aa, Homo sapiens
  Payload ID: 16555
  Gene Symbol: SPATA18
  Gene Name: spermatogenesis associated 18
  ENSP ID: ENSP00000421204
MAENLKRLVSNETLRTLQEKLDFWLKEYNTNTCDQNLNHCLELIEQVAKVQGQLFGILTAAAQEGGRNDGVETIKSRLLPWLEASFTAASLGKSVDSKVPSLQDTFDRERHKDPSPRDRDMQQLDSNLNSTRSQCNQVQDDLVETEKNLEESKNRSAISLLAAEEEINQLKKQLKSLQAQEDARHRNTDQRSSENRRSEPWSLEERKREQWNSLKQNADQQDTEAMSDYKKQLRNLKEEIAVLSAEKSALQGRSSRSRSPSPAPRSRSCSRSRSASPSTAVKVRRPSPNRSKLSNVARKAALLSRFSDSYSQARLDAQCLLRRCIDKAETVQRIIYIATVEAFHVAKMAFRHFKIHVRKSLTPSYVGSNDFENAVLDYVICHLDLYDSQSSVNDVIRAMNVNPKISFPPVVDFCLLSDFIQEICCIAFAMQALEPPLDIAYGADGEVFNDCKYRRSYDSDFTAPLVLYHVWPALMENDCVIMKGEAVTRRGAFVRWPCIVTIHPKCLIHNGIRCDL

SEQ ID NO: 83168 - protein, 104 aa, Homo sapiens
  Payload ID: 16555
  Gene Symbol: SPATA18
  Gene Name: spermatogenesis associated 18
  ENSP ID: ENSP00000424656
MAENLKRLVSNETLRTLQEKLDFWLKEYNTNTCDQNLNHCLELIEQVAKVQGQLFGILTAAAQEGGRNDGVETIKSRLLPWLEASFTAASLGKSVDSKVPSLQA

SEQ ID NO: 83169 - protein, 88 aa, Homo sapiens
  Payload ID: 16555
  Gene Symbol: SPATA18
  Gene Name: spermatogenesis associated 18
  ENSP ID: ENSP00000424695
MAENLKRLVSNETLRTLQEKLDFWLKEYNEDVMMVWKQSSHAFCLGWRLPLLLLPWENLLTARSPLCRTRLIGRDIKIPVLGIGICNS

SEQ ID NO: 83170 - protein, 31 aa, Homo sapiens
  Payload ID: 16555
  Gene Symbol: SPATA18
  Gene Name: spermatogenesis associated 18
  ENSP ID: ENSP00000426345
MAENLKRLVSNETLRTLQEKLDFWLKEYNSG

SEQ ID NO: 83171 - protein, 167 aa, Homo sapiens
  Payload ID: 16556
  Gene Symbol: SPATA19
  Gene Name: spermatogenesis associated 19
  Uniprot ID: Q7Z5L4
  ENSP ID: ENSP00000299140
MIITTWIVYILARKGVGLPFLPITSSDIDVVESEAVSVLHHWLKKTEEEASRGIKEKLSINHPSQGVREKMSTDSPPTHGQDIHVTRDVVKHHLSKSDLLANQSQEVLEERTRIQFIRWSHTRIFQVPSEMTEDIMRDRIEQVRRSISRLTDVSAQDFSMRPSSSDC

SEQ ID NO: 83172 - protein, 167 aa, Homo sapiens; identical to SEQ ID NO: 83171
  Payload ID: 16556
  Gene Symbol: SPATA19
  Gene Name: spermatogenesis associated 19
  Uniprot ID: Q7Z5L4
  ENSP ID: ENSP00000435248

SEQ ID NO: 83173 - protein, 520 aa, Homo sapiens
  Payload ID: 16557
  Gene Symbol: SPATA2
  Gene Name: spermatogenesis associated 2
  Uniprot ID: Q9UM82
  ENSP ID: ENSP00000289431
MGKPSSMDTKFKDDLFRKYVQFHESKVDTTTSRQRPGSDECLRVAASTLLSLHKVDPFYRFRLIQFYEVVESSLRSLSSSSLRALHGAFSMLETVGINLFLYPWKKEFRSIKTYTGPFVYYVKSTLLEEDIRAILSCMGYTPELGTAYKLRELVETLQVKMVSFELFLAKVECEQMLEIHSQVKDKGYSELDIVSERKSSAEDVRGCSDALRRRAEGREHLTASMSRVALQKSASERAAKDYYKPRVTKPSRSVDAYDSYWESRKPPLKASLSLRKEPVATDVGDDLKDEIIRPSPSLLTMASSPHGSPDVLPPASPSNGPALLRGTYFSTQDDVDLYTDSEPRATYRRQDALRPDVWLLRNDAHSLYHKRSPPAKESALSKCQSCGLSCSSSLCQRCDSLLTCPPASKPSAFPSKASTHDSLAHGASLREKYPGQTQGLDRLPHLHSKSKPSTTPTSRCGFCNRPGATNTCTQCSKVSCDACLSAYHYDPCYKKSELHKFMPNNQLNYKSTQLSHLVYR

SEQ ID NO: 83174 - protein, 520 aa, Homo sapiens; identical to SEQ ID NO: 83173
  Payload ID: 16557
  Gene Symbol: SPATA2
  Gene Name: spermatogenesis associated 2
  Uniprot ID: Q9UM82
  ENSP ID: ENSP00000416799

SEQ ID NO: 83175 - protein, 802 aa, Homo sapiens
  Payload ID: 16558
  Gene Symbol: SPATA20
  Gene Name: spermatogenesis associated 20
  Uniprot ID: Q8TB22
  ENSP ID: ENSP00000006658
MLGARAWLGRVLLLPRAGAGLAASRRCPGVWPRTWPHRSPSRGSSSRDKDRSATVSSSVPMPAGGKGSHPSSTPQRVPNRLIHEKSPYLLQHAYNPVDWYPWGQEAFDKARKENKPIFLSVGYSTCHWCHMMEEESFQNEEIGRLLSEDFVSVKVDREERPDVDKVYMTFVQATSSGGGWPMNVWLTPNLQPFVGGTYFPPEDGLTRVGFRTVLLRIREQWKQNKNTLLENSQRVTTALLARSEISVGDRQLPPSAATVNNRCFQQLDEGYDEEYGGFAEAPKFPTPVILSFLFSYWLSHRLTQDGSRAQQMALHTLKMMANGGIRDHVGQGFHRYSTDRQWHVPHFEKMLYDQAQLAVAYSQAFQLSGDEFYSDVAKGILQYVARSLSHRSGGFYSAEDADSPPERGQRPKEGAYYVWTVKEVQQLLPEPVLGATEPLTSGQLLMKHYGLTEAGNISPSQDPKGELQGQNVLTVRYSLELTAARFGLDVEAVRTLLNSGLEKLFQARKHRPKPHLDSKMLAAWNGLMVSGYAVTGAVLGQDRLINYATNGAKFLKRHMFDVASGRLMRTCYTGPGGTVEHSNPPCWGFLEDYAFVVRGLLDLYEASQESAWLEWALRLQDTQDKLFWDSQGGGYFCSEAELGAGLPLRLKDDQDGAEPSANSVSAHNLLRLHGFTGHKDWMDKCVCLLTAFSERMRRVPVALPEMVRALSAQQQTLKQIVICGDRQAKDTKALVQCVHSVYIPNKVLILADGDPSSFLSRQLPFLSTLRRLEDQATAYVCENQACSVPITDPCELRKLLHP

SEQ ID NO: 83176 - protein, 786 aa, Homo sapiens
  Payload ID: 16558
  Gene Symbol: SPATA20
  Gene Name: spermatogenesis associated 20
  Uniprot ID: Q8TB22
  ENSP ID: ENSP00000348878
MLGARAWLGRVLLLPRAGAGLAASRRGSSSRDKDRSATVSSSVPMPAGGKGSHPSSTPQRVPNRLIHEKSPYLLQHAYNPVDWYPWGQEAFDKARKENKPIFLSVGYSTCHWCHMMEEESFQNEEIGRLLSEDFVSVKVDREERPDVDKVYMTFVQATSSGGGWPMNVWLTPNLQPFVGGTYFPPEDGLTRVGFRTVLLRIREQWKQNKNTLLENSQRVTTALLARSEISVGDRQLPPSAATVNNRCFQQLDEGYDEEYGGFAEAPKFPTPVILSFLFSYWLSHRLTQDGSRAQQMALHTLKMMANGGIRDHVGQGFHRYSTDRQWHVPHFEKMLYDQAQLAVAYSQAFQLSGDEFYSDVAKGILQYVARSLSHRSGGFYSAEDADSPPERGQRPKEGAYYVWTVKEVQQLLPEPVLGATEPLTSGQLLMKHYGLTEAGNISPSQDPKGELQGQNVLTVRYSLELTAARFGLDVEAVRTLLNSGLEKLFQARKHRPKPHLDSKMLAAWNGLMVSGYAVTGAVLGQDRLINYATNGAKFLKRHMFDVASGRLMRTCYTGPGGTVEHSNPPCWGFLEDYAFVVRGLLDLYEASQESAWLEWALRLQDTQDKLFWDSQGGGYFCSEAELGAGLPLRLKDDQDGAEPSANSVSAHNLLRLHGFTGHKDWMDKCVCLLTAFSERMRRVPVALPEMVRALSAQQQTLKQIVICGDRQAKDTKALVQCVHSVYIPNKVLILADGDPSSFLSRQLPFLSTLRRLEDQATAYVCENQACSVPITDPCELRKLLHP

SEQ ID NO: 83177 - protein, 56 aa, Homo sapiens
  Payload ID: 16558
  Gene Symbol: SPATA20
  Gene Name: spermatogenesis associated 20
  ENSP ID: ENSP00000422378
MLGARAWLGRVLLLPRAGAGLAASRRCPGVWPRTWPHRSPSRPRRLGETNLARSPQ

SEQ ID NO: 83178 - protein, 43 aa, Homo sapiens
  Payload ID: 16558
  Gene Symbol: SPATA20
  Gene Name: spermatogenesis associated 20
  ENSP ID: ENSP00000423643
MLGARAWLGRVLLLPRAGAGLAASRRSACSPTSRLNSLRSLIP

SEQ ID NO: 83179 - protein, 43 aa, Homo sapiens; identical to SEQ ID NO: 83178
  Payload ID: 16558
  Gene Symbol: SPATA20
  Gene Name: spermatogenesis associated 20
  ENSP ID: ENSP00000424215

SEQ ID NO: 83180 - protein, 247 aa, Homo sapiens
  Payload ID: 16558
  Gene Symbol: SPATA20
  Gene Name: spermatogenesis associated 20
  ENSP ID: ENSP00000424538
  MOD_RES (1)..(1): Any amino acid
XESFQNEEIGRLLSEDFVSVKVDREERPDVDKVYMTFVQATSSGGGWPMNVWLTPNLQPFVGGTYFPPEDGLTRVGFRTVLLRIREQWKQNKNTLLENSQRVTTALLARSEISVGDRQLPPSAATVNNRCFQQLDEGYDEEYGGFAEAPKFPTPVILSFLFSYWLSHRLTQDGSRAQQMALHTLKMMANGGIRDHVGQTASGTSLTLRRCSMTRHSSLWPIRRPSSSLVMNSTLTWPKASCSTWLGA

SEQ ID NO: 83181 - protein, 110 aa, Homo sapiens
  Payload ID: 16558
  Gene Symbol: SPATA20
  Gene Name: spermatogenesis associated 20
  ENSP ID: ENSP00000425271
  MOD_RES (1)..(1): Any amino acid
XQAQLAVAYSQAFQLSGDEFYSDVAKGILQYVARSLSHRSGGFYSAEDADSPPERGQRPKEGAYYVWTVKEVQQLLPEPVLGATEPLTSGQLLMKHYGLTEAGNISPSQA

SEQ ID NO: 83182 - protein, 43 aa, Homo sapiens; identical to SEQ ID NO: 83178
  Payload ID: 16558
  Gene Symbol: SPATA20
  Gene Name: spermatogenesis associated 20
  ENSP ID: ENSP00000426025

SEQ ID NO: 83183 - protein, 43 aa, Homo sapiens; identical to SEQ ID NO: 83178
  Payload ID: 16558
  Gene Symbol: SPATA20
  Gene Name: spermatogenesis associated 20
  ENSP ID: ENSP00000426228

SEQ ID NO: 83184 - protein, 43 aa, Homo sapiens; identical to SEQ ID NO: 83178
  Payload ID: 16558
  Gene Symbol: SPATA20
  Gene Name: spermatogenesis associated 20
  ENSP ID: ENSP00000426608

SEQ ID NO: 83185 - protein, 67 aa, Homo sapiens
  Payload ID: 16558
  Gene Symbol: SPATA20
  Gene Name: spermatogenesis associated 20
  ENSP ID: ENSP00000427374
MLGARAWLGRVLLLPRAGAGLAASRRCPGVWPRTWPHRSPSRWALSEGVPMSGFLCLSLTWSSPRPY

SEQ ID NO: 83186 - protein, 742 aa, Homo sapiens
  Payload ID: 16558
  Gene Symbol: SPATA20
  Gene Name: spermatogenesis associated 20
  Uniprot ID: Q8TB22
  ENSP ID: ENSP00000483295
MPAGGKGSHPSSTPQRVPNRLIHEKSPYLLQHAYNPVDWYPWGQEAFDKARKENKPIFLSVGYSTCHWCHMMEEESFQNEEIGRLLSEDFVSVKVDREERPDVDKVYMTFVQATSSGGGWPMNVWLTPNLQPFVGGTYFPPEDGLTRVGFRTVLLRIREQWKQNKNTLLENSQRVTTALLARSEISVGDRQLPPSAATVNNRCFQQLDEGYDEEYGGFAEAPKFPTPVILSFLFSYWLSHRLTQDGSRAQQMALHTLKMMANGGIRDHVGQGFHRYSTDRQWHVPHFEKMLYDQAQLAVAYSQAFQLSGDEFYSDVAKGILQYVARSLSHRSGGFYSAEDADSPPERGQRPKEGAYYVWTVKEVQQLLPEPVLGATEPLTSGQLLMKHYGLTEAGNISPSQDPKGELQGQNVLTVRYSLELTAARFGLDVEAVRTLLNSGLEKLFQARKHRPKPHLDSKMLAAWNGLMVSGYAVTGAVLGQDRLINYATNGAKFLKRHMFDVASGRLMRTCYTGPGGTVEHSNPPCWGFLEDYAFVVRGLLDLYEASQESAWLEWALRLQDTQDKLFWDSQGGGYFCSEAELGAGLPLRLKDDQDGAEPSANSVSAHNLLRLHGFTGHKDWMDKCVCLLTAFSERMRRVPVALPEMVRALSAQQQTLKQIVICGDRQAKDTKALVQCVHSVYIPNKVLILADGDPSSFLSRQLPFLSTLRRLEDQATAYVCENQACSVPITDPCELRKLLHP

SEQ ID NO: 83187 - protein, 521 aa, Homo sapiens
  Payload ID: 16558
  Gene Symbol: SPATA20
  Gene Name: spermatogenesis associated 20
  ENSP ID: ENSP00000489476
MSHLSSPPKKHKGEHKGHSLPHGSERGSSSRDKDRSATVSSSVPMPAGGKGSHPSSTPQRVPNRLIHEKSPYLLQHAYNPVDWYPWGQEAFDKARKENKPIFLSVGYSTCHWCHMMEEESFQNEEIGRLLSEDFVSVKVDREERPDVDKVYMTFVQATSSGGGWPMNVWLTPNLQPFVGGTYFPPEDGLTRVGFRTVLLRIREQWKQNKNTLLENSQRVTTALLARSEISVGDRQLPPSAATVNNRCFQQLDEGYDEEYGGFAEAPKFPTPVILSFLFSYWLSHRLTQDGSRAQQMALHTLKMMANGGIRDHVGQGFHRYSTDRQWHVPHFEKMLYDQAQLAVAYSQAFQLSGDEFYSDVAKGILQYVARSLSHRSGGFYSAEDADSPPERGQRPKEGAYYVWTVKEVQQLLPEPVLGATEPLTSGQLLMKHYGLTEAGNISPSQDPKGELQGQNVLTVRYSLELTAARFGLDVEAVRTLLNSGLEKLFQARKHRPKPHLDSKMLAAWNGGAAHLRPSLSA

SEQ ID NO: 83188 - protein, 786 aa, Homo sapiens
  Payload ID: 16558
  Gene Symbol: SPATA20
  Gene Name: spermatogenesis associated 20
  ENSP ID: ENSP00000489591
MSHLSSPPKKHKGEHKGHSLPHGSERGSSSRDKDRSATVSSSVPMPAGGKGSHPSSTPQRVPNRLIHEKSPYLLQHAYNPVDWYPWGQEAFDKARKENKPIFLSVGYSTCHWCHMMEEESFQNEEIGRLLSEDFVSVKVDREERPDVDKVYMTFVQATSSGGGWPMNVWLTPNLQPFVGGTYFPPEDGLTRVGFRTVLLRIREQWKQNKNTLLENSQRVTTALLARSEISVGDRQLPPSAATVNNRCFQQLDEGYDEEYGGFAEAPKFPTPVILSFLFSYWLSHRLTQDGSRAQQMALHTLKMMANGGIRDHVGQGFHRYSTDRQWHVPHFEKMLYDQAQLAVAYSQAFQLSGDEFYSDVAKGILQYVARSLSHRSGGFYSAEDADSPPERGQRPKEGAYYVWTVKEVQQLLPEPVLGATEPLTSGQLLMKHYGLTEAGNISPSQDPKGELQGQNVLTVRYSLELTAARFGLDVEAVRTLLNSGLEKLFQARKHRPKPHLDSKMLAAWNGLMVSGYAVTGAVLGQDRLINYATNGAKFLKRHMFDVASGRLMRTCYTGPGGTVEHSNPPCWGFLEDYAFVVRGLLDLYEASQESAWLEWALRLQDTQDKLFWDSQGGGYFCSEAELGAGLPLRLKDDQDGAEPSANSVSAHNLLRLHGFTGHKDWMDKCVCLLTAFSERMRRVPVALPEMVRALSAQQQTLKQIVICGDRQAKDTKALVQCVHSVYIPNKVLILADGDPSSFLSRQLPFLSTLRRLEDQATAYVCENQACSVPITDPCELRKLLHP

SEQ ID NO: 83189 - protein, 469 aa, Homo sapiens
  Payload ID: 16559
  Gene Symbol: SPATA21
  Gene Name: spermatogenesis associated 21
  Uniprot ID: Q7Z572
  ENSP ID: ENSP00000335612
MDNRNTQMYTEEEKTVNPFLPSTPGPKKAKGGGEAVETHPAPGPLPPPEVRDIGERREPDRAQQQPQKPAVAAGTQSLGNFRQGFMKCLLEVEKMEASHRRASKARSQTAQKSPRTLTPVPTSAPSLPQTPASVPASGPSWARLPAPGPEPAPMGAPVPTSMPCPVLLGPALDLGWRRMELLHQSSERTLSYAKARQEPEEQSLQKLYQNREKSEEQLTLKQEEAFRSYFEIFNGPGEVDAQSLKNILLLMGFSVTLAQVEDALMSADVNGDGRVDFKDFLAVMTDTRRFFCSVEQNALSDMAPHNPHTLLFEILSLLVEMLALPEAVLEEITNYYQKKLKEGTCKAQEMEAAVGRLRLQKLPYNPQQEESSEVPERKVLSILSRLKQQNYAPNLQSPYAQVPCILLCPQLDKKMVRRQPSNHYALDQCTPPGLDPDIRSPFFQSGSQGNREHNSDSRKWLSSVPARTH

SEQ ID NO: 83190 - protein, 200 aa, Homo sapiens
  Payload ID: 16559
  Gene Symbol: SPATA21
  Gene Name: spermatogenesis associated 21
  ENSP ID: ENSP00000364727
MDNRNTQMYTEGRTKAPGTQPSPGLRITIKRAGVEPIIPGVSKVMFPDASEVGSKKHLSSASRGPEKGPRLRDAFEKGPSELRIQEQGPPARPGKKQPSWVPQEGSQELQAGQDQSELGLLPSWVPEVPEGLQQLGSGKEIKGQQGRQRNRGIGEDQPPESCQAGHGGSRLLIPALLEAEGGRSPEVKTSLANMVKPCLY

SEQ ID NO: 83191 - protein, 160 aa, Homo sapiens
  Payload ID: 16559
  Gene Symbol: SPATA21
  Gene Name: spermatogenesis associated 21
  ENSP ID: ENSP00000420753
SVEQNALSDMAPHNPHTLLFEILSLLVEMLALPEAVLEEITNYYQKKLKEGTCKAQEMEAAVGRLRLQKLPYNPQQEESSEVPERKVLSILSRLKQQNYAPNLQSPYAQVPCILLCPQLDKKMVRRQPSNHYALDQCTPPGLDPDIRSPFFQSGSQGNRV

SEQ ID NO: 83192 - protein, 446 aa, Homo sapiens
  Payload ID: 16559
  Gene Symbol: SPATA21
  Gene Name: spermatogenesis associated 21
  Uniprot ID: Q7Z572
  ENSP ID: ENSP00000440046
MAQPGAVEHACHPSTLGGQGGGSLEEVRDIGERREPDRAQQQPQKPAVAAGTQSLGNFRQGFMKCLLEVEKMEASHRRASKARSQTAQKSPRTLTPVPTSAPSLPQTPASVPASGPSWARLPAPGPEPAPMGAPVPTSMPCPVLLGPALDLGWRRMELLHQSSERTLSYAKARQEPEEQSLQKLYQNREKSEEQLTLKQEEAFRSYFEIFNGPGEVDAQSLKNILLLMGFSVTLAQVEDALMSADVNGDGRVDFKDFLAVMTDTRRFFCSVEQNALSDMAPHNPHTLLFEILSLLVEMLALPEAVLEEITNYYQKKLKEGTCKAQEMEAAVGRLRLQKLPYNPQQEESSEVPERKVLSILSRLKQQNYAPNLQSPYAQVPCILLCPQLDKKMVRRQPSNHYALDQCTPPGLDPDIRSPFFQSGSQGNREHNSDSRKWLSSVPARTH

SEQ ID NO: 83193 - protein, 200 aa, Homo sapiens; identical to SEQ ID NO: 83190
  Payload ID: 16559
  Gene Symbol: SPATA21
  Gene Name: spermatogenesis associated 21
  ENSP ID: ENSP00000483493

SEQ ID NO: 83194 - protein, 269 aa, Homo sapiens
  Payload ID: 16560
  Gene Symbol: SPATA22
  Gene Name: spermatogenesis associated 22
  Uniprot ID: Q8NHS9
  ENSP ID: ENSP00000268981
MKRSLNENSARSTAGCLPVPLFNQKKRNRQPLTSNPLKDDSGISTPSDNYDFPPLPTDWAWEAVNPELAPVMKTVDTGQIPHSVSRPLRSQDSVFNSIQSNTGRSQGGWSYRDGNKNTSLKTWNKNDFKPQCKRTNLVANDGKNSCPVSSGAQQQKQLRIPEPPNLSRNKETELLRQTHSSKISGCTMRGLDKNSALQTLKPNFQQNQYKKQMLDDIPEDNTLKETSLYQLQFKEKASSLRIISAVIESMKYWREHAQKTVLLFEVLGS

SEQ ID NO: 83195 - protein, 320 aa, Homo sapiens
  Payload ID: 16560
  Gene Symbol: SPATA22
  Gene Name: spermatogenesis associated 22
  Uniprot ID: Q8NHS9
  ENSP ID: ENSP00000347541
MKRSLNENSARSTADWAWEAVNPELAPVMKTVDTGQIPHSVSRPLRSQDSVFNSIQSNTGRSQGGWSYRDGNKNTSLKTWNKNDFKPQCKRTNLVANDGKNSCPVSSGAQQQKQLRIPEPPNLSRNKETELLRQTHSSKISGCTMRGLDKNSALQTLKPNFQQNQYKKQMLDDIPEDNTLKETSLYQLQFKEKASSLRIISAVIESMKYWREHAQKTVLLFEVLAVLDSAVTPGPYYSKTFLMRDGKNTLPCVFYEIDRELPRLIRGRVHRCVGNYDQKKNIFQCVSVRPASVSEQKTFQAFVKIADVEMQYYINVMNET

SEQ ID NO: 83196 - protein, 363 aa, Homo sapiens
  Payload ID: 16560
  Gene Symbol: SPATA22
  Gene Name: spermatogenesis associated 22
  Uniprot ID: Q8NHS9
  ENSP ID: ENSP00000380354
MKRSLNENSARSTAGCLPVPLFNQKKRNRQPLTSNPLKDDSGISTPSDNYDFPPLPTDWAWEAVNPELAPVMKTVDTGQIPHSVSRPLRSQDSVFNSIQSNTGRSQGGWSYRDGNKNTSLKTWNKNDFKPQCKRTNLVANDGKNSCPVSSGAQQQKQLRIPEPPNLSRNKETELLRQTHSSKISGCTMRGLDKNSALQTLKPNFQQNQYKKQMLDDIPEDNTLKETSLYQLQFKEKASSLRIISAVIESMKYWREHAQKTVLLFEVLAVLDSAVTPGPYYSKTFLMRDGKNTLPCVFYEIDRELPRLIRGRVHRCVGNYDQKKNIFQCVSVRPASVSEQKTFQAFVKIADVEMQYYINVMNET

SEQ ID NO: 83197 - protein, 347 aa, Homo sapiens
  Payload ID: 16560
  Gene Symbol: SPATA22
  Gene Name: spermatogenesis associated 22
  ENSP ID: ENSP00000441920
MKRSLNENSARSTAGCLPVPLFNQKKRNRQPLTSNPLKDDSDWAWEAVNPELAPVMKTVDTGQIPHSVSRPLRSQDSVFNSIQSNTGRSQGGWSYRDGNKNTSLKTWNKNDFKPQCKRTNLVANDGKNSCPVSSGAQQQKQLRIPEPPNLSRNKETELLRQTHSSKISGCTMRGLDKNSALQTLKPNFQQNQYKKQMLDDIPEDNTLKETSLYQLQFKEKASSLRIISAVIESMKYWREHAQKTVLLFEVLAVLDSAVTPGPYYSKTFLMRDGKNTLPCVFYEIDRELPRLIRGRVHRCVGNYDQKKNIFQCVSVRPASVSEQKTFQAFVKIADVEMQYYINVMNET

SEQ ID NO: 83198 - protein, 85 aa, Homo sapiens
  Payload ID: 16560
  Gene Symbol: SPATA22
  Gene Name: spermatogenesis associated 22
  ENSP ID: ENSP00000458923
MKTVDTGQIPHSVSRPLRSQDSVFNSIQSNTGRSQGGWSYRDGNKNTSLKTWNKNDFKPQCKRTNLVANDGKNSCPVSSGAQQQK

SEQ ID NO: 83199 - protein, 3 aa, Homo sapiens
  Payload ID: 16560
  Gene Symbol: SPATA22
  Gene Name: spermatogenesis associated 22
  ENSP ID: ENSP00000459147
MKR

SEQ ID NO: 83200 - protein, 363 aa, Homo sapiens; identical to SEQ ID NO: 83196
  Payload ID: 16560
  Gene Symbol: SPATA22
  Gene Name: spermatogenesis associated 22
  Uniprot ID: Q8NHS9
  ENSP ID: ENSP00000459329

SEQ ID NO: 83201 - protein, 168 aa, Homo sapiens
  Payload ID: 16560
  Gene Symbol: SPATA22
  Gene Name: spermatogenesis associated 22
  ENSP ID: ENSP00000459552
MKTVDTGQIPHSVSRPLRSQDSVFNSIQSNTGRSQGGWSYRDGNKNTSLKTWNKNDFKPQCKRTNLVANDGKNSCPVSSGAQQQKQLRIPEPPNLSRNKETELLRQTHSSKISGCTMRGLDKNSALQTLKPNFQQNQYKKQMLDDIPEDNTLKETSLYQLQFKEKASS

SEQ ID NO: 83202 - protein, 363 aa, Homo sapiens; identical to SEQ ID NO: 83196
  Payload ID: 16560
  Gene Symbol: SPATA22
  Gene Name: spermatogenesis associated 22
  Uniprot ID: Q8NHS9
  ENSP ID: ENSP00000459580

SEQ ID NO: 83203 - protein, 363 aa, Homo sapiens; identical to SEQ ID NO: 83196
  Payload ID: 16560
  Gene Symbol: SPATA22
  Gene Name: spermatogenesis associated 22
  Uniprot ID: Q8NHS9
  ENSP ID: ENSP00000460187

SEQ ID NO: 83204 - protein, 49 aa, Homo sapiens
  Payload ID: 16560
  Gene Symbol: SPATA22
  Gene Name: spermatogenesis associated 22
  ENSP ID: ENSP00000460692
MKRSLNENSARSTAGCLPVPLFNQKKRNRQPLTSNPLKDDSDWAWEAVN

SEQ ID NO: 83205 - protein, 164 aa, Homo sapiens
  Payload ID: 16560
  Gene Symbol: SPATA22
  Gene Name: spermatogenesis associated 22
  ENSP ID: ENSP00000461180
MKRSLNENSARSTAGCLPVPLFNQKKRNRQPLTSNPLKDDSGISTPSDNYDFPPLPTDWAWEAVNPELAPVMKTVDTGQIPHSVSRPLRSQDSVFNSIQSNTGRSQGGWSYRDGNKNTSLKTWNKNDFKPQCKRTNLVANDGKNSCPVSSGAQQQKQLRIPEPP

SEQ ID NO: 83206 - protein, 209 aa, Homo sapiens
  Payload ID: 16560
  Gene Symbol: SPATA22
  Gene Name: spermatogenesis associated 22
  ENSP ID: ENSP00000461462
MARMMRTRGMMMHNEDNSCLPVPLFNQKKRNRQPLTSNPLKDDSDWAWEAVNPELAPVMKTVDTGQIPHSVSRPLRSQDSVFNSIQSNTGRSQGGWSYRDGNKNTSLKTWNKNDFKPQCKRTNLVANDGKNSCPVSSGAQQQKQLRIPEPPNLSRNKETELLRQTHSSKISGCTMRGLDKNSALQTLKPNFQQNQYKKQMLDDIPEDNT

SEQ ID NO: 83207 - protein, 148 aa, Homo sapiens
  Payload ID: 16560
  Gene Symbol: SPATA22
  Gene Name: spermatogenesis associated 22
  ENSP ID: ENSP00000461722
MKTVDTGQIPHSVSRPLRSQDSVFNSIQSNTGRSQGGWSYRDGNKNTSLKTWNKNDFKPQCKRTNLVANDGKNSCPVSSGAQQQKQLRIPEPPNLSRNKETELLRQTHSSKISGCTMRGLDKNSALQTLKPNFQQNQYKKQMLDDIPE

SEQ ID NO: 83208 - protein, 293 aa, Homo sapiens
  Payload ID: 16561
  Gene Symbol: SPATA24
  Gene Name: spermatogenesis associated 24
  ENSP ID: ENSP00000302917
MATPLGWSKAGSGSVCLALDQLRDVIESQEELIHQLRNVMVLQDENFVSKEEFQAVEKKLVEEKAAHAKTKVLLAKEEEKLQFALGEVEVLSKQLEKEKLAFEKALSSVKSKVLQESSKKDQLITKCNEIESHIIKQEDILNGKENEIKELQQVISQQKQIFSPPPAGSVAGITCLTSGSRSSRRATWPRCWTRSIRKPQGHVRPAATSIPGKNKMAAAFLFSGCNPQPLPSLLWESPASSPCYFPPSWIVVGVHKVGACSLGEELGLCCLVGTTASFGYLIPSYINSPGYPV

SEQ ID NO: 83209 - protein, 188 aa, Homo sapiens
  Payload ID: 16561
  Gene Symbol: SPATA24
  Gene Name: spermatogenesis associated 24
  Uniprot ID: Q86W54
  ENSP ID: ENSP00000400524
MATPLGWSKAGSGSVCLALDQLRDVIESQEELIHQLRNVMVLQDENFVSKEEFQAVEKKLVEEKAAHAKTKVLLAKEEEKLQFALGEVEVLSKQLEKEKLAFEKALSSVKSKVLQESSKKDQLITKCNGRREARALHHGYINGLFPNHPVPVSKAGFHSNTCPQLRIQAGPGGPHLRKGLKGPGRPRK

SEQ ID NO: 83210 - protein, 205 aa, Homo sapiens
  Payload ID: 16561
  Gene Symbol: SPATA24
  Gene Name: spermatogenesis associated 24
  Uniprot ID: Q86W54
  ENSP ID: ENSP00000414920
MATPLGWSKAGSGSVCLALDQLRDVIESQEELIHQLRNVMVLQDENFVSKEEFQAVEKKLVEEKAAHAKTKVLLAKEEEKLQFALGEVEVLSKQLEKEKLAFEKALSSVKSKVLQESSKKDQLITKCNEIESHIIKQEDILNGKENEIKELQQVISQQKQIFRNHMSDFRIQKQQESYMAQVLDQKHKKASGTRQARSHQHPREK

SEQ ID NO: 83211 - protein, 185 aa, Homo sapiens
  Payload ID: 16561
  Gene Symbol: SPATA24
  Gene Name: spermatogenesis associated 24
  ENSP ID: ENSP00000423226
MATPLGWSKAGSGSVCLALDQLRDVIESQEELIHQLRNVMVLQDENFVSKEEFQAVEKKLVEEKAAHAKTKVLLAKEEEKLQFALGEVEVLSKQLEKEKLAFEKAVKSKVLQESSKKDQLITKCNGRREARALHHGYINGLFPNHPVPVSKAGFHSNTCPQLRIQAGPGGPHLRKGLKGPGRPRK

SEQ ID NO: 83212 - protein, 150 aa, Homo sapiens
  Payload ID: 16561
  Gene Symbol: SPATA24
  Gene Name: spermatogenesis associated 24
  ENSP ID: ENSP00000423424
  MOD_RES (1)..(1): Any amino acid
XLGWSKAGSGSVCLALDQLRDVIESQEELIHQLRNVMVLQDENFVSKEEFQAVEKKLVEEKAAHAKTKVLLAKEEEKLQFALGEVEVLSKQLEKEKLAFEKALSSVKSKVLQESSKKDQLITKCNGITCLTSGSRSSRRATWPRCWTRSI

SEQ ID NO: 83213 - protein, 166 aa, Homo sapiens
  Payload ID: 16561
  Gene Symbol: SPATA24
  Gene Name: spermatogenesis associated 24
  ENSP ID: ENSP00000424248
MATPLGWSKAGSGSVCLALDQLRDVIESQEELIHQLRNVEEKAAHAKTKVLLAKEEEKLQFALGEVEVLSKQLEKEKLAFEKALSSVKSKVLQESSKKDQLITKCNGRREARALHHGYINGLFPNHPVPVSKAGFHSNTCPQLRIQAGPGGPHLRKGLKGPGRPRK

SEQ ID NO: 83214 - protein, 153 aa, Homo sapiens
  Payload ID: 16561
  Gene Symbol: SPATA24
  Gene Name: spermatogenesis associated 24
  ENSP ID: ENSP00000426748
KEEFQAVEKKLVEEKAAHAKTKVLLAKEEEKLQFALGEVEVLSKQLEKEKLAFEKAVKSKVLQESSKKDQLITKCNEIESHIIKQEDILNGKENEIKELQQVISQQKQIFRNHMSDFRIQKQQESYMAQVLDQKHKKASGTRQARSHQHPREK

SEQ ID NO: 83215 - protein, 227 aa, Homo sapiens
  Payload ID: 16562
  Gene Symbol: SPATA25
  Gene Name: spermatogenesis associated 25
  Uniprot ID: Q9BR10
  ENSP ID: ENSP00000361597
MSYFRTPQTHPGPLPSGQGGAASPGLSLGLCSPVEPVVVASGGTGPLSQKAEQVAPAAQAWGPALAMPQARGCPGGTSWETLRKEYSRNCHKFPHVRQLESLGWDNGYSRSRAPDLGGPSRPRPLMLCGLSPRVLPVPSEAVGKEASSQPDICILTLAMMIAGIPTVPVPGVREEDLIWAAQAFMMAHPEPEGAVEGARWEQAHAHTASGKMPLVRSKRGQPPGSCL

SEQ ID NO: 83216 - protein, 424 aa, Homo sapiens
  Payload ID: 16563
  Gene Symbol: SPATA2L
  Gene Name: spermatogenesis associated 2-like
  Uniprot ID: Q8IUW3
  ENSP ID: ENSP00000289805
MGSSSLSEDYRQCLERELRRGRAGVCGDPSLRAVLWQILVEDFDLHGALQDDALALLTDGLWGRADLAPALRGLARAFELLELAAVHLYLLPWRKEFTTIKTFSGGYVHVLKGVLSDDLLLKSFQKMGYVRRDSHRLMVTALPPACQLVQVALGCFALRLECEILGEVLAQLGTSVLPAEELLQARRASGDVASCVAWLQQRLAQDEEPPPLPPRGSPAAYRAPLDLYRDLQEDEGSEDASLYGEPSPGPDSPPAELAYRPPLWEQSAKLWGTGGRAWEPPAEELPQASSPPYGALEEGLEPEPSAFSFLSLRRELSRPGDLATPESSAAASPRRIRAEGVPASAYRSVSEPPGYQAHSCLSPGALPTLCCDTCRQLHAAHCAALPACRPGHSLRVLLGDAQRRLWLQRAQMDTLLYNSPGARP

SEQ ID NO: 83217 - protein, 152 aa, Homo sapiens
  Payload ID: 16563
  Gene Symbol: SPATA2L
  Gene Name: spermatogenesis associated 2-like
  Uniprot ID: Q8IUW3
  ENSP ID: ENSP00000334006
MGSSSLSEDYRQCLERELRRGRAGVCGDPSLRAVLWQILVEDFDLHGALQDDALALLTDGLWGRADLAPALRGLARAFELLELAAVHLYLLPWRKEFTTIKTFSGGYVHVLKGVLSDDLLLKSFQKMGYVRRDSHRLMLCWSQSAGLCRVHG

SEQ ID NO: 83218 - protein, 180 aa, Homo sapiens
  Payload ID: 16563
  Gene Symbol: SPATA2L
  Gene Name: spermatogenesis associated 2-like
  ENSP ID: ENSP00000458083
MGSSSLSEDYRQCLERELRRGRAGVCGDPSLRAVLWQILVEDFDLHGALQDDALALLTDGLWGRADLAPALRGLARAFELLELAAVHLYLLPWRKEFTTIKTFSGGYVHVLKGVLSDDLLLKSFQKMGYVRRDSHRLMVTALPPACQLVQVALGCFALRLECEILGEVLAQLGTSVLPAE

SEQ ID NO: 83219 - protein, 192 aa, Homo sapiens
  Payload ID: 16564
  Gene Symbol: SPATA3
  Gene Name: spermatogenesis associated 3
  Uniprot ID: Q8NHX4
  ENSP ID: ENSP00000388741
MKKVKKKRSEARRHRDSTSQHASSNSTSQQPSPESTPQQPSPESTPQQPSPESTPQHSSLETTSRQPAFQALPAPEIRRSSCCLLSPDANVKAAPQSRKAGPLIRAGPHSCSCATCPCSSACWRRLGLCHSRIFDVLLPRDWQMAPGRGLPNLLTFYRKSSRKPSSHRNACPPSPRNCGCGSGGSRSCLLHH

SEQ ID NO: 83220 - protein, 192 aa, Homo sapiens; identical to SEQ ID NO: 83219
  Payload ID: 16564
  Gene Symbol: SPATA3
  Gene Name: spermatogenesis associated 3
  Uniprot ID: Q8NHX4
  ENSP ID: ENSP00000388895

SEQ ID NO: 83221 - protein, 37 aa, Homo sapiens
  Payload ID: 16564
  Gene Symbol: SPATA3
  Gene Name: spermatogenesis associated 3
  ENSP ID: ENSP00000395644
MKKVKKKRASDSRRPAFLLLCHLPLQLRLLASSGAMP

SEQ ID NO: 83222 - protein, 192 aa, Homo sapiens; identical to SEQ ID NO: 83219
  Payload ID: 16564
  Gene Symbol: SPATA3
  Gene Name: spermatogenesis associated 3
  Uniprot ID: Q8NHX4
  ENSP ID: ENSP00000399514

SEQ ID NO: 83223 - protein, 192 aa, Homo sapiens; identical to SEQ ID NO: 83219
  Payload ID: 16564
  Gene Symbol: SPATA3
  Gene Name: spermatogenesis associated 3
  Uniprot ID: Q8NHX4
  ENSP ID: ENSP00000403804

SEQ ID NO: 83224 - protein, 104 aa, Homo sapiens
  Payload ID: 16564
  Gene Symbol: SPATA3
  Gene Name: spermatogenesis associated 3
  ENSP ID: ENSP00000404510
STPQQPSPESTPQQPSPESTPQHSSLETTSRQPAFQALPAPEIRRSSCCLLSPDANVKAAPQSRKAENLQENPPVIVTRVLQALGTVAVALGALGAAYYITESL

SEQ ID NO: 83225 - protein, 87 aa, Homo sapiens
  Payload ID: 16564
  Gene Symbol: SPATA3
  Gene Name: spermatogenesis associated 3
  ENSP ID: ENSP00000411374
  MOD_RES (1)..(1): Any amino acid
XSTPQHSSLETTSRQPAFQALPAPEIRRSSCCLLSPDANVKAAPQSRKAENLQENPPVIVTRVLQALGTVAVALGALGAAYYITESL

SEQ ID NO: 83226 - protein, 6 aa, Homo sapiens
  Payload ID: 16564
  Gene Symbol: SPATA3
  Gene Name: spermatogenesis associated 3
  ENSP ID: ENSP00000436378
  MOD_RES (1)..(1): Any amino acid
XCLLHH

SEQ ID NO: 83227 - protein, 181 aa, Homo sapiens
  Payload ID: 16564
  Gene Symbol: SPATA3
  Gene Name: spermatogenesis associated 3
  ENSP ID: ENSP00000478372
MKKVKKKRSEARRHRDSTSQHASSNSTSQHPESTPQQPSPESTPQHSSLETTSRQPAFQALPAPEIRRSSCCLLSPDANVKAAPQSRKAGPLIRAGPHSCSCATCPCSSACWRRLGLCHSRIFDVLLPRDWQMAPGRGLPNLLTFYRKSSRKPSSHRNACPPSPRNCGCGSGGSRSCLLHH

SEQ ID NO: 83228 - protein, 384 aa, Homo sapiens
  Payload ID: 16565
  Gene Symbol: SPATA32
  Gene Name: spermatogenesis associated 32
  Uniprot ID: Q96LK8
  ENSP ID: ENSP00000331532
MGVTGAHGFPCCGKGSVEVAEMRDDLSQHQIQEEQELEADMLEQKPQLQVDLDLDPDPDPDPELEIGQVPALLESELYPALKLEAELDTEANSNEESDFEEPMQLVCKIESVHSNMGLPTPQTFRPWSLNSNCRSFTEENHVSACHHSISAQTSKHLFWANKLIQASEHSLQRAINMQLNNGSAGQPIRSPLREAIPTNALCSEEQLQIPDAHSAPPTTSSQAPSPLLSSDLPPPIDLTELITFASSLAMASSSRMDLPSLEHMMKAPPQEALEPSTEPLLTTVEEREPENHAETLPEKPREARAPLKSWSQEDKNFAQSYFDFSKPGIKRATIKGQIQLLQPPATSPLLQGSKEDSVPPGKEKENPLLVKIHFKLSAPTIPEK

SEQ ID NO: 83229 - protein, 40 aa, Homo sapiens
  Payload ID: 16565
  Gene Symbol: SPATA32
  Gene Name: spermatogenesis associated 32
  ENSP ID: ENSP00000467344
MGVTGMSRTLPEEGFPGIRNSICKGTGCRKACGTLGVASA

SEQ ID NO: 83230 - protein, 37 aa, Homo sapiens
  Payload ID: 16565
  Gene Symbol: SPATA32
  Gene Name: spermatogenesis associated 32
  ENSP ID: ENSP00000467901
MGVTGAHGFPCCGKGSVEVAEMRDDLSQHQIQEEQEL

SEQ ID NO: 83231 - protein, 139 aa, Homo sapiens
  Payload ID: 16566
  Gene Symbol: SPATA33
  Gene Name: spermatogenesis associated 33
  Uniprot ID: Q96N06
  ENSP ID: ENSP00000301031
MVTHAAGARTFCEEQKKGSTYSVPKSKEKLMEKHSQEARQADRESEKPVDSLHPGAGTAKHPPPAASLEEKPDVKQKSSRKKVVVPQIIITRASNETLVSCSSSGSDQQRTIREPEDWGPYRRHRNPSTADAYNSHLKE

SEQ ID NO: 83232 - protein, 68 aa, Homo sapiens
  Payload ID: 16566
  Gene Symbol: SPATA33
  Gene Name: spermatogenesis associated 33
  ENSP ID: ENSP00000455761
TFCESLPAPRPRRCGDPGLRRRGRWAHPWAFPKAKRNPGKVKEAQALGSPRLRPWARAQGGAGLGGAV

SEQ ID NO: 83233 - protein, 48 aa, Homo sapiens
  Payload ID: 16566
  Gene Symbol: SPATA33
  Gene Name: spermatogenesis associated 33
  ENSP ID: ENSP00000456696
  MOD_RES (1)..(1): Any amino acid
XRRCGDPGLRRRGRWAHPWAFPKAKRNPGKVRSKRRDPPIQFQNLRRS

SEQ ID NO: 83234 - protein, 146 aa, Homo sapiens
  Payload ID: 16566
  Gene Symbol: SPATA33
  Gene Name: spermatogenesis associated 33
  ENSP ID: ENSP00000461933
TPLARGPFVSRSRLRGRGGEEQKKGSTYSVPKSKEKLMEKHSQEARQADRESEKPVDSLHPGAGTAKHPPPAASLEEKPDVKQKSSRKKVVVPQIIITRASNETLVSCSSSGSDQQRTIREPEDWGPYRRHRNPSTADAYNSHLKE

SEQ ID NO: 83235 - protein, 27 aa, Homo sapiens
  Payload ID: 16566
  Gene Symbol: SPATA33
  Gene Name: spermatogenesis associated 33
  ENSP ID: ENSP00000462233
  MOD_RES (1)..(1): Any amino acid
XGTRACVGGGGGLTHGPFQKQRETQER

SEQ ID NO: 83236 - protein, 42 aa, Homo sapiens
  Payload ID: 16566
  Gene Symbol: SPATA33
  Gene Name: spermatogenesis associated 33
  ENSP ID: ENSP00000462319
MEKHSQEARQADRESEKPVDSLHPGAGTAKHPPPAASLEVTG

SEQ ID NO: 83237 - protein, 38 aa, Homo sapiens
  Payload ID: 16566
  Gene Symbol: SPATA33
  Gene Name: spermatogenesis associated 33
  ENSP ID: ENSP00000462403
  MOD_RES (1)..(1): Any amino acid
XSRSRLRGRGGVGTRACVGGGGGLTHGPFQKQRETQER

SEQ ID NO: 83238 - protein, 140 aa, Homo sapiens
  Payload ID: 16566
  Gene Symbol: SPATA33
  Gene Name: spermatogenesis associated 33
  Uniprot ID: Q96N06
  ENSP ID: ENSP00000462996
MGLSKSKEKPRKGEEQKKGSTYSVPKSKEKLMEKHSQEARQADRESEKPVDSLHPGAGTAKHPPPAASLEEKPDVKQKSSRKKVVVPQIIITRASNETLVSCSSSGSDQQRTIREPEDWGPYRRHRNPSTADAYNSHLKE

SEQ ID NO: 83239 - protein, 109 aa, Homo sapiens
  Payload ID: 16566
  Gene Symbol: SPATA33
  Gene Name: spermatogenesis associated 33
  ENSP ID: ENSP00000481797
MEKHSQEARQADRESEKPVDSLHPGAGTAKHPPPAASLEEKPDVKQKSSRKKVVVPQIIITRASNETLVSCSSSGSDQQRTIREPEDWGPYRRHRNPSTADAYNSHLKE

SEQ ID NO: 83240 - protein, 305 aa, Homo sapiens
  Payload ID: 16567
  Gene Symbol: SPATA4
  Gene Name: spermatogenesis associated 4
  Uniprot ID: Q8NEY3
  ENSP ID: ENSP00000280191
MAAAGQEKGYLTQTAAALDKSPSLSPQLAAPIRGRPKKCLVYPHAPKSSRLSRSVLRWLQGLDLSFFPRNINRDFSNGFLIAEIFCIYYPWELELSSFENGTSLKVKLDNWAQLEKFLARKKFKLPKELIHGTIHCKAGVPEILIEEVYTLLTHREIKSIQDDFVNFTDYSYQMRLPLVSRSTVSKSIKDNIRLSELLSNPNMLTNELKAEFLILLHMLQRKLGRKLNPEWFDVKPTVGEVTLNHLPAQASGRRYNLKVKRGRVVPVLPNIGSGGSSHREIHVKQAGQHSYYSAMKPIRNMDKKP

SEQ ID NO: 83241 - protein, 132 aa, Homo sapiens
  Payload ID: 16567
  Gene Symbol: SPATA4
  Gene Name: spermatogenesis associated 4
  ENSP ID: ENSP00000422290
MRLPLVSRSTVSKSIKDNIRLSELLSNPNMLTNELKAEFLILLHMLQRKLGRKLNPEWFDVKPTVGEVTLNHLPAQASGRRYNLKVKRGRVVPVLPNIGSGGSSHREIHVKQAGQHSYYSAMKPIRNMDKKP

SEQ ID NO: 83242 - protein, 76 aa, Homo sapiens
  Payload ID: 16567
  Gene Symbol: SPATA4
  Gene Name: spermatogenesis associated 4
  ENSP ID: ENSP00000425950
KGYLTQTAAALDKSPSLSPQLAAPIRGRPKKCLVYPHAPKSSRLSRSVLRWLQGLDLSFFPRNINRNILYILPLGT

SEQ ID NO: 83243 - protein, 98 aa, Homo sapiens
  Payload ID: 16568
  Gene Symbol: SPATA45
  Gene Name: spermatogenesis associated 45
  Uniprot ID: Q537H7
  ENSP ID: ENSP00000419160
MASINRTIEIMKKHGVSKQHLLEEINKKRESNCLVERSNQVSLLRVQKRHFPDAYQSFTDTTTKEPVPNSGRSSWIKLSLLAHMERKHFPPKNNAIFG

SEQ ID NO: 83244 - protein, 893 aa, Homo sapiens
  Payload ID: 16569
  Gene Symbol: SPATA5
  Gene Name: spermatogenesis associated 5
  Uniprot ID: Q8NB90
  ENSP ID: ENSP00000274008
MSSKKNRKRLNQSAENGSSLPSAASSCAEARAPSAGSDFAATSGTLTVTNLLEKVDDKIPKTFQNSLIHLGLNTMKSANICIGRPVLLTSLNGKQEVYTAWPMAGFPGGKVGLSEMAQKNVGVRPGDAIQVQPLVGAVLQAEEMDVALSDKDMEINEEELTGCILRKLDGKIVLPGNFLYCTFYGRPYKLQVLRVKGADGMILGGPQSDSDTDAQRMAFEQSSMETSSLELSLQLSQLDLEDTQIPTSRSTPYKPIDDRITNKASDVLLDVTQSPGDGSGLMLEEVTGLKCNFESAREGNEQLTEEERLLKFSIGAKCNTDTFYFISSTTRVNFTEIDKNSKEQDNQFKVTYDMIGGLSSQLKAIREIIELPLKQPELFKSYGIPAPRGVLLYGPPGTGKTMIARAVANEVGAYVSVINGPEIISKFYGETEAKLRQIFAEATLRHPSIIFIDELDALCPKREGAQNEVEKRVVASLLTLMDGIGSEVSEGQVLVLGATNRPHALDAALRRPGRFDKEIEIGVPNAQDRLDILQKLLRRVPHLLTEAELLQLANSAHGYVGADLKVLCNEAGLCALRRILKKQPNLPDVKVAGLVKITLKDFLQAMNDIRPSAMREIAIDVPNVSWSDIGGLESIKLKLEQAVEWPLKHPESFIRMGIQPPKGVLLYGPPGCSKTMIAKALANESGLNFLAIKGPELMNKYVGESERAVRETFRKARAVAPSIIFFDELDALAVERGSSLGAGNVADRVLAQLLTEMDGIEQLKDVTILAATNRPDRIDKALMRPGRIDRIIYVPLPDAATRREIFKLQFHSMPVSNEVDLDELILQTDAYSGAEIVAVCREAALLALEEDIQANLIMKRHFTQALSTVTPRIPESLRRFYEDYQEKSGLHTL

SEQ ID NO: 83245 - protein, 753 aa, Homo sapiens
  Payload ID: 16570
  Gene Symbol: SPATA5L1
  Gene Name: spermatogenesis associated 5-like 1
  Uniprot ID: Q9BVQ7
  ENSP ID: ENSP00000305494
MAPDSDPFPEGPLLKLLPLDARDRGTQRCRLGPAALHALGARLGSAVKISLPDGGSCLCTAWPRRDGADGFVQLDPLCASPGAAVGASRSRRSLSLNRLLLVPCPPLRRVAVWPVLRERAGAPGARNTAAVLEAAQELLRNRPISLGHVVVAPPGAPGLVAALHIVGGTPSPDPAGLVTPRTRVSLGGEPPSEAQPQPEVPLGGLSEAADSLRELLRLPLRYPRALTALGLAVPRGVLLAGPPGVGKTQLVRAVAREAGAELLAVSAPALQGSRPGETEENVRRVFQRARELASRGPSLLFLDEMDALCPQRGSRAPESRVVAQVLTLLDGASGDREVVVVGATNRPDALDPALRRPGRFDREVVIGTPTLKQRKEILQVITSKMPISSHVDLGLLAEMTVGYVGADLTALCREAAMHALLHSEKNQDNPVIDEIDFLEAFKNIQPSSFRSVIGLMDIKPVDWEEIGGLEDVKLKLKQSIEWPLKFPWEFVRMGLTQPKGVLLYGPPGCAKTTLVRALATSCHCSFVSVSGADLFSPFVGDSEKVLSQIFRQARASTPAILFLDEIDSILGARSASKTGCDVQERVLSVLLNELDGVGLKTIERRGSKSSQQEFQEVFNRSVMIIAATNRPDVLDTALLRPGRLDKIIYIPPPDHKGRLSILKVCTKTMPIGPDVSLENLAAETCFFSGADLRNLCTEAALLALQENGLDATTVKQEHFLKSLKTVKPSLSCKDLALYENLFKKEGFSNVEGI

SEQ ID NO: 83246 - protein, 258 aa, Homo sapiens
  Payload ID: 16570
  Gene Symbol: SPATA5L1
  Gene Name: spermatogenesis associated 5-like 1
  ENSP ID: ENSP00000431242
  MOD_RES (1)..(1): Any amino acid
XQDNPVIDEIDFLEAFKNIQPSSFRSVIGLMDIKPVDWEEIGGLEDVKLKLKQIFRQARASTPAILFLDEIDSILGARSASKTGCDVQERVLSVLLNELDGVGLKTIERRGSKSSQQEFQEVFNRSVMIIAATNRPDVLDTALLRPGRLDKIIYIPPPDHKGRLSILKVCTKTMPIGPDVSLENLAAETCFFSGADLRNLCTEAALLALQENGLDATTVKQEHFLKSLKTVKPSLSCKDLALYENLFKKEGFSNVEGI

SEQ ID NO: 83247 - protein, 620 aa, Homo sapiens
  Payload ID: 16570
  Gene Symbol: SPATA5L1
  Gene Name: spermatogenesis associated 5-like 1
  Uniprot ID: Q9BVQ7
  ENSP ID: ENSP00000436823
MAPDSDPFPEGPLLKLLPLDARDRGTQRCRLGPAALHALGARLGSAVKISLPDGGSCLCTAWPRRDGADGFVQLDPLCASPGAAVGASRSRRSLSLNRLLLVPCPPLRRVAVWPVLRERAGAPGARNTAAVLEAAQELLRNRPISLGHVVVAPPGAPGLVAALHIVGGTPSPDPAGLVTPRTRVSLGGEPPSEAQPQPEVPLGGLSEAADSLRELLRLPLRYPRALTALGLAVPRGVLLAGPPGVGKTQLVRAVAREAGAELLAVSAPALQGSRPGETEENVRRVFQRARELASRGPSLLFLDEMDALCPQRGSRAPESRVVAQVLTLLDGASGDREVVVVGATNRPDALDPALRRPGRFDREVVIGTPTLKQRKEILQVITSKMPISSHVDLGLLAEMTVGYVGADLTALCREAAMHALLHSEKNQDNPVIDEIDFLEAFKNIQPSSFRSVIGLMDIKPVDWEEIGGLEDVKLKLKQSIEWPLKFPWEFVRMGLTQPKGVLLYGPPGCAKTTLVRALATSCHCSFVSVSGADLFSPFVGDSEKVLSQIFRQARASTPAILFLDEIDSILGARSASKTGCDVQERVLSVLLNELDGVGLKTIERRGSKSSQQGKYKELKK

SEQ ID NO: 83248 - protein, 19 aa, Homo sapiens
  Payload ID: 16570
  Gene Symbol: SPATA5L1
  Gene Name: spermatogenesis associated 5-like 1
  ENSP ID: ENSP00000453091
  MOD_RES (1)..(1): Any amino acid
XLCREAAMHALLHSEKFQV

SEQ ID NO: 83249 - protein, 249 aa, Homo sapiens
  Payload ID: 16571
  Gene Symbol: SPATA6
  Gene Name: spermatogenesis associated 6
  ENSP ID: ENSP00000360907
MQLDKFIYHLAPVEKSHGRLQNRTSRSQKKKSKSPERSKYCINAKNYEQPTISSKSHSPSPYTKRRMCELSEDTRRRLAHLNLGPYEFKKETDKPPFVIRHVDPPSPRADTLLGSSGRDCERDGWSRVHNDHSHLGCCRPKDYKVIRTPHGRDFDDSLEKCEEYLSPRSCSKPRHSARTLLVHSAPSTMPKHSPSPVLNRASLRERFHSDWCSPSNCDEIHDRDERDLEKDDELELKRSLLCRDSAYDS

SEQ ID NO: 83250 - protein, 472 aa, Homo sapiens
  Payload ID: 16571
  Gene Symbol: SPATA6
  Gene Name: spermatogenesis associated 6
  Uniprot ID: Q9NWH7
  ENSP ID: ENSP00000360909
MPKVKALQCALALEISSVTCPGVVLKDKEDIYLSICVFGQYKKTQCVPATFPLVFNARMVFEKVFPDAVDPGDVVTQLEYDTAVFELIQLVPPVGETLSTYDENTRDFMFPGPNQMSGHHDSNRQVTMRRISGLRGNAPRLEFSTTSVITECLISSRKCHTQDKFIYHLAPVEKSHGRLQNRTSRSQKKKSKSPERSKYCINAKNYEQPTISSKSHSPSPYTKRRMCELSEDTRRRLAHLNLGPYEFKKETDKPPFVIRHVDPPSPRADTLLGSSGRDCERDGWSRVHNDHSHLGCCRPKDYKVIRTPHGRDFDDSLEKCEEYLSPRSCSKPRHSARTLLVHSAPSTMPKHSPSPVLNRASLRERFHSDWCSPSNCDEIHDRDERDLEKDDELELKRSLLCRDSAYDSDPEYSSCQQPRGTFHLDDGEYWSNRAASYKGKSHRPIFENSMDKMYRNLYKKACSSASHTQESF

SEQ ID NO: 83251 - protein, 488 aa, Homo sapiens
  Payload ID: 16571
  Gene Symbol: SPATA6
  Gene Name: spermatogenesis associated 6
  Uniprot ID: Q9NWH7
  ENSP ID: ENSP00000360913
MPKVKALQCALALEISSVTCPGVVLKDKEDIYLSICVFGQYKKTQCVPATFPLVFNARMVFEKVFPDAVDPGDVVTQLEYDTAVFELIQLVPPVGETLSTYDENTRDFMFPGPNQMSGHHDSNRQVTMRRISGLRGNAPRLEFSTTSVITECLISSRKCHTQDKFIYHLAPVEKSHGRLQNRTSRSQKKKSKSPERSKYCINAKNYEQPTISSKSHSPSPYTKRRMCELSEDTRRRLAHLNLGPYEFKKETDKPPFVIRHVDPPSPRADTLLGSSGRDCERDGWSRVHNDHSHLGCCRPKDYKVIRTPHGRDFDDSLEKCEEYLSPRSCSKPRHSARTLLVHSAPSTMPKHSPSPVLNRASLRERFHSDWCSPSNCDEIHDRVKNVLKSHQAHQRHLYDERDLEKDDELELKRSLLCRDSAYDSDPEYSSCQQPRGTFHLDDGEYWSNRAASYKGKSHRPIFENSMDKMYRNLYKKACSSASHTQESF

SEQ ID NO: 83252 - protein, 474 aa, Homo sapiens
  Payload ID: 16571
  Gene Symbol: SPATA6
  Gene Name: spermatogenesis associated 6
  ENSP ID: ENSP00000379502
MPKVKALQCALALEISSVTCPGVVLKDKEDIYLSICVFGQYKKTQCVPATFPLVFNARMVFEKVFPDAVDPGDVVTQLELGETLSTYDENTRDFMFPGPNQMSGHHDSNRQVTMRRISGLRGNAPRLEFSTTSVITECLISSRKCHTQDKFIYHLAPVEKSHGRLQNRTSRSQKKKSKSPERSKYCINAKNYEQPTISSKSHSPSPYTKRRMCELSEDTRRRLAHLNLGPYEFKKETDKPPFVIRHVDPPSPRADTLLGSSGRDCERDGWSRVHNDHSHLGCCRPKDYKVIRTPHGRDFDDSLEKCEEYLSPRSCSKPRHSARTLLVHSAPSTMPKHSPSPVLNRASLRERFHSDWCSPSNCDEIHDRVKNVLKSHQAHQRHLYDERDLEKDDELELKRSLLCRDSAYDSDPEYSSCQQPRGTFHLDDGEYWSNRAASYKGKSHRPIFENSMDKMYRNLYKKACSSASHTQESF

SEQ ID NO: 83253 - protein, 86 aa, Homo sapiens
  Payload ID: 16571
  Gene Symbol: SPATA6
  Gene Name: spermatogenesis associated 6
  ENSP ID: ENSP00000474642
MPKVKALQCALALEISSVTCPGVVLKDKEDIYLSICVFGQYKKTQCVPATFPLVFNARMVFEKVFPDAVDPGDVVTQLEWYLSCSG

SEQ ID NO: 83254 - protein, 164 aa, Homo sapiens
  Payload ID: 16571
  Gene Symbol: SPATA6
  Gene Name: spermatogenesis associated 6
  ENSP ID: ENSP00000474844
MNYRRRKDGDKFIYHLAPVEKSHGRLQNRTSRSQKKKSKSPERSKYCINAKNYEQPTISSKSHSPSPYTKRRMCELSEDTRRRLAHLNLGPYEFKKETDKPPFVIRHVDPPSPRADTLLGSSGRDCERDGWSRVHNEYNRSDVLLSVHHTRRSFSSWLLPTQGL

SEQ ID NO: 83255 - protein, 291 aa, Homo sapiens
  Payload ID: 16572
  Gene Symbol: SPATA6L
  Gene Name: spermatogenesis associated 6-like
  ENSP ID: ENSP00000371314
MPLEVVVELQIRAISCPGVFLPGKQDVYLGVYLMNQYLETNSFPSAFPIMIQESMRFEKVFESAVDPGAVVDLLESFLARFELIQLVPPVWDELAYYEENTRDFLFPEPKLTPSHPRRCREVLMKTALGFPGIAPKIEFSTRTAIRECVFLHRNRFLEERHESRRPLSTSHEPIFPLNTIKMKLKENNLNRLPKGMQARAPSQYSTRHFFQDQPAQLNLGNNFKISGGSKPPFVVRHVDSAKPFGENISEHHLRRSRRKSKFSDFPFPTRRGSILVLSPHGRISMRGYAVF

SEQ ID NO: 83256 - protein, 165 aa, Homo sapiens
  Payload ID: 16572
  Gene Symbol: SPATA6L
  Gene Name: spermatogenesis associated 6-like
  Uniprot ID: Q8N4H0
  ENSP ID: ENSP00000384342
MPLEVVVELQIRAISCPGVFLPGKQDVYLGVYLMNQYLETNSFPSAFPIMIQESMRFEKVFESAVDPGAVVDLLESFLARFELIQLVPPVWDELAYYEENTRDFLFPEPKLTPSHPRRCREVLMKTALGFPGIAPKIEFSTRTAIRECVFLHRNRFLVDSKSWLL

SEQ ID NO: 83257 - protein, 334 aa, Homo sapiens
  Payload ID: 16572
  Gene Symbol: SPATA6L
  Gene Name: spermatogenesis associated 6-like
  Uniprot ID: Q8N4H0
  ENSP ID: ENSP00000417063
MPLEVVVELQIRAISCPGVFLPGKQDVYLGVYLMNQYLETNSFPSAFPIMIQESMRFEKGIAPKIEFSTRTAIRECVFLHRNRFLEERHESRRPLSTSHEPIFPLNTIKMKLKENNLNRLPKGMQARAPSQYSTRHFFQDQPAQLNLGNNFKISGGSKPPFVVRHVDSAKPFGENISEHHLRRSRRKSKFSDFPFPTRRASSLDSLAANVKVIKEPDERIVLRSDSSSCLDSSQFGKSSSSKQGDADFHGKASFATYQHSTSPGPLDQPLLRERFHPGSQSTWKNIHERVCSLLTSHRAQLHQNKEDSTSEVNYIIERPSYPLKKYSLHEQRYF

SEQ ID NO: 83258 - protein, 165 aa, Homo sapiens; identical to SEQ ID NO: 83256
  Payload ID: 16572
  Gene Symbol: SPATA6L
  Gene Name: spermatogenesis associated 6-like
  Uniprot ID: Q8N4H0
  ENSP ID: ENSP00000417965

SEQ ID NO: 83259 - protein, 392 aa, Homo sapiens
  Payload ID: 16572
  Gene Symbol: SPATA6L
  Gene Name: spermatogenesis associated 6-like
  Uniprot ID: Q8N4H0
  ENSP ID: ENSP00000418458
MPLEVVVELQIRAISCPGVFLPGKQDVYLGVYLMNQYLETNSFPSAFPIMIQESMRFEKVFESAVDPGAVVDLLEMWDELAYYEENTRDFLFPEPKLTPSHPRRCREVLMKTALGFPGIAPKIEFSTRTAIRECVFLHRNRFLEERHESRRPLSTSHEPIFPLNTIKMKLKENNLNRLPKGMQARAPSQYSTRHFFQDQPAQLNLGNNFKISGGSKPPFVVRHVDSAKPFGENISEHHLRRSRRKSKFSDFPFPTRRASSLDSLAANVKVIKEPDERIVLRSDSSSCLDSSQFGKSSSSKQGDADFHGKASFATYQHSTSPGPLDQPLLRERFHPGSQSTWKNIHERVCSLLTSHRAQLHQNKEDSTSEVNYIIERPSYPLKKYSLHEQRYF

SEQ ID NO: 83260 - protein, 190 aa, Homo sapiens
  Payload ID: 16572
  Gene Symbol: SPATA6L
  Gene Name: spermatogenesis associated 6-like
  ENSP ID: ENSP00000420003
MPLEVVVELQIRAISCPGVFLPGKQDVYLGVYLMNQYLETNSFPSAFPIMIQESMRFEKVFESAVDPGAVVDLLEMWDELAYYEENTRDFLFPEPKLTPSHPRRCREVLMKTALGFPGIAPKIEFSTRTAIRECVFLHRNRFLGWGNKGKMLVQQEHRSLKKKLNRNGTQTSGEGLLSWMLLQEFEGRKT

SEQ ID NO: 83261 - protein, 458 aa, Homo sapiens
  Payload ID: 16573
  Gene Symbol: SPATA7
  Gene Name: spermatogenesis associated 7
  Uniprot ID: Q9P0W8
  ENSP ID: ENSP00000045347
MDGSRRVRATSVLPRYGPPCLFKGHLSTKSNAFCTDSSSLRLSTLQLVKNHMAVHYNKILSAKAAVDCSVPVSVSTSIKYADQQRREKLKKELAQCEKEFKLTKTAMRANYKNNSKSLFNTLQKPSGEPQIEDDMLKEEMNGFSSFARSLVPSSERLHLSLHKSSKVITNGPEKNSSSSPSSVDYAASGPRKLSSGALYGRRPRSTFPNSHRFQLVISKAPSGDLLDKHSELFSNKQLPFTPRTLKTEAKSFLSQYRYYTPAKRKKDFTDQRIEAETQTELSFKSELGTAETKNMTDSEMNIKQASNCVTYDAKEKIAPLPLEGHDSTWDEIKDDALQHSSPRAMCQYSLKPPSTRKIYSDEEELLYLSFIEDVTDEILKLGLFSNRFLERLFERHIKQNKHLEEEKMRHLLHVLKVDLGCTSEENSFSSVKGDNNHDMELSTLKIMEMSIEDCPLDV

SEQ ID NO: 83262 - protein, 567 aa, Homo sapiens
  Payload ID: 16573
  Gene Symbol: SPATA7
  Gene Name: spermatogenesis associated 7
  Uniprot ID: Q9P0W8
  ENSP ID: ENSP00000348991
MDGSRRVRATSVLPRYGPPCLFKGHLSTKSNAAVDCSVPVSVSTSIKYADQQRREKLKKELAQCEKEFKLTKTAMRANYKNNSKSLFNTLQKPSGEPQIEDDMLKEEMNGFSSFARSLVPSSERLHLSLHKSSKVITNGPEKNSSSSPSSVDYAASGPRKLSSGALYGRRPRSTFPNSHRFQLVISKAPSGDLLDKHSELFSNKQLPFTPRTLKTEAKSFLSQYRYYTPAKRKKDFTDQRIEAETQTELSFKSELGTAETKNMTDSEMNIKQASNCVTYDAKEKIAPLPLEGHDSTWDEIKDDALQHSSPRAMCQYSLKPPSTRKIYSDEEELLYLSFIEDVTDEILKLGLFSNRFLERLFERHIKQNKHLEEEKMRHLLHVLKVDLGCTSEENSVKQNDVDMLNVFDFEKAGNSEPNELKNESEVTIQQERQQYQKALDMLLSAPKDENEIFPSPTEFFMPIYKSKHSEGVIIQQVNDETNLETSTLDENHPSISDSLTDRETSVNVIEGDSDPEKVEISNGLCGLNTSPSQSVQFSSVKGDNNHDMELSTLKIMEMSIEDCPLDV

SEQ ID NO: 83263 - protein, 599 aa, Homo sapiens
  Payload ID: 16573
  Gene Symbol: SPATA7
  Gene Name: spermatogenesis associated 7
  Uniprot ID: Q9P0W8
  ENSP ID: ENSP00000377176
MDGSRRVRATSVLPRYGPPCLFKGHLSTKSNAFCTDSSSLRLSTLQLVKNHMAVHYNKILSAKAAVDCSVPVSVSTSIKYADQQRREKLKKELAQCEKEFKLTKTAMRANYKNNSKSLFNTLQKPSGEPQIEDDMLKEEMNGFSSFARSLVPSSERLHLSLHKSSKVITNGPEKNSSSSPSSVDYAASGPRKLSSGALYGRRPRSTFPNSHRFQLVISKAPSGDLLDKHSELFSNKQLPFTPRTLKTEAKSFLSQYRYYTPAKRKKDFTDQRIEAETQTELSFKSELGTAETKNMTDSEMNIKQASNCVTYDAKEKIAPLPLEGHDSTWDEIKDDALQHSSPRAMCQYSLKPPSTRKIYSDEEELLYLSFIEDVTDEILKLGLFSNRFLERLFERHIKQNKHLEEEKMRHLLHVLKVDLGCTSEENSVKQNDVDMLNVFDFEKAGNSEPNELKNESEVTIQQERQQYQKALDMLLSAPKDENEIFPSPTEFFMPIYKSKHSEGVIIQQVNDETNLETSTLDENHPSISDSLTDRETSVNVIEGDSDPEKVEISNGLCGLNTSPSQSVQFSSVKGDNNHDMELSTLKIMEMSIEDCPLDV

SEQ ID NO: 83264 - protein, 85 aa, Homo sapiens
  Payload ID: 16573
  Gene Symbol: SPATA7
  Gene Name: spermatogenesis associated 7
  ENSP ID: ENSP00000450515
MDGSRRVRATSVLPRYGPPCLFKGHLSTKSNAFCTDSSSLRLSTLQLVKNHMAVHYNKILSAKAAVDCSVPVSVSTSIKCLEVLV

SEQ ID NO: 83265 - protein, 228 aa, Homo sapiens
  Payload ID: 16573
  Gene Symbol: SPATA7
  Gene Name: spermatogenesis associated 7
  ENSP ID: ENSP00000450606
MDGSRRVRATSVLPRYGPPCLFKGHLSTKSNAAVDCSVPVSVSTSIKCIHVPWWFAAPINLSSTLDADQQRREKLKKELAQCEKEFKLTKTAMRANYKNNSKSLFNTLQKPSGEPQIEDDMLKEEMNGFSSFARSLVPSSERLHLSLHKSSKVITNGPEKNSSSSPSSVDYAASGPRKLSSGALYGRRPRSTFPNSHRFQLVISKAPSGDLLDKHSELFSNKQLPFTP

SEQ ID NO: 83266 - protein, 46 aa, Homo sapiens
  Payload ID: 16573
  Gene Symbol: SPATA7
  Gene Name: spermatogenesis associated 7
  ENSP ID: ENSP00000450654
MDGSRRGKGQLSGATAASPLAPGGAPSLGSGQLSARPPLGALPTPG

SEQ ID NO: 83267 - protein, 91 aa, Homo sapiens
  Payload ID: 16573
  Gene Symbol: SPATA7
  Gene Name: spermatogenesis associated 7
  ENSP ID: ENSP00000450809
  MOD_RES (1)..(1): Any amino acid
XAMCQYSLKPPSTRKIYSDEEELLYLSFIEDVTDEILKLGLFSNRFLERLFERHIKQNKHLEEEKMRHLLHVLKVDLGCTSEENSVRIPDD

SEQ ID NO: 83268 - protein, 81 aa, Homo sapiens
  Payload ID: 16573
  Gene Symbol: SPATA7
  Gene Name: spermatogenesis associated 7
  ENSP ID: ENSP00000450882
MDGSRRVRATSVLPRYGPPCLFKGHLSTKSNAFCTDSSSLRLSTLQLVKNHMAVHYNKILSAKAAVDCSVPVSVSTSIKCI

SEQ ID NO: 83269 - protein, 76 aa, Homo sapiens
  Payload ID: 16573
  Gene Symbol: SPATA7
  Gene Name: spermatogenesis associated 7
  ENSP ID: ENSP00000451019
SFIEDVTDEILKLGLFSNRFLERLFERHIKQNKHLEEEKMRHLLHVLKVDLGCTSEENSIPDAATTGPKTTPLEDE

SEQ ID NO: 83270 - protein, 567 aa, Homo sapiens; identical to SEQ ID NO: 83262
  Payload ID: 16573
  Gene Symbol: SPATA7
  Gene Name: spermatogenesis associated 7
  Uniprot ID: Q9P0W8
  ENSP ID: ENSP00000451128

SEQ ID NO: 83271 - protein, 42 aa, Homo sapiens
  Payload ID: 16573
  Gene Symbol: SPATA7
  Gene Name: spermatogenesis associated 7
  ENSP ID: ENSP00000451181
MDGSRRVRATSVLPRYGPPCLFKGHLSTKSNGVLEIREFWSL

SEQ ID NO: 83272 - protein, 46 aa, Homo sapiens; identical to SEQ ID NO: 83266
  Payload ID: 16573
  Gene Symbol: SPATA7
  Gene Name: spermatogenesis associated 7
  ENSP ID: ENSP00000451663

SEQ ID NO: 83273 - protein, 86 aa, Homo sapiens
  Payload ID: 16573
  Gene Symbol: SPATA7
  Gene Name: spermatogenesis associated 7
  ENSP ID: ENSP00000451690
MDGSRRVRATSVLPRYGPPCLFKGHLSTKSNAFCTDSSSLRLSTLQLVKNHMAVHYNKILSAKAAVDCSVPVSMQTNNEERNSKRN

SEQ ID NO: 83274 - protein, 53 aa, Homo sapiens
  Payload ID: 16573
  Gene Symbol: SPATA7
  Gene Name: spermatogenesis associated 7
  ENSP ID: ENSP00000452359
MDGSRRVRATSVLPRYGPPCLFKGHLSTKSNAAVDCSVPVSVSTSIKCLEVLV

SEQ ID NO: 83275 - protein, 46 aa, Homo sapiens; identical to SEQ ID NO: 83266
  Payload ID: 16573
  Gene Symbol: SPATA7
  Gene Name: spermatogenesis associated 7
  ENSP ID: ENSP00000452364

SEQ ID NO: 83276 - protein, 138 aa, Homo sapiens
  Payload ID: 16573
  Gene Symbol: SPATA7
  Gene Name: spermatogenesis associated 7
  ENSP ID: ENSP00000452435
MDGSRRAAVDCSVPVSVSTSIKYADQQRREKLKKELAQCEKEFKLTKTAMRANYKNNSKSLFNTLQKPSGEPQIEDDMLKEEMNGFSSFARSLVPSSERLHLSLHKSSKVITNGPEKNSSSSPSSVDYAASGPRKLSS

SEQ ID NO: 83277 - protein, 49 aa, Homo sapiens
  Payload ID: 16573
  Gene Symbol: SPATA7
  Gene Name: spermatogenesis associated 7
  ENSP ID: ENSP00000452546
MDGSRRVRATSVLPRYGPPCLFKGHLSTKSNAAVDCSVPVSVSTSIKCI

SEQ ID NO: 83278 - protein, 105 aa, Homo sapiens
  Payload ID: 16574
  Gene Symbol: SPATA8
  Gene Name: spermatogenesis associated 8
  Uniprot ID: Q6RVD6
  ENSP ID: ENSP00000328149
MAPAGMSGAQDNSCLYQEIAPSFQRLPCPRTSSRHFSEAMTCPCGWRPFKGGPGGLKGPVWPAKEENSCSHGRIQRVQRRRVPSASPLIQKINRRSVLFHPYCWS

SEQ ID NO: 83279 - protein, 68 aa, Homo sapiens
  Payload ID: 16574
  Gene Symbol: SPATA8
  Gene Name: spermatogenesis associated 8
  ENSP ID: ENSP00000453026
MSLRLEAFQGWPRRPQGPGVACKGREQLFSRKDPKGSKAKGAICFPTDSEDKQEKCPVSPILLVLIFQ

SEQ ID NO: 83280 - protein, 254 aa, Homo sapiens
  Payload ID: 16575
  Gene Symbol: SPATA9
  Gene Name: spermatogenesis associated 9
  Uniprot ID: Q9BWV2
  ENSP ID: ENSP00000274432
MPIKPVGWICGQVLKNFSGRIEGIQKAIMDLVDEFKDEFPTILRLSQSNQKREPAQKTSKIRMAIALAKINRATLIRGLNSISRSSKSVAKLLHPQLACRLLELRDISGRLLREVNAPRQPLYNIQVRKGSLFEIISFPAKTALTSIIYASYAALIYLAVCVNAVLKKVKNIFQEEESIRQNREESENCRKAFSEPVLSEPMFAEGEIKAKPYRSLPEKPDISDYPKLLANKQSNNIQVLHSVFDQSAEMNEQI

SEQ ID NO: 83281 - protein, 254 aa, Homo sapiens; identical to SEQ ID NO: 83280
  Payload ID: 16575
  Gene Symbol: SPATA9
  Gene Name: spermatogenesis associated 9
  Uniprot ID: Q9BWV2
  ENSP ID: ENSP00000325491

SEQ ID NO: 83282 - protein, 135 aa, Homo sapiens
  Payload ID: 16575
  Gene Symbol: SPATA9
  Gene Name: spermatogenesis associated 9
  Uniprot ID: Q9BWV2
  ENSP ID: ENSP00000420883
MPIKPVGWICGQVLKNFSGRIEGIQKAIMDLVDEFKDEFPTILRLSQSNQKREPAQKTSKIRMAIALAKINRATLIRGLNSISRSSKSVAKLLHPQLACRLLELRDISGRLLREVNAPRQPLYNIQEKKMGLQLS

SEQ ID NO: 83283 - protein, 178 aa, Homo sapiens
  Payload ID: 16575
  Gene Symbol: SPATA9
  Gene Name: spermatogenesis associated 9
  Uniprot ID: Q9BWV2
  ENSP ID: ENSP00000427257
MPIKPVGWICGQVLKNFSGRIEGIQKAIMDLVDEFKDEFPTILRLSQSNQVRKGSLFEIISFPAKTALTSIIYASYAALIYLAVCVNAVLKKVKNIFQEEESIRQNREESENCRKAFSEPVLSEPMFAEGEIKAKPYRSLPEKPDISDYPKLLANKQSNNIQVLHSVFDQSAEMNEQI

SEQ ID NO: 83284 - protein, 118 aa, Homo sapiens
  Payload ID: 16576
  Gene Symbol: SPATS1
  Gene Name: spermatogenesis associated, serine-rich 1
  ENSP ID: ENSP00000423654
MSPSMLTGNSPRGCRLPSISSTTCGRQLEKVPEKRDSGMTEVERTYSANCSDFLESKGCFANTTPSGKSVSSSSSVETGPSVSEPPGLPRVSAYVDTTADLDRKLSFSHSDHSSEMSL

SEQ ID NO: 83285 - protein, 300 aa, Homo sapiens
  Payload ID: 16576
  Gene Symbol: SPATS1
  Gene Name: spermatogenesis associated, serine-rich 1
  Uniprot ID: Q496A3
  ENSP ID: ENSP00000424400
MSPSMLTGNSPRGCRLPSISSTTCGRQLEKVPEKRDSGMTEVERTYSANCSDFLESKGCFANTTPSGKSVSSSSSVETGPSVSEPPGLPRVSAYVDTTADLDRKLSFSHSDHSSEMSLPEVQKDKYPEEFSLLKLQTKDGHRPEWTFYPRFSSNIHTYHVGKQCFFNGVFLGNKRSLSERTVDKCFGRKKYDIDPRNGIPKLTPGDNPYMYPEQSKGFHKAGSMLPPVNFSIVPYEKKFDTFIPLEPLPQIPNLPFWVKEKANSLKNEIQEVEELDNWQPAVPLMHMLHLSGALDFPRQS

SEQ ID NO: 83286 - protein, 71 aa, Homo sapiens
  Payload ID: 16576
  Gene Symbol: SPATS1
  Gene Name: spermatogenesis associated, serine-rich 1
  ENSP ID: ENSP00000424823
MSPSMLTGNSPRGCRLPSISSTTCGRQLEKVPEKRDSGMTEVERTYKSTTKAESLINYLTGSHSSGEVYYL

SEQ ID NO: 83287 - protein, 300 aa, Homo sapiens; identical to SEQ ID NO: 83285
  Payload ID: 16576
  Gene Symbol: SPATS1
  Gene Name: spermatogenesis associated, serine-rich 1
  Uniprot ID: Q496A3
  ENSP ID: ENSP00000437552

SEQ ID NO: 83288 - protein, 545 aa, Homo sapiens
  Payload ID: 16577
  Gene Symbol: SPATS2
  Gene Name: spermatogenesis associated, serine-rich 2
  Uniprot ID: Q86XZ4
  ENSP ID: ENSP00000326841
MSRKQNQKDSSGFIFDLQSNTVLAQGGAFENMKEKINAVRAIVPNKSNNEIILVLQHFDNCVDKTVQAFMEGSASEVLKEWTVTGKKKNKKKKNKPKPAAEPSNGIPDSSKSVSIQEEQSAPSSEKGGMNGYHVNGAINDTESVDSLSEGLETLSIDARELEDPESAMLDTLDRTGSMLQNGVSDFETKSLTMHSIHNSQQPRNAAKSLSRPTTETQFSNMGMEDVPLATSKKLSSNIEKSVKDLQRCTVSLARYRVVVKEEMDASIKKMKQAFAELESCLMDREVALLAEMDKVKAEAMEILLSRQKKAELLKKMTHVAVQMSEQQLVELRADIKHFVSERKYDEDLGRVARFTCDVETLKKSIDSFGQVSHPKNSYSTRSRCSSVTSVSLSSPSDASAASSSTCASPPSLTSANKKNFAPGETPAAIANSSGQPYQPLREVLPGNRRGGQGYRPQGQKSNDPMNQGRHDSMGRYRNSSWYSSGSRYQSAPSQAPGNTIERGQTHSAGTNGTGVSMEPSPPTPSFKKGLPQRKPRTSQTEAVNS

SEQ ID NO: 83289 - protein, 36 aa, Homo sapiens
  Payload ID: 16577
  Gene Symbol: SPATS2
  Gene Name: spermatogenesis associated, serine-rich 2
  ENSP ID: ENSP00000446900
MSRKQNQKDSSGFIFDLQSNTVLAQGGAFENMKEKV

SEQ ID NO: 83290 - protein, 8 aa, Homo sapiens
  Payload ID: 16577
  Gene Symbol: SPATS2
  Gene Name: spermatogenesis associated, serine-rich 2
  ENSP ID: ENSP00000447131
MSRKQNQK

SEQ ID NO: 83291 - protein, 66 aa, Homo sapiens
  Payload ID: 16577
  Gene Symbol: SPATS2
  Gene Name: spermatogenesis associated, serine-rich 2
  ENSP ID: ENSP00000447296
MSRKQNQKDSSGFIFDLQSNTVLAQGGAFENMKEKINAVRAIVPNKSNNEIILVLQHFDNCVDKTV

SEQ ID NO: 83292 - protein, 34 aa, Homo sapiens
  Payload ID: 16577
  Gene Symbol: SPATS2
  Gene Name: spermatogenesis associated, serine-rich 2
  ENSP ID: ENSP00000447526
MSRKQNQKDSSGFIFDLQSNTVLAQGGAFENMKE

SEQ ID NO: 83293 - protein, 545 aa, Homo sapiens; identical to SEQ ID NO: 83288
  Payload ID: 16577
  Gene Symbol: SPATS2
  Gene Name: spermatogenesis associated, serine-rich 2
  Uniprot ID: Q86XZ4
  ENSP ID: ENSP00000447947

SEQ ID NO: 83294 - protein, 10 aa, Homo sapiens
  Payload ID: 16577
  Gene Symbol: SPATS2
  Gene Name: spermatogenesis associated, serine-rich 2
  ENSP ID: ENSP00000448174
MSRKQNQKDS

SEQ ID NO: 83295 - protein, 545 aa, Homo sapiens; identical to SEQ ID NO: 83288
  Payload ID: 16577
  Gene Symbol: SPATS2
  Gene Name: spermatogenesis associated, serine-rich 2
  Uniprot ID: Q86XZ4
  ENSP ID: ENSP00000448228

SEQ ID NO: 83296 - protein, 295 aa, Homo sapiens
  Payload ID: 16577
  Gene Symbol: SPATS2
  Gene Name: spermatogenesis associated, serine-rich 2
  ENSP ID: ENSP00000448459
MSRKQNQKDSSGFIFDLQSNTVLAQGGAFENMKEKINAVRAIVPNKSNNEIILVLQHFDNCVDKTVQAFMEGSASEVLKEWTVTGKKKNKKKKNKPKPAAEPSNGIPDSSKSVSIQEEQSAPSSEKGGMNGYHVNGAINDTESVDSLSEGLETLSIDARELEDPESAMLDTLDRTGSMLQNGVSDFETKSLTMHSIHNSQQPRNAAKSLSRPTTETQFSNMGMEDVPLATSKKLSSNIEKSVKDLQRCTVSLARYRVVVKEEMDASIKKMKQAFAELESWYSNAARVLGAKYCQV

SEQ ID NO: 83297 - protein, 74 aa, Homo sapiens
  Payload ID: 16577
  Gene Symbol: SPATS2
  Gene Name: spermatogenesis associated, serine-rich 2
  ENSP ID: ENSP00000448522
MSRKQNQKDSSGFIFDLQSNTVLAQGGAFENMKEKINAVRAIVPNKSNNEIILVLQHFDNCVDKTVQAFMEGSA

SEQ ID NO: 83298 - protein, 67 aa, Homo sapiens
  Payload ID: 16577
  Gene Symbol: SPATS2
  Gene Name: spermatogenesis associated, serine-rich 2
  ENSP ID: ENSP00000448830
MSRKQNQKDSSGFIFDLQSNTVLAQGGAFENMKEKINAVRAIVPNKSNNEIILVLQHFDNCVDKTVQ

SEQ ID NO: 83299 - protein, 98 aa, Homo sapiens
  Payload ID: 16577
  Gene Symbol: SPATS2
  Gene Name: spermatogenesis associated, serine-rich 2
  ENSP ID: ENSP00000449406
MSRKQNQKDSSGFIFDLQSNTVLAQGGAFENMKEKINAVRAIVPNKSNNEIILVLQHFDNCVDKTVQAFMEGSASEVLKEWTVTGKKKNKKKKNKPKP

SEQ ID NO: 83300 - protein, 63 aa, Homo sapiens
  Payload ID: 16577
  Gene Symbol: SPATS2
  Gene Name: spermatogenesis associated, serine-rich 2
  ENSP ID: ENSP00000449431
MSRKQNQKDSSGFIFDLQSNTVLAQGGAFENMKEKAGVQWRDLSSLHTSASRVQVILLPQPPV

SEQ ID NO: 83301 - protein, 8 aa, Homo sapiens
  Payload ID: 16577
  Gene Symbol: SPATS2
  Gene Name: spermatogenesis associated, serine-rich 2
  ENSP ID: ENSP00000449509
MSRKQNQK

SEQ ID NO: 83302 - protein, 75 aa, Homo sapiens
  Payload ID: 16577
  Gene Symbol: SPATS2
  Gene Name: spermatogenesis associated, serine-rich 2
  ENSP ID: ENSP00000449615
MSRKQNQKGRRARVNKEGTGGHECWNRLAASVPAGVNSVWAPWQHPGCGVPVTPEAPEGMLQCSSGSAICGRLKC

SEQ ID NO: 83303 - protein, 5 aa, Homo sapiens
  Payload ID: 16577
  Gene Symbol: SPATS2
  Gene Name: spermatogenesis associated, serine-rich 2
  ENSP ID: ENSP00000449623
MSRKQ

SEQ ID NO: 83304 - protein, 33 aa, Homo sapiens
  Payload ID: 16577
  Gene Symbol: SPATS2
  Gene Name: spermatogenesis associated, serine-rich 2
  ENSP ID: ENSP00000449738
MSRKQNQKDSSGFIFDLQSNTVLAQGGAFENMK

SEQ ID NO: 83305 - protein, 558 aa, Homo sapiens
  Payload ID: 16578
  Gene Symbol: SPATS2L
  Gene Name: spermatogenesis associated, serine-rich 2-like
  Uniprot ID: Q9NUQ6
  ENSP ID: ENSP00000351503
MAELNTHVNVKEKIYAVRSVVPNKSNNEIVLVLQQFDFNVDKAVQAFVDGSAIQVLKEWNMTGKKKNNKRKRSKSKQHQGNKDAKDKVERPEAGPLQPQPPQIQNGPMNGCEKDSSSTDSANEKPALIPREKKISILEEPSKALRGVTEGNRLLQQKLSLDGNPKPIHGTTERSDGLQWSAEQPCNPSKPKAKTSPVKSNTPAAHLEIKPDELAKKRGPNIEKSVKDLQRCTVSLTRYRVMIKEEVDSSVKKIKAAFAELHNCIIDKEVSLMAEMDKVKEEAMEILTARQKKAEELKRLTDLASQMAEMQLAELRAEIKHFVSERKYDEELGKAARFSCDIEQLKAQIMLCGEITHPKNNYSSRTPCSSLLPLLNAHAATSGKQSNFSRKSSTHNKPSEGKAANPKMVSSLPSTADPSHQTMPANKQNGSSNQRRRFNPQYHNNRLNGPAKSQGSGNEAEPLGKGNSRHEHRRQPHNGFRPKNKGGAKNQEASLGMKTPEAPAHSEKPRRRQHAADTSEARPFRGSVGRVSQCNLCPTRIEVSTDAAVLSVPAVTLVA

SEQ ID NO: 83306 - protein, 489 aa, Homo sapiens
  Payload ID: 16578
  Gene Symbol: SPATS2L
  Gene Name: spermatogenesis associated, serine-rich 2-like
  Uniprot ID: Q9NUQ6
  ENSP ID: ENSP00000353989
MAELNTHVNVKEKIYAVRSVVPNKSNNEIVLVLQQFDFNVDKAVQAFVDGSAIQVLKEWNMTGKKKNNKRKRSKSKQHQGNKDAKDKVERPEAGPLQPQPPQIQNGPMNGCEKDSSSTDSANEKPALIPREKKISILEEPSKALRGVTGPNIEKSVKDLQRCTVSLTRYRVMIKEEVDSSVKKIKAAFAELHNCIIDKEVSLMAEMDKVKEEAMEILTARQKKAEELKRLTDLASQMAEMQLAELRAEIKHFVSERKYDEELGKAARFSCDIEQLKAQIMLCGEITHPKNNYSSRTPCSSLLPLLNAHAATSGKQSNFSRKSSTHNKPSEGKAANPKMVSSLPSTADPSHQTMPANKQNGSSNQRRRFNPQYHNNRLNGPAKSQGSGNEAEPLGKGNSRHEHRRQPHNGFRPKNKGGAKNQEASLGMKTPEAPAHSEKPRRRQHAADTSEARPFRGSVGRVSQCNLCPTRIEVSTDAAVLSVPAVTLVA

SEQ ID NO: 83307 - protein, 566 aa, Homo sapiens
  Payload ID: 16578
  Gene Symbol: SPATS2L
  Gene Name: spermatogenesis associated, serine-rich 2-like
  Uniprot ID: Q9NUQ6
  ENSP ID: ENSP00000386310
MAYSTRSKMAELNTHVNVKEKIYAVRSVVPNKSNNEIVLVLQQFDFNVDKAVQAFVDGSAIQVLKEWNMTGKKKNNKRKRSKSKQHQGNKDAKDKVERPEAGPLQPQPPQIQNGPMNGCEKDSSSTDSANEKPALIPREKKISILEEPSKALRGVTEGNRLLQQKLSLDGNPKPIHGTTERSDGLQWSAEQPCNPSKPKAKTSPVKSNTPAAHLEIKPDELAKKRGPNIEKSVKDLQRCTVSLTRYRVMIKEEVDSSVKKIKAAFAELHNCIIDKEVSLMAEMDKVKEEAMEILTARQKKAEELKRLTDLASQMAEMQLAELRAEIKHFVSERKYDEELGKAARFSCDIEQLKAQIMLCGEITHPKNNYSSRTPCSSLLPLLNAHAATSGKQSNFSRKSSTHNKPSEGKAANPKMVSSLPSTADPSHQTMPANKQNGSSNQRRRFNPQYHNNRLNGPAKSQGSGNEAEPLGKGNSRHEHRRQPHNGFRPKNKGGAKNQEASLGMKTPEAPAHSEKPRRRQHAADTSEARPFRGSVGRVSQCNLCPTRIEVSTDAAVLSVPAVTLVA

SEQ ID NO: 83308 - protein, 558 aa, Homo sapiens; identical to SEQ ID NO: 83305
  Payload ID: 16578
  Gene Symbol: SPATS2L
  Gene Name: spermatogenesis associated, serine-rich 2-like
  Uniprot ID: Q9NUQ6
  ENSP ID: ENSP00000386336

SEQ ID NO: 83309 - protein, 498 aa, Homo sapiens
  Payload ID: 16578
  Gene Symbol: SPATS2L
  Gene Name: spermatogenesis associated, serine-rich 2-like
  ENSP ID: ENSP00000386391
MTGKKKNNKRKRSKSKQHQGNKDAKDKVERPEAGPLQPQPPQIQNGPMNGCEKDSSSTDSANEKPALIPREKKISILEEPSKALRGVTEGNRLLQQKLSLDGNPKPIHGTTERSDGLQWSAEQPCNPSKPKAKTSPVKSNTPAAHLEIKPDELAKKRGPNIEKSVKDLQRCTVSLTRYRVMIKEEVDSSVKKIKAAFAELHNCIIDKEVSLMAEMDKVKEEAMEILTARQKKAEELKRLTDLASQMAEMQLAELRAEIKHFVSERKYDEELGKAARFSCDIEQLKAQIMLCGEITHPKNNYSSRTPCSSLLPLLNAHAATSGKQSNFSRKSSTHNKPSEGKAANPKMVSSLPSTADPSHQTMPANKQNGSSNQRRRFNPQYHNNRLNGPAKSQGSGNEAEPLGKGNSRHEHRRQPHNGFRPKNKGGAKNQEASLGMKTPEAPAHSEKPRRRQHAADTSEARPFRGSVGRVSQCNLCPTRIEVSTDAAVLSVPAVTLVA

SEQ ID NO: 83310 - protein, 265 aa, Homo sapiens
  Payload ID: 16578
  Gene Symbol: SPATS2L
  Gene Name: spermatogenesis associated, serine-rich 2-like
  ENSP ID: ENSP00000386600
MAELNTHVNVKEKIYAVRSVVPNKSNNEIVLVLQQFDFNVDKAVQAFVDGSAIQVLKEWNMTGKKKNNKRKRSKSKQHQGNKDAKDKVERPEAGPLQPQPPQIQNGPMNGCEKDSSSTDSANEKPALIPREKKISILEEPSKALRGVTGPNIEKSVKDLQRCTVSLTRYRVMIKEEVDSSVKKIKAAFAELHNCIIDKEVSLMAEMDKVKEEAMEILTARQKKAEELKRLTDLASQMAEMQLAELRAEIKHFVSERKYDEELGKA

SEQ ID NO: 83311 - protein, 558 aa, Homo sapiens; identical to SEQ ID NO: 83305
  Payload ID: 16578
  Gene Symbol: SPATS2L
  Gene Name: spermatogenesis associated, serine-rich 2-like
  Uniprot ID: Q9NUQ6
  ENSP ID: ENSP00000386730

SEQ ID NO: 83312 - protein, 558 aa, Homo sapiens; identical to SEQ ID NO: 83305
  Payload ID: 16578
  Gene Symbol: SPATS2L
  Gene Name: spermatogenesis associated, serine-rich 2-like
  Uniprot ID: Q9NUQ6
  ENSP ID: ENSP00000386931

SEQ ID NO: 83313 - protein, 475 aa, Homo sapiens
  Payload ID: 16578
  Gene Symbol: SPATS2L
  Gene Name: spermatogenesis associated, serine-rich 2-like
  ENSP ID: ENSP00000387333
MLKTRWRGLRQGPQPQPPQIQNGPMNGCEKDSSSTDSANEKPALIPREKKISILEEPSKALRGVTEGNRLLQQKLSLDGNPKPIHGTTERSDGLQWSAEQPCNPSKPKAKTSPVKSNTPAAHLEIKPDELAKKRGPNIEKSVKDLQRCTVSLTRYRVMIKEEVDSSVKKIKAAFAELHNCIIDKEVSLMAEMDKVKEEAMEILTARQKKAEELKRLTDLASQMAEMQLAELRAEIKHFVSERKYDEELGKAARFSCDIEQLKAQIMLCGEITHPKNNYSSRTPCSSLLPLLNAHAATSGKQSNFSRKSSTHNKPSEGKAANPKMVSSLPSTADPSHQTMPANKQNGSSNQRRRFNPQYHNNRLNGPAKSQGSGNEAEPLGKGNSRHEHRRQPHNGFRPKNKGGAKNQEASLGMKTPEAPAHSEKPRRRQHAADTSEARPFRGSVGRVSQCNLCPTRIEVSTDAAVLSVPAVTLVA

SEQ ID NO: 83314 - protein, 188 aa, Homo sapiens
  Payload ID: 16578
  Gene Symbol: SPATS2L
  Gene Name: spermatogenesis associated, serine-rich 2-like
  ENSP ID: ENSP00000389908
MAELNTHVNVKEKIYAVRSVVPNKSNNEIVLVLQQFDFNVDKAVQAFVDGSAIQVLKEWNMTGKKKNNKRKRSKSKQHQGNKDAKDKVERPEAGPLQPQPPQIQNGPMNGCEKDSSSTDSANEKPALIPREKKISILEEPSKALRGVTEGNRLLQQKLSLDGNPKPIHGTTERSDGLQWSAEQPCNPS

SEQ ID NO: 83315 - protein, 193 aa, Homo sapiens
  Payload ID: 16578
  Gene Symbol: SPATS2L
  Gene Name: spermatogenesis associated, serine-rich 2-like
  ENSP ID: ENSP00000390506
MAELNTHVNVKEKIYAVRSVVPNKSNNEIVLVLQQFDFNVDKAVQAFVDGSAIQVLKEWNMTGKKKNNKRKRSKSKQHQGNKDAKDKVERPEAGPLQPQPPQIQNGPMNGCEKDSSSTDSANEKPALIPREKKISILEEPSKALRGVTGPNIEKSVKDLQRCTVSLTRYRVMIKEEVDSSVKKIKAAFAELHN

SEQ ID NO: 83316 - protein, 558 aa, Homo sapiens; identical to SEQ ID NO: 83305
  Payload ID: 16578
  Gene Symbol: SPATS2L
  Gene Name: spermatogenesis associated, serine-rich 2-like
  Uniprot ID: Q9NUQ6
  ENSP ID: ENSP00000391467

SEQ ID NO: 83317 - protein, 139 aa, Homo sapiens
  Payload ID: 16578
  Gene Symbol: SPATS2L
  Gene Name: spermatogenesis associated, serine-rich 2-like
  ENSP ID: ENSP00000396109
MAELNTHVNVKEKIYAVRSVVPNKSNNEIVLVLQQFDFNVDKAVQAFVDGSAIQVLKEWNMTGKKKNNKRKRSKSKQHQGNKDAKDKVERPEAGPLQPQPPQIQNGPMNGCEKDSSSTDSANEKPALIPREKKISILEE

SEQ ID NO: 83318 - protein, 13 aa, Homo sapiens
  Payload ID: 16578
  Gene Symbol: SPATS2L
  Gene Name: spermatogenesis associated, serine-rich 2-like
  ENSP ID: ENSP00000398198
MAELNTHVNVKEK

SEQ ID NO: 83319 - protein, 154 aa, Homo sapiens
  Payload ID: 16578
  Gene Symbol: SPATS2L
  Gene Name: spermatogenesis associated, serine-rich 2-like
  ENSP ID: ENSP00000402559
MAELNTHVNVKEKIYAVRSVVPNKSNNEIVLVLQQFDFNVDKAVQAFVDGSAIQVLKEWNMTGKKKNNKRKRSKSKQHQGNKDAKDKVERPEAGPLQPQPPQIQNGPMNGCEKDSSSTDSANEKPALIPREKKISILEEPSKALRGVTEGNRLL

SEQ ID NO: 83320 - protein, 23 aa, Homo sapiens
  Payload ID: 16578
  Gene Symbol: SPATS2L
  Gene Name: spermatogenesis associated, serine-rich 2-like
  ENSP ID: ENSP00000405506
MAELNTHVNVKEKIYAVRSVVPN

SEQ ID NO: 83321 - protein, 117 aa, Homo sapiens
  Payload ID: 16578
  Gene Symbol: SPATS2L
  Gene Name: spermatogenesis associated, serine-rich 2-like
  ENSP ID: ENSP00000405751
  MOD_RES (1)..(1): Any amino acid
XPNIEKSVKDLQRCTVSLTRYRVMIKEEVDSSVKKIKAAFAELHNCIIDKEVSLMAEMDKVKEEAKSHPVTQAGVQWHNLCSLQAPPPRFTPFSCLSLLSSWDYRRPPPRPANFLGF

SEQ ID NO: 83322 - protein, 94 aa, Homo sapiens
  Payload ID: 16578
  Gene Symbol: SPATS2L
  Gene Name: spermatogenesis associated, serine-rich 2-like
  ENSP ID: ENSP00000406728
MAELNTHVNVKEKIYAVRSVVPNKSNNEIVLVLQQFDFNVDKAVQAFVDGSAIQVLKEWNMTGKKKNNKRKRSKSKQHQGNKDAKDKVERPEAG

SEQ ID NO: 83323 - protein, 115 aa, Homo sapiens
  Payload ID: 16578
  Gene Symbol: SPATS2L
  Gene Name: spermatogenesis associated, serine-rich 2-like
  ENSP ID: ENSP00000411294
MAELNTHVNVKEKIYAVRSVVPNKSNNEIVLVLQQFDFNVDKAVQAFVDGSAIQVLKEWNMTGKKKNNKRKRSKSKQHQGNKDAKDKVERPEAGPLQPQPPQIQNGPMNGCEKDS

SEQ ID NO: 83324 - protein, 173 aa, Homo sapiens
  Payload ID: 16578
  Gene Symbol: SPATS2L
  Gene Name: spermatogenesis associated, serine-rich 2-like
  ENSP ID: ENSP00000413142
MAELNTHVNVKEKIYAVRSVVPNKSNNEIVLVLQQFDFNVDKAVQAFVDGSAIQVLKEWNMTGKKKNNKRKRSKSKQHQGNKDAKDKVERPEAGPLQPQPPQIQNGPMNGCEKDSSSTDSANEKPALIPREKKISILEEPSKALRGVTGPNIEKSVKDLQRCTVSLTRYRVMI

SEQ ID NO: 83325 - protein, 238 aa, Homo sapiens
  Payload ID: 16578
  Gene Symbol: SPATS2L
  Gene Name: spermatogenesis associated, serine-rich 2-like
  ENSP ID: ENSP00000413648
MAGGQTNMIYAVRSVVPNKSNNEIVLVLQQFDFNVDKAVQAFVDGSAIQVLKEWNMTGKKKNNKRKRSKSKQHQGNKDAKDKVERPEAGPLQPQPPQIQNGPMNGCEKDSSSTDSANEKPALIPREKKISILEEPSKALRGVTGPNIEKSVKDLQRCTVSLTRYRVMIKEEVDSSVKKIKAAFAELHNCIIDKEVSLMAEMDKVKEEAMEILTARQKKAEELKRLTDLASQMAEMQLA

SEQ ID NO: 83326 - protein, 588 aa, Homo sapiens
  Payload ID: 16578
  Gene Symbol: SPATS2L
  Gene Name: spermatogenesis associated, serine-rich 2-like
  Uniprot ID: Q9NUQ6
  ENSP ID: ENSP00000482515
MDPFCHSSSETRLLSGTLLWIPRAYSTRSKMAELNTHVNVKEKIYAVRSVVPNKSNNEIVLVLQQFDFNVDKAVQAFVDGSAIQVLKEWNMTGKKKNNKRKRSKSKQHQGNKDAKDKVERPEAGPLQPQPPQIQNGPMNGCEKDSSSTDSANEKPALIPREKKISILEEPSKALRGVTEGNRLLQQKLSLDGNPKPIHGTTERSDGLQWSAEQPCNPSKPKAKTSPVKSNTPAAHLEIKPDELAKKRGPNIEKSVKDLQRCTVSLTRYRVMIKEEVDSSVKKIKAAFAELHNCIIDKEVSLMAEMDKVKEEAMEILTARQKKAEELKRLTDLASQMAEMQLAELRAEIKHFVSERKYDEELGKAARFSCDIEQLKAQIMLCGEITHPKNNYSSRTPCSSLLPLLNAHAATSGKQSNFSRKSSTHNKPSEGKAANPKMVSSLPSTADPSHQTMPANKQNGSSNQRRRFNPQYHNNRLNGPAKSQGSGNEAEPLGKGNSRHEHRRQPHNGFRPKNKGGAKNQEASLGMKTPEAPAHSEKPRRRQHAADTSEARPFRGSVGRVSQCNLCPTRIEVSTDAAVLSVPAVTLVA

SEQ ID NO: 83327 - protein, 430 aa, Homo sapiens
  Payload ID: 16579
  Gene Symbol: SPZ1
  Gene Name: spermatogenic leucine zipper 1
  Uniprot ID: Q9BXG8
  ENSP ID: ENSP00000369611
MASSAKSAEMPTISKTVNPTPDPHQEYLDPRITIALFEIGSHSPSSWGSLPFLKNSSHQVTEQQTAQKFNNLLKEIKDILKNMAGFEEKITEAKELFEETNITEDVSAHKENIRGLDKINEMLSTNLPVSLAPEKEDNEKKQEMILETNITEDVSAHKENIRGLDKINEMLSTNLPVSLAPEKEDNEKKQQMIMENQNSENTAQVFARDLVNRLEEKKVLNETQQSQEKAKNRLNVQEETMKIRNNMEQLLQEAEHWSKQHTELSKLIKSYQKSQKDISETLGNNGVGFQTQPNNEVSAKHELEEQVKKLSHDTYSLQLMAALLENECQILQQRVEILKELHHQKQGTLQEKPIQINYKQDKKNQKPSEAKKVEMYKQNKQAMKGTFWKKDRSCRSLDVCLNKKACNTQFNIHVARKALRGKMRSASSLR

SEQ ID NO: 83328 - protein, 234 aa, Homo sapiens
  Payload ID: 16579
  Gene Symbol: SPZ1
  Gene Name: spermatogenic leucine zipper 1
  ENSP ID: ENSP00000426530
MASSAKSAEMPTISKTVNPTPDPHQEYLDPRITIALFEIGSHSPSSWGSLPFLKNSSHQVTEQQTAQKFNNLLKEIKDILKNMAGFEEKITEAKELFEETNITEDVSAHKENIRGLDKINEMLSTNLPVSLAPEKEDNEKKQEMILETNITEDVSAHKENIRGLDKINEMLSTNLPVSLAPEKEDNEKKQQMIMENQNSENTAQVFARDLVNRLEEKKVLNETQQSQEKAKNRL

SEQ ID NO: 83329 - protein, 302 aa, Homo sapiens
  Payload ID: 16580
  Gene Symbol: SRM
  Gene Name: spermidine synthase
  Uniprot ID: P19623
  ENSP ID: ENSP00000366156
MEPGPDGPAASGPAAIREGWFRETCSLWPGQALSLQVEQLLHHRRSRYQDILVFRSKTYGNVLVLDGVIQCTERDEFSYQEMIANLPLCSHPNPRKVLIIGGGDGGVLREVVKHPSVESVVQCEIDEDVIQVSKKFLPGMAIGYSSSKLTLHVGDGFEFMKQNQDAFDVIITDSSDPMGPAESLFKESYYQLMKTALKEDGVLCCQGECQWLHLDLIKEMRQFCQSLFPVVAYAYCTIPTYPSGQIGFMLCSKNPSTNFQEPVQPLTQQQVAQMQLKYYNSDVHRAAFVLPEFARKALNDVS

SEQ ID NO: 83330 - protein, 93 aa, Homo sapiens
  Payload ID: 16580
  Gene Symbol: SRM
  Gene Name: spermidine synthase
  ENSP ID: ENSP00000465687
MEPGPDGPAASGPAAIREGWFRETCSLWPGQALSLQVEQLLHHRRSRYQDILVFRREPRSPTVTPPAVRPMATCWCWTVSSSARRETSSPTRR

SEQ ID NO: 83331 - protein, 83 aa, Homo sapiens
  Payload ID: 16580
  Gene Symbol: SRM
  Gene Name: spermidine synthase
  ENSP ID: ENSP00000465966
  MOD_RES (1)..(1): Any amino acid
XSGQIGFMLCSKNPSTNFQEPVQPLTQQQVAQMQLKYYNSDVHRAAFVLPEFARKVGGLRGWVVGPRDPERPPDWPHVPPGPE

SEQ ID NO: 83332 - protein, 134 aa, Homo sapiens
  Payload ID: 16580
  Gene Symbol: SRM
  Gene Name: spermidine synthase
  ENSP ID: ENSP00000467669
  MOD_RES (1)..(1): Any amino acid
XDGGVLREVVKHPSVESVVQCEIDEVSAGVEPGLSPGSPSGQLCPEMAAHPRARQDVIQVSKKFLPGMAIGYSSSKLTLHVGDGFEFMKQNQDAFDVIITDSSDPMGPAESLFKESYYQLMKTALKEDGVLCCQ

SEQ ID NO: 83333 - protein, 119 aa, Homo sapiens
  Payload ID: 16580
  Gene Symbol: SRM
  Gene Name: spermidine synthase
  ENSP ID: ENSP00000468760
MGRPSSPRAAWGTFSPPQRTQVPDCHSARSKTYGNVLVLDGVIQCTERDEFSYQEMIANLPLCSHPNPRKVLIIGGGDGGVLREVVKHPSVESVVQCEIDEDVIQVSKKFLPGMAIGYS

SEQ ID NO: 83334 - protein, 508 aa, Homo sapiens
  Payload ID: 16581
  Gene Symbol: SATL1
  Gene Name: spermidine/spermine N1-acetyl transferase-like 1
  Uniprot ID: Q86VE3
  ENSP ID: ENSP00000378804
MSPPGMWQPGVQQPGISQQVPSHPDMSQPGMSQQVPSQPGIRQPDTSQSCKNQTDMSQPDANQSSLSDSNQTGIIQPSPSLLGMNQMDMNQWSASLYEMNQVDMKQPSMSQAGMRQSGTNLPDINQPGMKQPGTWQLGRSQPGMWPQSLSELVLSEASISQPGPPQRAPSQSGPRQSSTSQAGTNQSGISQPVMWQLDMRQSGGSQPSMRQVGTSQSGTSQIGMSQPGTWQTGLSQPVPRQPNKSPPGMWQRGMWQPGMSQQVPSQLGMRQPGTSQSSKNQTGMSHPGRGQPGIWEPGPSQPGLSQQDLNQLVLSQPGLSQPGRSQPSVSQMGMRQTSMDYFQIRHAEAGDCPEILRLIKELAACENMLDAMELTAADLLRDGFGDNPLFYCLIAEVNDQQKPSGKLTVGFAMYYFTYDSWTGKVLYLEDFYVTQAYQGLGIGAEMLKRLSQIAITTQCNCMHFLVVIWNQASINYYTSRGALDLSSEEGWHLFRFNREELLDMAWEE

SEQ ID NO: 83335 - protein, 632 aa, Homo sapiens
  Payload ID: 16581
  Gene Symbol: SATL1
  Gene Name: spermidine/spermine N1-acetyl transferase-like 1
  Uniprot ID: Q86VE3
  ENSP ID: ENSP00000425421
MNQSGTNQSSLSDSNQAGINQPSTNSLGMNQMDMNQGSASLYEMNQVDMKQPSMSQAGMRQSGTNLPDINQPDMKQPDTWQLGRSQPGMLQQELSQLVLSKAGISQPDPSQPGPSQSGPSQSRMRQIGTNQSGMSQPVMQQLDSQSGGSQPSMRQVGTSQLGTSQIGMSQPGTWQTGLSQPVLRQPNMSPPGMWQPGVQQPGISQQVPSHPDMSQPGMSQQVPSQPGIRQPDTSQSCKNQTDMSQPDANQSSLSDSNQTGIIQPSPSLLGMNQMDMNQWSASLYEMNQVDMKQPSMSQAGMRQSGTNLPDINQPGMKQPGTWQLGRSQPGMWPQSLSELVLSEASISQPGPPQRAPSQSGPRQSSTSQAGTNQSGISQPVMWQLDMRQSGGSQPSMRQVGTSQSGTSQIGMSQPGTWQTGLSQPVPRQPNKSPPGMWQRGMWQPGMSQQVPSQLGMRQPGTSQSSKNQTGMSHPGRGQPGIWEPGPSQPGLSQQDLNQLVLSQPGLSQPGRSQPSVSQMGMRQTSMDYFQIRHAEAGDCPEILRLIKELAACENMLDAMELTAADLLRDGFGDNPLFYCLIAEVNDQQKPSGKLTVGFAMYYFTYDSWTGKVLYLEDFYVTQAYQDSHHNSM

SEQ ID NO: 83336 - protein, 150 aa, Homo sapiens
  Payload ID: 16582
  Gene Symbol: SAT1
  Gene Name: spermidine/spermine N1-acetyltransferase 1
  ENSP ID: ENSP00000368553
MAKFVIRPATAADCSDILRLIKELAKYEYMEEQVILTEKGNSTVAGRGTSVRCLSPSPRPLPPLLPLLADLLEDGFGEHPFYHCLVAEVPKEHWTPEGNPSPFPEARETKCYVRSSVGCVEPLTTQAEVTENLDRKNSQQVFKLLRKKKN

SEQ ID NO: 83337 - protein, 120 aa, Homo sapiens
  Payload ID: 16582
  Gene Symbol: SAT1
  Gene Name: spermidine/spermine N1-acetyltransferase 1
  ENSP ID: ENSP00000368555
MAKFVIRPATAADCSDILRLIKELAKYEYMEEQVILTEKDLLEDGFGEHPFYHCLVAEVPKEHWTPEGNPSPFPEARETKCYVRSSVGCVEPLTTQAEVTENLDRKNSQQVFKLLRKKKN

SEQ ID NO: 83338 - protein, 143 aa, Homo sapiens
  Payload ID: 16582
  Gene Symbol: SAT1
  Gene Name: spermidine/spermine N1-acetyltransferase 1
  ENSP ID: ENSP00000368556
MAKFVIRPATAADCSDILRLIKELAKYEYMEEQVILTEKGHSIVGFAMYYFTYDPWIGKLLYLEDFFVMSDYRGFGIGSEILKNLSQVAMRCRCSSMHFLVAEWNEPSINFYKRRGASDLSSEEGWRLFKIDKEYLLKMATEE

SEQ ID NO: 83339 - protein, 171 aa, Homo sapiens
  Payload ID: 16582
  Gene Symbol: SAT1
  Gene Name: spermidine/spermine N1-acetyltransferase 1
  Uniprot ID: P21673
  ENSP ID: ENSP00000368572
MAKFVIRPATAADCSDILRLIKELAKYEYMEEQVILTEKDLLEDGFGEHPFYHCLVAEVPKEHWTPEGHSIVGFAMYYFTYDPWIGKLLYLEDFFVMSDYRGFGIGSEILKNLSQVAMRCRCSSMHFLVAEWNEPSINFYKRRGASDLSSEEGWRLFKIDKEYLLKMATEE

SEQ ID NO: 83340 - protein, 170 aa, Homo sapiens
  Payload ID: 16583
  Gene Symbol: SAT2
  Gene Name: spermidine/spermine N1-acetyltransferase family member 2
  Uniprot ID: Q96F10
  ENSP ID: ENSP00000269298
MASVRIREAKEGDCGDILRLIRELAEFEKLSDQVKISEEALRADGFGDNPFYHCLVAEILPAPGKLLGPCVVGYGIYYFIYSTWKGRTIYLEDIYVMPEYRGQGIGSKIIKKVAEVALDKGCSQFRLAVLDWNQRAMDLYKALGAQDLTEAEGWHFFCFQGEATRKLAGK

SEQ ID NO: 83341 - protein, 136 aa, Homo sapiens
  Payload ID: 16583
  Gene Symbol: SAT2
  Gene Name: spermidine/spermine N1-acetyltransferase family member 2
  ENSP ID: ENSP00000458385
MASVRIREAKEGDCGDILRLIRELAEFEKLSDQVKISEEALRADGFGDNPFYHCLVAEILPAPGKLLGQGIGSKIIKKVAEVALDKGCSQFRLAVLDWNQRAMDLYKALGAQDLTEAEGWHFFCFQGEATRKLAGK

SEQ ID NO: 83342 - protein, 41 aa, Homo sapiens
  Payload ID: 16583
  Gene Symbol: SAT2
  Gene Name: spermidine/spermine N1-acetyltransferase family member 2
  ENSP ID: ENSP00000458818
MASVRIREAKEGDCGDILRLIRVKTAGASRIRKTLGSGEDQ

SEQ ID NO: 83343 - protein, 41 aa, Homo sapiens; identical to SEQ ID NO: 83342
  Payload ID: 16583
  Gene Symbol: SAT2
  Gene Name: spermidine/spermine N1-acetyltransferase family member 2
  ENSP ID: ENSP00000459985

SEQ ID NO: 83344 - protein, 532 aa, Homo sapiens
  Payload ID: 16584
  Gene Symbol: SMOX
  Gene Name: spermine oxidase
  Uniprot ID: Q9NWM0
  ENSP ID: ENSP00000278795
MQSCESSGDSADDPLSRGLRRRGQPRVVVIGAGLAGLAAAKALLEQGFTDVTVLEASSHIGGRVQSVKLGHATFELGATWIHGSHGNPIYHLAEANGLLEETTDGERSVGRISLYSKNGVACYLTNHGRRIPKDVVEEFSDLYNEVYNLTQEFFRHDKPVNAESQNSVGVFTREEVRNRIRNDPDDPEATKRLKLAMIQQYLKVESCESSSHSMDEVSLSAFGEWTEIPGAHHIIPSGFMRVVELLAEGIPAHVIQLGKPVRCIHWDQASARPRGPEIEPRGVLKRQYTSFFRPGLPTEKVAAIHRLGIGTTDKIFLEFEEPFWGPECNSLQFVWEDEAESHTLTYPPELWYRKICGFDVLYPPERYGHVLSGWICGEEALVMEKCDDEAVAEICTEMLRQFTGNPNIPKPRRILRSAWGSNPYFRGSYSYTQVGSSGADVEKLAKPLPYTESSKTAHGSSTKQQPGHLFSSKCPEQPLDANRGAVKPMQVLFSGEATHRKYYSTTHGALLSGQREAARLIEMYRDLFQQGT

SEQ ID NO: 83345 - protein, 555 aa, Homo sapiens
  Payload ID: 16584
  Gene Symbol: SMOX
  Gene Name: spermine oxidase
  Uniprot ID: Q9NWM0
  ENSP ID: ENSP00000307252
MQSCESSGDSADDPLSRGLRRRGQPRVVVIGAGLAGLAAAKALLEQGFTDVTVLEASSHIGGRVQSVKLGHATFELGATWIHGSHGNPIYHLAEANGLLEETTDGERSVGRISLYSKNGVACYLTNHGRRIPKDVVEEFSDLYNEVYNLTQEFFRHDKPVNAESQNSVGVFTREEVRNRIRNDPDDPEATKRLKLAMIQQYLKVESCESSSHSMDEVSLSAFGEWTEIPGAHHIIPSGFMRVVELLAEGIPAHVIQLGKPVRCIHWDQASARPRGPEIEPRGEGDHNHDTGEGGQGGEEPRGGRWDEDEQWSVVVECEDCELIPADHVIVTVSLGVLKRQYTSFFRPGLPTEKVAAIHRLGIGTTDKIFLEFEEPFWGPECNSLQFVWEDEAESHTLTYPPELWYRKICGFDVLYPPERYGHVLSGWICGEEALVMEKCDDEAVAEICTEMLRQFTGNPNIPKPRRILRSAWGSNPYFRGSYSYTQVGSSGADVEKLAKPLPYTESSKTAPMQVLFSGEATHRKYYSTTHGALLSGQREAARLIEMYRDLFQQGT

SEQ ID NO: 83346 - protein, 190 aa, Homo sapiens
  Payload ID: 16584
  Gene Symbol: SMOX
  Gene Name: spermine oxidase
  Uniprot ID: Q9NWM0
  ENSP ID: ENSP00000341775
MQSCESSGDSADDPLSRGLRRRGQPRVVVIGAGLAGLAAAKALLEQGFTDVTVLEASSHIGGRVQSVKLGHATFELGATWIHGSHGNPIYHLAEANGLLEETTDGERSVGRISLYSKNGVACYLTNHGRRIPKDVVEEFSDLYNEPMQVLFSGEATHRKYYSTTHGALLSGQREAARLIEMYRDLFQQGT

SEQ ID NO: 83347 - protein, 502 aa, Homo sapiens
  Payload ID: 16584
  Gene Symbol: SMOX
  Gene Name: spermine oxidase
  Uniprot ID: Q9NWM0
  ENSP ID: ENSP00000344595
MQSCESSGDSADDPLSRGLRRRGQPRVVVIGAGLAGLAAAKALLEQGFTDVTVLEASSHIGGRVQSVKLGHATFELGATWIHGSHGNPIYHLAEANGLLEETTDGERSVGRISLYSKNGVACYLTNHGRRIPKDVVEEFSDLYNEVYNLTQEFFRHDKPVNAESQNSVGVFTREEVRNRIRNDPDDPEATKRLKLAMIQQYLKVESCESSSHSMDEVSLSAFGEWTEIPGAHHIIPSGFMRVVELLAEGIPAHVIQLGKPVRCIHWDQASARPRGPEIEPRGVLKRQYTSFFRPGLPTEKVAAIHRLGIGTTDKIFLEFEEPFWGPECNSLQFVWEDEAESHTLTYPPELWYRKICGFDVLYPPERYGHVLSGWICGEEALVMEKCDDEAVAEICTEMLRQFTGNPNIPKPRRILRSAWGSNPYFRGSYSYTQVGSSGADVEKLAKPLPYTESSKTAPMQVLFSGEATHRKYYSTTHGALLSGQREAARLIEMYRDLFQQGT

SEQ ID NO: 83348 - protein, 555 aa, Homo sapiens; identical to SEQ ID NO: 83345
  Payload ID: 16584
  Gene Symbol: SMOX
  Gene Name: spermine oxidase
  Uniprot ID: Q9NWM0
  ENSP ID: ENSP00000368773

SEQ ID NO: 83349 - protein, 442 aa, Homo sapiens
  Payload ID: 16584
  Gene Symbol: SMOX
  Gene Name: spermine oxidase
  ENSP ID: ENSP00000407269
NEVYNLTQEFFRHDKPVNAESQNSVGVFTREEVRNRIRNDPDDPEATKRLKLAMIQQYLKVESCESSSHSMDEVSLSAFGEWTEIPGAHHIIPSGFMRVVELLAEGIPAHVIQLGKPVRCIHWDQASARPRGPEIEPRGEGDHNHDTGEGGQGGEEPRGGRWDEDEQWSVVVECEDCELIPADHVIVTVSLGVLKRQYTSFFRPGLPTEKVAAIHRLGIGTTDKIFLEFEEPFWGPECNSLQFVWEDEAESHTLTYPPELWYRKICGFDVLYPPERYGHVLSGWICGEEALVMEKCDDEAVAEICTEMLRQFTGNPNIPKPRRILRSAWGSNPYFRGSYSYTQVGSSGADVEKLAKPLPYTESSKTAHGSSTKQQPGHLFSSKCPEQPLDANRGAVKPMQVLFSGEATHRKYYSTTHGALLSGQREAARLIEMYRDLFQQGT

SEQ ID NO: 83350 - protein, 585 aa, Homo sapiens
  Payload ID: 16584
  Gene Symbol: SMOX
  Gene Name: spermine oxidase
  Uniprot ID: Q9NWM0
  ENSP ID: ENSP00000478305
MQSCESSGDSADDPLSRGLRRRGQPRVVVIGAGLAGLAAAKALLEQGFTDVTVLEASSHIGGRVQSVKLGHATFELGATWIHGSHGNPIYHLAEANGLLEETTDGERSVGRISLYSKNGVACYLTNHGRRIPKDVVEEFSDLYNEVYNLTQEFFRHDKPVNAESQNSVGVFTREEVRNRIRNDPDDPEATKRLKLAMIQQYLKVESCESSSHSMDEVSLSAFGEWTEIPGAHHIIPSGFMRVVELLAEGIPAHVIQLGKPVRCIHWDQASARPRGPEIEPRGEGDHNHDTGEGGQGGEEPRGGRWDEDEQWSVVVECEDCELIPADHVIVTVSLGVLKRQYTSFFRPGLPTEKVAAIHRLGIGTTDKIFLEFEEPFWGPECNSLQFVWEDEAESHTLTYPPELWYRKICGFDVLYPPERYGHVLSGWICGEEALVMEKCDDEAVAEICTEMLRQFTGNPNIPKPRRILRSAWGSNPYFRGSYSYTQVGSSGADVEKLAKPLPYTESSKTAHGSSTKQQPGHLFSSKCPEQPLDANRGAVKPMQVLFSGEATHRKYYSTTHGALLSGQREAARLIEMYRDLFQQGT

SEQ ID NO: 83351 - protein, 313 aa, Homo sapiens
  Payload ID: 16585
  Gene Symbol: SMS
  Gene Name: spermine synthase
  Uniprot ID: P52788
  ENSP ID: ENSP00000368714
MAAARHSTLDFMLGAKADGETILKGLQSIFQEQGMAESVHTWQDHGYLATYTNKNGRLPPIVRGGAIDRYWPTADGRLVEYDIDEVVYDEDSPYQNIKILHSKQFGNILILSGDVNLAESDLAYTRAIMGSGKEDYTGKDVLILGGGDGGILCEIVKLKPKMVTMVEIDQMVIDGCKKYMRKTCGDVLDNLKGDCYQVLIEDCIPVLKRYAKEGREFDYVINDLTAVPISTSPEEDSTWEFLRLILDLSMKVLKQDGKYFTQGNCVNLTEALSLYEEQLGRLYCPVEFSKEIVCVPSYLELWVFYTVWKKAKP

SEQ ID NO: 83352 - protein, 366 aa, Homo sapiens
  Payload ID: 16585
  Gene Symbol: SMS
  Gene Name: spermine synthase
  Uniprot ID: P52788
  ENSP ID: ENSP00000385746
MAAARHSTLDFMLGAKADGETILKGLQSIFQEQGMAESVHTWQDHGYLATYTNKNGSFANLRIYPHGLVLLDLQSYDGDAQGKEEIDSILNKVEERMKELSQDSTGRVKRLPPIVRGGAIDRYWPTADGRLVEYDIDEVVYDEDSPYQNIKILHSKQFGNILILSGDVNLAESDLAYTRAIMGSGKEDYTGKDVLILGGGDGGILCEIVKLKPKMVTMVEIDQMVIDGCKKYMRKTCGDVLDNLKGDCYQVLIEDCIPVLKRYAKEGREFDYVINDLTAVPISTSPEEDSTWEFLRLILDLSMKVLKQDGKYFTQGNCVNLTEALSLYEEQLGRLYCPVEFSKEIVCVPSYLELWVFYTVWKKAKP

SEQ ID NO: 83353 - protein, 311 aa, Homo sapiens
  Payload ID: 16585
  Gene Symbol: SMS
  Gene Name: spermine synthase
  ENSP ID: ENSP00000407366
  MOD_RES (1)..(1): Any amino acid
XGGRAEAALLLAPRSVPAAARGLQGQSRVPAGRAALPGPGRPPALPRGLAAFALPLGESPGCRARADPPWDEGCRDCGGARRDPRGEPGLGACAERGCPRDLFLFLQAADGETILKGLQSIFQEQGMAESVHTWQDHGYLATYTNKNGSFANLRIYPHGLVLLDLQSYDGDAQGKEEIDSILNKVEERMKELSQDSTGRVKRLPPIVRGGAIDRYWPTADGRLVEYDIDEVVYDEDSPYQNIKILHSKQFGNILILSGDVNLAESDLAYTRAIMGSGKEDYTGKDVLILGGGDGGILCEIVKLKPKMVTMV

SEQ ID NO: 83354 - protein, 287 aa, Homo sapiens
  Payload ID: 16586
  Gene Symbol: STPG1
  Gene Name: sperm-tail PG-rich repeat containing 1
  Uniprot ID: Q5TH74
  ENSP ID: ENSP00000003583
MNALANIPDVPVKYRKNDIPGPGFYNVIHQSPVSNSVSLSKKGTCMFPSMCARLDTIISKYPAANAYTIPSDFISKRDFSNSCSSMFQLPSFMKALKFETPAPNYYNASVSCCKQRNNVCTRAGFMSKTQRGSFAFADKGPPPGHYDINESLVKQSPNTLMSCFKSKTNRGLKLTSTGPGPGYYNPSDCTKVPKKTLFPKNPILNFSAQPSPLPPKPPFPGPGQYEIVDYLGPRKHFISSASFVSNTSRWTAAPPQPGLPGPATYKPELPGKQSFLYNEDKKWIPVL

SEQ ID NO: 83355 - protein, 334 aa, Homo sapiens
  Payload ID: 16586
  Gene Symbol: STPG1
  Gene Name: sperm-tail PG-rich repeat containing 1
  Uniprot ID: Q5TH74
  ENSP ID: ENSP00000337461
MDNSAQKNERTGKHPRRASEVQKGFTAAYPTQSSIPFKSQASVIPESEKKGFNSQAKRFPHKKNDIPGPGFYNVIHQSPVSNSVSLSKKGTCMFPSMCARLDTIISKYPAANAYTIPSDFISKRDFSNSCSSMFQLPSFMKALKFETPAPNYYNASVSCCKQRNNVCTRAGFMSKTQRGSFAFADKGPPPGHYDINESLVKQSPNTLMSCFKSKTNRGLKLTSTGPGPGYYNPSDCTKVPKKTLFPKNPILNFSAQPSPLPPKPPFPGPGQYEIVDYLGPRKHFISSASFVSNTSRWTAAPPQPGLPGPATYKPELPGKQSFLYNEDKKWIPVL

SEQ ID NO: 83356 - protein, 334 aa, Homo sapiens; identical to SEQ ID NO: 83355
  Payload ID: 16586
  Gene Symbol: STPG1
  Gene Name: sperm-tail PG-rich repeat containing 1
  Uniprot ID: Q5TH74
  ENSP ID: ENSP00000363530

SEQ ID NO: 83357 - protein, 144 aa, Homo sapiens
  Payload ID: 16586
  Gene Symbol: STPG1
  Gene Name: sperm-tail PG-rich repeat containing 1
  ENSP ID: ENSP00000392225
  MOD_RES (1)..(1): Any amino acid
XFTAAYPTQSSIPFKSQASVIPESEKKGFNSQAKRFPHKKNDIPGPGFYNVIHQSPVSNSVSLSKKGTCMFPSMCARLDTIISKYPAANAYTIPSDFISKRDFSNSCSSMFQLPSFMKALKFETPAPNYYNVRTLPMLAKYRSN

SEQ ID NO: 83358 - protein, 168 aa, Homo sapiens
  Payload ID: 16586
  Gene Symbol: STPG1
  Gene Name: sperm-tail PG-rich repeat containing 1
  ENSP ID: ENSP00000416176
CARLDTIISKYPAANAYTIPSDFISKRDFSNSCSSMFQLPSFMKALKFETPAPNYYNASVSCCKQRNNVCTRAGFMSKTQRGSFAFADKGPPPGHYDINESLVKQSPNTLMSCFKSKTNRGLKLTSTGPGPGYYNPSDCTKVPKKTLFPGGSKASDLAGHLPKSTQPT

SEQ ID NO: 83359 - protein, 459 aa, Homo sapiens
  Payload ID: 16587
  Gene Symbol: STPG2
  Gene Name: sperm-tail PG-rich repeat containing 2
  Uniprot ID: Q8N412
  ENSP ID: ENSP00000295268
MYDRAPRLLKLAEGGSTEAHVGPGSYQVPFLKQQATGSNAPFLSLTARESTFTIASSIEKAVPGPGHYNVSEAQKISRSPTLTRSVDVPSIPSCGKSYGYHINDDGSIIKCFPPACDSTLGPAYYKPQFDVSNATLKYKGIHFGNSSGRQELPKKSGPGPGQYDIVQKKTSYYENVNIKRDQQQNYCSFIPRLYEIIVLQEKKKRFLPMKSITPAPGTYNEPRTALKSLKKTSGLKNIPFGQSAVRFTQDIRTEEMPGPGFYNVLNNTIIASVRNICSKKQKKSAFGSSVPRTFFSVQKEACATPGPADYQEFWHSQGVGISDELPNLTNKYAAFLSRAKRTMKVPDMVIPAPGSYDVHKSYEMSQVKHKYMPPRSLVAKRKHASFLSATPRCLEKVTDGPGPAAYNPVLRKSCPIPLFVKASKRFEESKEITPGPATYEISQEKKKGNLIGEMAADIM

SEQ ID NO: 83360 - protein, 186 aa, Homo sapiens
  Payload ID: 16587
  Gene Symbol: STPG2
  Gene Name: sperm-tail PG-rich repeat containing 2
  ENSP ID: ENSP00000428346
GSSVPRTFFSVQKEACATPGPADYQEFWHSQGVGISDELPNLTNKYAAFLSRAKRTMKVPDMVIPAPGSYDVHKSYEMSQVKHKYMPPRSLVAKRKHASFLSATPRCLEKVTDGPGPAAYNPVLRKSCPIPLFVKASKRFEESKEITPGPATYEMNNTEESPRGLRTYYMEHGGDKTISSGMTRIA

SEQ ID NO: 83361 - protein, 116 aa, Homo sapiens
  Payload ID: 16588
  Gene Symbol: SPX
  Gene Name: spexin hormone
  Uniprot ID: Q9BT56
  ENSP ID: ENSP00000256969
MKGLRSLAATTLALFLVFVFLGNSSCAPQRLLERRNWTPQAMLYLKGAQGRRFISDQSRRKDLSDRPLPERRSPNPQLLTIPEAATILLASLQKSPEDEEKNFDQTRFLEDSLLNW

SEQ ID NO: 83362 - protein, 36 aa, Homo sapiens
  Payload ID: 16588
  Gene Symbol: SPX
  Gene Name: spexin hormone
  ENSP ID: ENSP00000440877
MLYLKGAQGRRFISDQSRRKDLSDRPLPDEAQIPNY

SEQ ID NO: 83363 - protein, 1400 aa, Homo sapiens
  Payload ID: 16589
  Gene Symbol: SCAPER
  Gene Name: S-phase cyclin A-associated protein in the ER
  Uniprot ID: Q9BY12
  ENSP ID: ENSP00000326924
MMASFQRSNSHDKVRRIVAEEGRTARNLIAWSVPLESKDDDGKPKCQTGGKSKRTIQGTHKTTKQSTAVDCKITSSTTGDKHFDKSPTKTRHPRKIDLRARYWAFLFDNLRRAVDEIYVTCESDQSVVECKEVLMMLDNYVRDFKALIDWIQLQEKLEKTDAQSRPTSLAWEVKKMSPGRHVIPSPSTDRINVTSNARRSLNFGGSTGTVPAPRLAPTGVSWADKVKAHHTGSTASSEITPAQSCPPMTVQKASRKNERKDAEGWETVQRGRPIRSRSTAVMPKVSLATEATRSKDDSDKENVCLLPDESIQKGQFVGDGTSNTIESHPKDSLHSCDHPLAEKTQFTVSTLDDVKNSGSIRDNYVRTSEISAVHIDTECVSVMLQAGTPPLQVNEEKFPAEKARIENEMDPSDISNSMAEVLAKKEELADRLEKANEEAIASAIAEEEQLTREIEAEENNDINIETDNDSDFSASMGSGSVSFCGMSMDWNDVLADYEARESWRQNTSWGDIVEEEPARPPGHGIHMHEKLSSPSRKRTIAESKKKHEEKQMKAQQLREKLREEKTLKLQKLLEREKDVRKWKEELLDQRRRMMEEKLLHAEFKREVQLQAIVKKAQEEEAKVNEIAFINTLEAQNKRHDVLSKLKEYEQRLNELQEERQRRQEEKQARDEAVQERKRALEAERQARVEELLMKRKEQEARIEQQRQEKEKAREDAARERARDREERLAALTAAQQEAMEELQKKIQLKHDESIRRHMEQIEQRKEKAAELSSGRHANTDYAPKLTPYERKKQCSLCNVLISSEVYLFSHVKGRKHQQAVRENTSIQGRELSDEEVEHLSLKKYIIDIVVESTAPAEALKDGEERQKNKKKAKKIKARMNFRAKEYESLMETKNSGSDSPYKAKLQRLAKDLLKQVQVQDSGSWANNKVSALDRTLGEITRILEKENVADQIAFQAAGGLTALEHILQAVVPATNVNTVLRIPPKSLCNAINVYNLTCNNCSENCSDVLFSNKITFLMDLLIHQLTVYVPDENNTILGRNTNKQVFEGLTTGLLKVSAVVLGCLIANRPDGNCQPATPKIPTQEMKNKPSQGDPFNNRVQDLISYVVNMGLIDKLCACFLSVQGPVDENPKMAIFLQHAAGLLHAMCTLCFAVTGRSYSIFDNNRQDPTGLTAALQATDLAGVLHMLYCVLFHGTILDPSTASPKENYTQNTIQVAIQSLRFFNSFAALHLPAFQSIVGAEGLSLAFRHMASSLLGHCSQVSCESLLHEVIVCVGYFTVNHPDNQVIVQSGRHPTVLQKLCQLPFQYFSDPRLIKVLFPSLIAACYNNHQNKIILEQEMSCVLLATFIQDLAQTPGQAENQPYQPKGKCLGSQDYLELANRFPQQAWEEARQFFLKKEKK

SEQ ID NO: 83364 - protein, 1154 aa, Homo sapiens
  Payload ID: 16589
  Gene Symbol: SCAPER
  Gene Name: S-phase cyclin A-associated protein in the ER
  Uniprot ID: Q9BY12
  ENSP ID: ENSP00000442190
MKTKYIFCNITERKDAEGWETVQRGRPIRSRSTAVMPKVSLATEATRSKDDSDKENVCLLPDESIQKGQFVGDGTSNTIESHPKDSLHSCDHPLAEKTQFTVSTLDDVKNSGSIRDNYVRTSEISAVHIDTECVSVMLQAGTPPLQVNEEKFPAEKARIENEMDPSDISNSMAEVLAKKEELADRLEKANEEAIASAIAEEEQLTREIEAEENNDINIETDNDSDFSASMGSGSVSFCGMSMDWNDVLADYEARESWRQNTSWGDIVEEEPARPPGHGIHMHEKLSSPSRKRTIAESKKKHEEKQMKAQQLREKLREEKTLKLQKLLEREKDVRKWKEELLDQRRRMMEEKLLHAEFKREVQLQAIVKKAQEEEAKVNEIAFINTLEAQNKRHDVLSKLKEYEQRLNELQEERQRRQEEKQARDEAVQERKRALEAERQARVEELLMKRKEQEARIEQQRQEKEKAREDAARERARDREERLAALTAAQQEAMEELQKKIQLKHDESIRRHMEQIEQRKEKAAELSSGRHANTDYAPKLTPYERKKQCSLCNVLISSEVYLFSHVKGRKHQQAVRENTSIQGRELSDEEVEHLSLKKYIIDIVVESTAPAEALKDGEERQKNKKKAKKIKARMNFRAKEYESLMETKNSGSDSPYKAKLQRLAKDLLKQVQVQDSGSWANNKVSALDRTLGEITRILEKENVADQIAFQAAGGLTALEHILQAVVPATNVNTVLRIPPKSLCNAINVYNLTCNNCSENCSDVLFSNKITFLMDLLIHQLTVYVPDENNTILGRNTNKQVFEGLTTGLLKVSAVVLGCLIANRPDGNCQPATPKIPTQEMKNKPSQGDPFNNRVQDLISYVVNMGLIDKLCACFLSVQGPVDENPKMAIFLQHAAGLLHAMCTLCFAVTGRSYSIFDNNRQDPTGLTAALQATDLAGVLHMLYCVLFHGTILDPSTASPKENYTQNTIQVAIQSLRFFNSFAALHLPAFQSIVGAEGLSLAFRHMASSLLGHCSQVSCESLLHEVIVCVGYFTVNHPDNQVIVQSGRHPTVLQKLCQLPFQYFSDPRLIKVLFPSLIAACYNNHQNKIILEQEMSCVLLATFIQDLAQTPGQAENQPYQPKGKCLGSQDYLELANRFPQQAWEEARQFFLKKEKK

SEQ ID NO: 83365 - protein, 1400 aa, Homo sapiens; identical to SEQ ID NO: 83363
  Payload ID: 16589
  Gene Symbol: SCAPER
  Gene Name: S-phase cyclin A-associated protein in the ER
  Uniprot ID: Q9BY12
  ENSP ID: ENSP00000454973

SEQ ID NO: 83366 - protein, 111 aa, Homo sapiens
  Payload ID: 16589
  Gene Symbol: SCAPER
  Gene Name: S-phase cyclin A-associated protein in the ER
  ENSP ID: ENSP00000455231
MMASFQRSNSHDKVRRIVAEEGRTARNLIAWSVPLESKDDDGKPKCQTGGKSKRTIQGTHKTTKQSTAVDCKITSSTTGDKHFDKSPTKTRHPRKIDLRARYWAFLFDNLR

SEQ ID NO: 83367 - protein, 747 aa, Homo sapiens
  Payload ID: 16589
  Gene Symbol: SCAPER
  Gene Name: S-phase cyclin A-associated protein in the ER
  ENSP ID: ENSP00000455378
MMASFQRSNSHDKVRRIVAEEGRTARNLIAWSVPLESKDDDGKPKCQTGGKSKRTIQGTHKTTKQSTAVDCKITSSTTGDKHFDKSPTKTRHPRKIDLRARYWAFLFDNLRRAVDEIYVTCESDQSVVECKEVLMMLDNYVRDFKALIDWIQLQEKLEKTDAQSRPTSLAWEVKKMSPGRHVIPSPSTDRINVTSNARRSLNFGGSTGTVPAPRLAPTGVSWADKVKAHHTGSTASSEITPAQSCPPMTVQKASRKNERKDAEGWETVQRGRPIRSRSTAVMPKVSLATEATRSKDDSDKENVCLLPDESIQKGQFVGDGTSNTIESHPKDSLHSCDHPLAEKTQFTVSTLDDVKNSGSIRDNYVRTSEISAVHIDTECVSVMLQAGTPPLQVNEEKFPAEKARIENEMDPSDISNVSAANLSMAEVLAKKEELADRLEKANEEAIASAIAEEEQLTREIEAEENNDINIETDNDSDFSASMGSGSVSFCGMSMDWNDVLADYEARESWRQNTSWGDIVEEEPARPPGHGIHMHEKLSSPSRKRTIAESKKKHEEKQMKAQQLREKLREEKTLKLQKLLEREKDVRKWKEELLDQRRRMMEEKLLHAEFKREVQLQAIVKKAQEEEAKVNEIAFINTLEAQNKRHDVLSKLKEYEQRLNELQEERQRRQEEKQARDEAVQERKRALEAERQARVEELLMKRKEQEARIEQQRQEKEKAREDAARERARDREERLAALTAAQQEAMEE

SEQ ID NO: 83368 - protein, 75 aa, Homo sapiens
  Payload ID: 16589
  Gene Symbol: SCAPER
  Gene Name: S-phase cyclin A-associated protein in the ER
  ENSP ID: ENSP00000455623
MMASFQRSNSHDKVRRIVAEEGRTARNLIAWSVPLESKDDDGKPKCQTGGKSKRTIQGTHKTTKQLFEESPYFFP

SEQ ID NO: 83369 - protein, 154 aa, Homo sapiens
  Payload ID: 16589
  Gene Symbol: SCAPER
  Gene Name: S-phase cyclin A-associated protein in the ER
  ENSP ID: ENSP00000455751
MMASFQRSNSHDKVRRIVAEEGRTARNLIAWSVPLESKDDDGKPKCQTGGKSKRTIQGTHKTTKQEVLMMLDNYVRDFKALIDWIQLQEKLEKTDAQSRPTSLAWEVKKMSPGRHVIPSPSTDRINVTSNARRSLNFGGSTGTVPAPRLAPTGV

SEQ ID NO: 83370 - protein, 115 aa, Homo sapiens
  Payload ID: 16589
  Gene Symbol: SCAPER
  Gene Name: S-phase cyclin A-associated protein in the ER
  ENSP ID: ENSP00000456065
MMLDNYVRDFKALIDWIQLQEKLEKTDAQSRPTSLAWEVKKMSPGRHVIPSPSTDRINVTSNARRSLNFGGSTGTVPAPRLAPTGVSWADKVKAHHTGSTASSEITPAQSCPPMT

SEQ ID NO: 83371 - protein, 767 aa, Homo sapiens
  Payload ID: 16589
  Gene Symbol: SCAPER
  Gene Name: S-phase cyclin A-associated protein in the ER
  ENSP ID: ENSP00000456508
MMASFQRSNSHDKVRRIVAEEGRTARNLIAWSVPLESKDDDGKPKCQTGGKSKRTIQGTHKTTKQSTAVDCKITSSTTGDKHFDKSPTKTRHPRKIDLRARYWAFLFDNLRRAVDEIYVTCESDQSVVECKEVLMMLDNYVRDFKALIDWIQLQEKLEKTDAQSRPTSLAWEVKKMSPGRHVIPSPSTDRINVTSNARRSLNFGGSTGTVPAPRLAPTGVSWADKVKAHHTGSTASSEITPAQSCPPMTVQKASRKNERKDAEGWETVQRGRPIRSRSTAVMPKVSLATEATRSKDDSDKENVCLLPDESIQKGQFVGDGTSNTIESHPKDSLHSCDHPLAEKTQFTVSTLDDVKNSGSIRDNYVRTSEISAVHIDTECVSVMLQAGTPPLQVNEEKFPAEKARIENEMDPSDISNVSAANLSMAEVLAKKEELADRLEKANEEAIASAIAEEEQLTREIEAEENNDINIETDNDSDFSASMGSGSVSFCGMSMDWNDVLADYEARESWRQNTSWGDIVEEEPARPPGHGIHMHEKLSSPSRKRTIAESKKKHEEKQMKAQQLREKLREEKTLKLQKLLEREKDVRKWKEELLDQRRRMMEEKLLHAEFKREVQLQAIVKKAQEEEAKVNEIAFINTLEAQNKRHDVLSKLKEYEQRLNELQEERQRRQEEKQARDEAVQERKRALEAERQARVEELLMKRKEQEARIEQQRQEKEKAREDAARERARDREERLAALTAAQQEAMEELQKKIQLKHDESIRRHMEQI

SEQ ID NO: 83372 - protein, 191 aa, Homo sapiens
  Payload ID: 16589
  Gene Symbol: SCAPER
  Gene Name: S-phase cyclin A-associated protein in the ER
  ENSP ID: ENSP00000456987
SRSTAVMPKVSLATEATRSKDDSDKENVCLLPDESIQKGQFVGDGTSNTIESHPKDSLHSCDHPLAEKTQNFLQDPVWNYSVHLFTVSTLDDVKNSGSIRDNYVRTSEISAVHIDTECVSVMLQAGTPPLQVNEEKFPAEKARIENEMDPSDISNSMAEVLAKKEELADRLEKANEEAIASAIAEEEQLTR

SEQ ID NO: 83373 - protein, 99 aa, Homo sapiens
  Payload ID: 16589
  Gene Symbol: SCAPER
  Gene Name: S-phase cyclin A-associated protein in the ER
  ENSP ID: ENSP00000457234
  MOD_RES (1)..(1): Any amino acid
XFRAKEYESLMETKNSGSDSPYKAKLQRLAKDLLKQVQVQDSGSWANNKVSALDRTLGEITRILEKEVYTVWKAMHISTRQDIHKCSMAALFIITTYGK

SEQ ID NO: 83374 - protein, 60 aa, Homo sapiens
  Payload ID: 16589
  Gene Symbol: SCAPER
  Gene Name: S-phase cyclin A-associated protein in the ER
  ENSP ID: ENSP00000457382
MMLDNYVRDFKALIDWIQLQEKLEKTDAQSRPTSLAWEVKKMSPGRHVIPSPSTDRINVT

SEQ ID NO: 83375 - protein, 62 aa, Homo sapiens
  Payload ID: 16589
  Gene Symbol: SCAPER
  Gene Name: S-phase cyclin A-associated protein in the ER
  ENSP ID: ENSP00000457434
RRSLNFGGSTGTVPAPRLAPTGVSWADKVKAHHTGSTASSEITPAQSCPPMTVQKASRKNGK

SEQ ID NO: 83376 - protein, 163 aa, Homo sapiens
  Payload ID: 16590
  Gene Symbol: SKP1
  Gene Name: S-phase kinase-associated protein 1
  Uniprot ID: P63208
  ENSP ID: ENSP00000231487
MPSIKLQSSDGEIFEVDVEIAKQSVTIKTMLEDLGMDDEGDDDPVPLPNVNAAILKKVIQWCTHHKDDPPPPEDDENKEKRTDDIPVWDQEFLKVDQGTLFELILAANYLDIKGLLDVTCKTVANMIKGKTPEEIRKTFNIKNDFTEEEEAQVRKENQWCEEK

SEQ ID NO: 83377 - protein, 158 aa, Homo sapiens
  Payload ID: 16590
  Gene Symbol: SKP1
  Gene Name: S-phase kinase-associated protein 1
  ENSP ID: ENSP00000331708
MPSIKLQSSDGEIFEVDVEIAKQSVTIKTMLEDLGMDDEGDDDPVPLPNVNAAILKKVIQWCTHHKDDPPPPEDDENKEKRTDDIPVWDQEFLKVDQGTLFELILAANYLDIKGLLDVTCKTVANMIKGKTPEEIRKTFNIKNDFTEEEEAQQGRIKT

SEQ ID NO: 83378 - protein, 18 aa, Homo sapiens
  Payload ID: 16590
  Gene Symbol: SKP1
  Gene Name: S-phase kinase-associated protein 1
  ENSP ID: ENSP00000428962
MPSIKLQSSDGEIFEVDV

SEQ ID NO: 83379 - protein, 142 aa, Homo sapiens
  Payload ID: 16590
  Gene Symbol: SKP1
  Gene Name: S-phase kinase-associated protein 1
  ENSP ID: ENSP00000429415
MPSIKLQSSDGEIFEVDVEIAKQSVTIKTMLEDLGMDDEGDDDPVPLPNVNAAILKKVIQWCTHHKDDPPPPEDDENKEKRTDDIPVWDQEFLKVDQGTLFELILAANYLDIKGLLDVTCKTVANMIKGKTPEEIRKTFNIK

SEQ ID NO: 83380 - protein, 160 aa, Homo sapiens
  Payload ID: 16590
  Gene Symbol: SKP1
  Gene Name: S-phase kinase-associated protein 1
  Uniprot ID: P63208
  ENSP ID: ENSP00000429472
MPSIKLQSSDGEIFEVDVEIAKQSVTIKTMLEDLGMDDEGDDDPVPLPNVNAAILKKVIQWCTHHKDDPPPPEDDENKEKRTDDIPVWDQEFLKVDQGTLFELILAANYLDIKGLLDVTCKTVANMIKGKTPEEIRKTFNIKNDFTEEEEAQVGSTQFCL

SEQ ID NO: 83381 - protein, 163 aa, Homo sapiens; identical to SEQ ID NO: 83376
  Payload ID: 16590
  Gene Symbol: SKP1
  Gene Name: S-phase kinase-associated protein 1
  Uniprot ID: P63208
  ENSP ID: ENSP00000429686

SEQ ID NO: 83382 - protein, 163 aa, Homo sapiens; identical to SEQ ID NO: 83376
  Payload ID: 16590
  Gene Symbol: SKP1
  Gene Name: S-phase kinase-associated protein 1
  Uniprot ID: P63208
  ENSP ID: ENSP00000429961

SEQ ID NO: 83383 - protein, 41 aa, Homo sapiens
  Payload ID: 16590
  Gene Symbol: SKP1
  Gene Name: S-phase kinase-associated protein 1
  ENSP ID: ENSP00000429995
MPSIKLQSSDGEIFEVDVEIAKQSVTIKTMLEVTVHQVPIE

SEQ ID NO: 83384 - protein, 102 aa, Homo sapiens
  Payload ID: 16590
  Gene Symbol: SKP1
  Gene Name: S-phase kinase-associated protein 1
  ENSP ID: ENSP00000429996
MPSIKLQSSDGEIFEVDVEIAKQSVTIKTMLEDLGMDDEGDDDPVPLPNVNAAILKKVIQWCTHHKDDPPPPEDDENKEKRTDDIPVWDQEFLKVDQGTLFE

SEQ ID NO: 83385 - protein, 39 aa, Homo sapiens
  Payload ID: 16590
  Gene Symbol: SKP1
  Gene Name: S-phase kinase-associated protein 1
  ENSP ID: ENSP00000430885
MPSIKLQSSDGEIFEVDVEIAKQSVTIKTMLEGHPFCIV

SEQ ID NO: 83386 - protein, 163 aa, Homo sapiens
  Payload ID: 16590
  Gene Symbol: SKP1
  Gene Name: S-phase kinase-associated protein 1
  ENSP ID: ENSP00000431067
MPSIKLQSSDGEIFEVDVEIAKQSVTIKTMLEDLGMDDEGDDDPVPLPNVNAAILKKVIQWCTHHKDDPPPPEDDENKEKRTDDIPVWDQEFLKYTLRKTTVSLQAANYLDIKGLLDVTCKTVANMIKGKTPEEIRKTFNIKNDFTEEEEAQVRKENQWCEEK

SEQ ID NO: 83387 - protein, 410 aa, Homo sapiens
  Payload ID: 16591
  Gene Symbol: SKP2
  Gene Name: S-phase kinase-associated protein 2, E3 ubiquitin protein ligase
  Uniprot ID: Q13309
  ENSP ID: ENSP00000274254
MHRKHLQEIPDLSSNVATSFTWGWDSSKTSELLSGMGVSALEKEEPDSENIPQELLSNLGHPESPPRKRLKSKGSDKDFVIVRRPKLNRENFPGVSWDSLPDELLLGIFSCLCLPELLKVSGVCKRWYRLASDESLWQTLDLTGKNLHPDVTGRLLSQGVIAFRCPRSFMDQPLAEHFSPFRVQHMDLSNSVIEVSTLHGILSQCSKLQNLSLEGLRLSDPIVNTLAKNSNLVRLNLSGCSGFSEFALQTLLSSCSRLDELNLSWCFDFTEKHVQVAVAHVSETITQLNLSGYRKNLQKSDLSTLVRRCPNLVHLDLSDSVMLKNDCFQEFFQLNYLQHLSLSRCYDIIPETLLLVTRAGVRIRLDSDIGCPQTYRTSKLKSSHKLFCQHVRVICIFVCDFYFYRLVLKQ

SEQ ID NO: 83388 - protein, 424 aa, Homo sapiens
  Payload ID: 16591
  Gene Symbol: SKP2
  Gene Name: S-phase kinase-associated protein 2, E3 ubiquitin protein ligase
  Uniprot ID: Q13309
  ENSP ID: ENSP00000274255
MHRKHLQEIPDLSSNVATSFTWGWDSSKTSELLSGMGVSALEKEEPDSENIPQELLSNLGHPESPPRKRLKSKGSDKDFVIVRRPKLNRENFPGVSWDSLPDELLLGIFSCLCLPELLKVSGVCKRWYRLASDESLWQTLDLTGKNLHPDVTGRLLSQGVIAFRCPRSFMDQPLAEHFSPFRVQHMDLSNSVIEVSTLHGILSQCSKLQNLSLEGLRLSDPIVNTLAKNSNLVRLNLSGCSGFSEFALQTLLSSCSRLDELNLSWCFDFTEKHVQVAVAHVSETITQLNLSGYRKNLQKSDLSTLVRRCPNLVHLDLSDSVMLKNDCFQEFFQLNYLQHLSLSRCYDIIPETLLELGEIPTLKTLQVFGIVPDGTLQLLKEALPHLQINCSHFTTIARPTIGNKKNQEIWGIKCRLTLQKPSCL

SEQ ID NO: 83389 - protein, 217 aa, Homo sapiens
  Payload ID: 16591
  Gene Symbol: SKP2
  Gene Name: S-phase kinase-associated protein 2, E3 ubiquitin protein ligase
  ENSP ID: ENSP00000421941
MHRKHLQEIPDLSSNVATSFTWGWDSSKTSELLSGMGVSALEKEEPDSENIPQELLSNLGHPESPPRKRLKSKGSDKDFVIVRRPKLNRENFPDLSTLVRRCPNLVHLDLSDSVMLKNDCFQEFFQLNYLQHLSLSRCYDIIPETLLELGEIPTLKTLQVFGIVPDGTLQLLKEALPHLQINCSHFTTIARPTIGNKKNQEIWGIKCRLTLQKPSCL

SEQ ID NO: 83390 - protein, 255 aa, Homo sapiens
  Payload ID: 16591
  Gene Symbol: SKP2
  Gene Name: S-phase kinase-associated protein 2, E3 ubiquitin protein ligase
  ENSP ID: ENSP00000423188
MHRKHLQEIPDLSSNVATSFTWGWDSSKTSELLSGMGVSALEKEEPDSENIPQELLSNLGHPESPPRKRLKSKGSDKDFVIVRRPKLNRENFPGVSWDSLPDELLLGIFSCLCLPELLKVSGVCKRWYRLASDESLWQTLDLTGKNLHPDVTGRLLSQGVIAFRCPRSFMDQPLAEHFSTLAKNSNLVRLNLSGCSGFSEFALQTLLSSCSRLDELNLSWCFDFTEKHVQVAVAHVSETITQLNLSGYRKNLQKS

SEQ ID NO: 83391 - protein, 80 aa, Homo sapiens
  Payload ID: 16591
  Gene Symbol: SKP2
  Gene Name: S-phase kinase-associated protein 2, E3 ubiquitin protein ligase
  ENSP ID: ENSP00000424234
SNLGHPESPPRKRLKSKGSDKDFVIVRRPKLNRENFPGVSWDSLPDELLLGIFSCLCLPELLKVSGVCKRWYRLASLYFS

SEQ ID NO: 83392 - protein, 102 aa, Homo sapiens
  Payload ID: 16591
  Gene Symbol: SKP2
  Gene Name: S-phase kinase-associated protein 2, E3 ubiquitin protein ligase
  ENSP ID: ENSP00000426004
MHRKHLQEIPDLSSNVATSFTWGWDSSKTSELLSGMGVSALEKEEPDSENIPQELLSNLGHPESPPRKRLKSKGSDKDFVIVRRPKLNRENFPGLMSLYGRP

SEQ ID NO: 83393 - protein, 102 aa, Homo sapiens; identical to SEQ ID NO: 83392
  Payload ID: 16591
  Gene Symbol: SKP2
  Gene Name: S-phase kinase-associated protein 2, E3 ubiquitin protein ligase
  ENSP ID: ENSP00000426675

SEQ ID NO: 83394 - protein, 435 aa, Homo sapiens
  Payload ID: 16591
  Gene Symbol: SKP2
  Gene Name: S-phase kinase-associated protein 2, E3 ubiquitin protein ligase
  ENSP ID: ENSP00000443492
MHVFTPGPADAMHRKHLQEIPDLSSNVATSFTWGWDSSKTSELLSGMGVSALEKEEPDSENIPQELLSNLGHPESPPRKRLKSKGSDKDFVIVRRPKLNRENFPGVSWDSLPDELLLGIFSCLCLPELLKVSGVCKRWYRLASDESLWQTLDLTGKNLHPDVTGRLLSQGVIAFRCPRSFMDQPLAEHFSPFRVQHMDLSNSVIEVSTLHGILSQCSKLQNLSLEGLRLSDPIVNTLAKNSNLVRLNLSGCSGFSEFALQTLLSSCSRLDELNLSWCFDFTEKHVQVAVAHVSETITQLNLSGYRKNLQKSDLSTLVRRCPNLVHLDLSDSVMLKNDCFQEFFQLNYLQHLSLSRCYDIIPETLLELGEIPTLKTLQVFGIVPDGTLQLLKEALPHLQINCSHFTTIARPTIGNKKNQEIWGIKCRLTLQKPSCL

SEQ ID NO: 83395 - protein, 210 aa, Homo sapiens
  Payload ID: 16591
  Gene Symbol: SKP2
  Gene Name: S-phase kinase-associated protein 2, E3 ubiquitin protein ligase
  Uniprot ID: Q13309
  ENSP ID: ENSP00000478031
MDQPLAEHFSTLAKNSNLVRLNLSGCSGFSEFALQTLLSSCSRLDELNLSWCFDFTEKHVQVAVAHVSETITQLNLSGYRKNLQKSDLSTLVRRCPNLVHLDLSDSVMLKNDCFQEFFQLNYLQHLSLSRCYDIIPETLLELGEIPTLKTLQVFGIVPDGTLQLLKEALPHLQINCSHFTTIARPTIGNKKNQEIWGIKCRLTLQKPSCL

SEQ ID NO: 83396 - protein, 63 aa, Homo sapiens
  Payload ID: 16592
  Gene Symbol: SPHAR
  Gene Name: S-phase response (cyclin related)
  Uniprot ID: Q15513
  ENSP ID: ENSP00000355649
MTRIKISVCICFRYFEFCFFYALNILFQKVSEANSQTELLLRPHCKNILFNVSFMIDLQAAHF

SEQ ID NO: 83397 - protein, 631 aa, Homo sapiens
  Payload ID: 16593
  Gene Symbol: SMPD1
  Gene Name: sphingomyelin phosphodiesterase 1, acid lysosomal
  Uniprot ID: P17405
  ENSP ID: ENSP00000340409
MPRYGASLRQSCPRSGREQGQDGTAGAPGLLWMGLVLALALALALALALSDSRVLWAPAEAHPLSPQGHPARLHRIVPRLRDVFGWGNLTCPICKGLFTAINLGLKKEPNVARVGSVAIKLCNLLKIAPPAVCQSIVHLFEDDMVEVWRRSVLSPSEACGLLLGSTCGHWDIFSSWNISLPTVPKPPPKPPSPPAPGAPVSRILFLTDLHWDHDYLEGTDPDCADPLCCRRGSGLPPASRPGAGYWGEYSKCDLPLRTLESLLSGLGPAGPFDMVYWTGDIPAHDVWHQTRQDQLRALTTVTALVRKFLGPVPVYPAVGNHESTPVNSFPPPFIEGNHSSRWLYEAMAKAWEPWLPAEALRTLRIGGFYALSPYPGLRLISLNMNFCSRENFWLLINSTDPAGQLQWLVGELQAAEDRGDKVHIIGHIPPGHCLKSWSWNYYRIVARYENTLAAQFFGHTHVDEFEVFYDEETLSRPLAVAFLAPSATTYIGLNPGYRVYQIDGNYSGSSHVVLDHETYILNLTQANIPGAIPHWQLLYRARETYGLPNTLPTAWHNLVYRMRGDMQLFQTFWFLYHKGHPPSEPCGTPCRLATLCAQLSARADSPALCRHLMPDGSLPEAQSLWPRPLFC

SEQ ID NO: 83398 - protein, 52 aa, Homo sapiens
  Payload ID: 16593
  Gene Symbol: SMPD1
  Gene Name: sphingomyelin phosphodiesterase 1, acid lysosomal
  ENSP ID: ENSP00000431479
MVYWTGDIPAHDVWHQTRQDQLRALTTVTALVRKFLGPVPVYPAVGNHESTP

SEQ ID NO: 83399 - protein, 171 aa, Homo sapiens
  Payload ID: 16593
  Gene Symbol: SMPD1
  Gene Name: sphingomyelin phosphodiesterase 1, acid lysosomal
  ENSP ID: ENSP00000432625
MPRYGASLRQSCPRSGREQGQDGTAGAPGLLWMGLVLALALALALALALSDSRVLWAPAEAHPLSPQGHPARLHRIVPRLRDVFGWGNLTCPICKGLFTAINLGLKKEPNVARVGSVAIKLCNLLKIAPPAVCQSIVHLFEDDMVENWGVLCSFPIPRSPPHLSQYEFLFP

SEQ ID NO: 83400 - protein, 402 aa, Homo sapiens
  Payload ID: 16593
  Gene Symbol: SMPD1
  Gene Name: sphingomyelin phosphodiesterase 1, acid lysosomal
  ENSP ID: ENSP00000434353
MPRYGASLRQSCPRSGREQGQDGTAGAPGLLWMGLVLALALALALALALSDSRVLWAPAEAHPLSPQGHPARLHRIVPRLRDVFGWGNLTCPICKGLFTAINLGLKKEPNVARVGSVAIKLCNLLKIAPPAVCQSIVHLFEDDMVEVWRRSVLSPSEACGLLLGSTCGHWDIFSSWNISLPTVPKPPPKPPSPPAPGAPVSRILFLTDLHWDHDYLEGTDPDCADPLCCRRGSGLPPASRPGAGYWGEYSKCDLPLRTLESLLSGLGPAGPFDMVYWTGDIPAHDVWHQTRQDQLRALTTVTALVRKFLGPVPVYPAVGNHESTPVNSFPPPFIEGNHSSRWLYEAMAKAWEPWLPAEALRTLRYLSSVETQEGKRKNWGVLCSFPIPRSPPHLSQYEFLFP

SEQ ID NO: 83401 - protein, 630 aa, Homo sapiens
  Payload ID: 16593
  Gene Symbol: SMPD1
  Gene Name: sphingomyelin phosphodiesterase 1, acid lysosomal
  Uniprot ID: P17405
  ENSP ID: ENSP00000435350
MPRYGASLRQSCPRSGREQGQDGTAGAPGLLWMGLVLALALALALALALSDSRVLWAPAEAHPLSPQGHPARLHRIVPRLRDVFGWGNLTCPICKGLFTAINLGLKEPNVARVGSVAIKLCNLLKIAPPAVCQSIVHLFEDDMVEVWRRSVLSPSEACGLLLGSTCGHWDIFSSWNISLPTVPKPPPKPPSPPAPGAPVSRILFLTDLHWDHDYLEGTDPDCADPLCCRRGSGLPPASRPGAGYWGEYSKCDLPLRTLESLLSGLGPAGPFDMVYWTGDIPAHDVWHQTRQDQLRALTTVTALVRKFLGPVPVYPAVGNHESTPVNSFPPPFIEGNHSSRWLYEAMAKAWEPWLPAEALRTLRIGGFYALSPYPGLRLISLNMNFCSRENFWLLINSTDPAGQLQWLVGELQAAEDRGDKVHIIGHIPPGHCLKSWSWNYYRIVARYENTLAAQFFGHTHVDEFEVFYDEETLSRPLAVAFLAPSATTYIGLNPGYRVYQIDGNYSGSSHVVLDHETYILNLTQANIPGAIPHWQLLYRARETYGLPNTLPTAWHNLVYRMRGDMQLFQTFWFLYHKGHPPSEPCGTPCRLATLCAQLSARADSPALCRHLMPDGSLPEAQSLWPRPLFC

SEQ ID NO: 83402 - protein, 366 aa, Homo sapiens
  Payload ID: 16593
  Gene Symbol: SMPD1
  Gene Name: sphingomyelin phosphodiesterase 1, acid lysosomal
  ENSP ID: ENSP00000435950
MPRYGASLRQSCPRSGREQGQDGTAGAPGLLWMGLVLALALALALALALSDSRVLWAPAEAHPLSPQGHPARLHRIVPRLRDVFGWGNLTCPICKGLFTAINLGLKKEPNVARVGSVAIKLCNLLKIAPPAVCQSIVHLFEDDMVEVWRRSVLSPSEACGLLLGSTCGHWDIFSSWNISLPTVPKPPPKPPSPPAPGAPVSRILFLTDLHWDHDYLEGTDPDCADPLCCRRGSGLPPASRPGAGYWGEYSKCDLPLRTLESLLSGLGPAGPFDMVYWTGDIPAHDVWHQTRQDQLRALTTVTALVRKFLGPVPVYPAVGNHESTPVNSFPPPFIEGNHSSRWLYEAMAKAWEPWLPAEALRTLRCI

SEQ ID NO: 83403 - protein, 317 aa, Homo sapiens
  Payload ID: 16593
  Gene Symbol: SMPD1
  Gene Name: sphingomyelin phosphodiesterase 1, acid lysosomal
  ENSP ID: ENSP00000436278
  MOD_RES (1)..(1): Any amino acid
XFDMVYWTGDIPAHDVWHQTRQDQLRALTTVTALVRKFLGPVPVYPAVGNHESTPVNSFPPPFIEGNHSSRWLYEAMAKAWEPWLPAEALRTLRYLSSVETQEGKRKVHIIGHIPPGHCLKSWSWNYYRIVARYENTLAAQFFGHTHVDEFEVFYDEETLSRPLAVAFLAPSATTYIGLNPGYRVYQIDGNYSGSSHVVLDHETYILNLTQANIPGAIPHWQLLYRARETYGLPNTLPTAWHNLVYRMRGDMQLFQTFWFLYHKGHPPSEPCGTPCRLATLCAQLSARADSPALCRHLMPDGSLPEAQSLWPRPLFC

SEQ ID NO: 83404 - protein, 423 aa, Homo sapiens
  Payload ID: 16594
  Gene Symbol: SMPD2
  Gene Name: sphingomyelin phosphodiesterase 2, neutral membrane (neutral sphingomyelinase)
  Uniprot ID: O60906
  ENSP ID: ENSP00000258052
MKPNFSLRLRIFNLNCWGIPYLSKHRADRMRRLGDFLNQESFDLALLEEVWSEQDFQYLRQKLSPTYPAAHHFRSGIIGSGLCVFSKHPIQELTQHIYTLNGYPYMIHHGDWFSGKAVGLLVLHLSGMVLNAYVTHLHAEYNRQKDIYLAHRVAQAWELAQFIHHTSKKADVVLLCGDLNMHPEDLGCCLLKEWTGLHDAYLETRDFKGSEEGNTMVPKNCYVSQQELKPFPFGVRIDYVLYKAVSGFYISCKSFETTTGFDPHRGTPLSDHEALMATLFVRHSPPQQNPSSTHGPAERSPLMCVLKEAWTELGLGMAQARWWATFASYVIGLGLLLLALLCVLAAGGGAGEAAILLWTPSVGLVLWAGAFYLFHVQEVNGLYRAQAELQHVLGRAREAQDLGPEPQPALLLGQQEGDRTKEQ

SEQ ID NO: 83405 - protein, 204 aa, Homo sapiens
  Payload ID: 16594
  Gene Symbol: SMPD2
  Gene Name: sphingomyelin phosphodiesterase 2, neutral membrane (neutral sphingomyelinase)
  ENSP ID: ENSP00000399731
  MOD_RES (1)..(1): Any amino acid
XIYLAHRVAQAWELAQFIQCVSLGLKWEVGWDPGAEGEQGPSHGEELVMEELPPHQPGSPSHTSKKADVVLLCGDLNMHPEDLGCCLLKEWTGLHDAYLETRDFKGSEEGNTMVPKNCYVSQQELKPFPFGVRIDYVLYKAVSGFYISCKSFETTTGFDPHRGTPLSDHEALMATLFVRHSPPQQNPSSTHGPAERSPLMCVLK

SEQ ID NO: 83406 - protein, 655 aa, Homo sapiens
  Payload ID: 16595
  Gene Symbol: SMPD3
  Gene Name: sphingomyelin phosphodiesterase 3, neutral membrane (neutral sphingomyelinase II)
  Uniprot ID: Q9NY59
  ENSP ID: ENSP00000219334
MVLYTTPFPNSCLSALHCVSWALIFPCYWLVDRLAASFIPTTYEKRQRADDPCCLQLLCTALFTPIYLALLVASLPFAFLGFLFWSPLQSARRPYIYSRLEDKGLAGGAALLSEWKGTGPGKSFCFATANVCLLPDSLARVNNLFNTQARAKEIGQRIRNGAARPQIKIYIDSPTNTSISAASFSSLVSPQGGDGVARAVPGSIKRTASVEYKGDGGRHPGDEAANGPASGDPVDSSSPEDACIVRIGGEEGGRPPEADDPVPGGQARNGAGGGPRGQTPNHNQQDGDSGSLGSPSASRESLVKGRAGPDTSASGEPGANSKLLYKASVVKKAAARRRRHPDEAFDHEVSAFFPANLDFLCLQEVFDKRAATKLKEQLHGYFEYILYDVGVYGCQGCCSFKCLNSGLLFASRYPIMDVAYHCYPNKCNDDALASKGALFLKVQVGSTPQDQRIVGYIACTHLHAPQEDSAIRCGQLDLLQDWLADFRKSTSSSSAANPEELVAFDVVCGDFNFDNCSSDDKLEQQHSLFTHYRDPCRLGPGEEKPWAIGTLLDTNGLYDEDVCTPDNLQKVLESEEGRREYLAFPTSKSSGQKGRKELLKGNGRRIDYMLHAEEGLCPDWKAEVEEFSFITQLSGLTDHLPVAMRLMVSSGEEEA

SEQ ID NO: 83407 - protein, 647 aa, Homo sapiens
  Payload ID: 16595
  Gene Symbol: SMPD3
  Gene Name: sphingomyelin phosphodiesterase 3, neutral membrane (neutral sphingomyelinase II)
  Uniprot ID: Q9NY59
  ENSP ID: ENSP00000455955
MVLYTTPFPNSCLSALHCVSWALIFPCYWLVDRLAASFIPTTYEKRQRADDPCCLQLLCTALFTPIYLALLVASLPFAFLGFLFWSPLQSARRPYIYSRLEDKGLAGGAALLSEWKGTGPGKSFCFATANVCLLPDSLARVNNLFNTQARAKEIGQRIRNGAARPQIKIYIDSPTNTSISAASFSSLVSPQGGDGVARAVPGSIKRTASVEYKGDGGRHPGDEAANGPASGDPVDSSSPEDACIVRIGGEEGGRPPEADDPVPGGQARNGAGGGPRGQTPNHNQQDGDSGSLGSPSASRESLVKGRAGPDTSASGEPGANSKLLYKASVVKKAAARRRRHPDEAFDHEVSAFFPANLDFLCLQEVFDKRAATKLKEQLHGYFEYILYDVGVYGCQGCCSFKCLNSGLLFASRYPIMDVAYHCYPNKCNDDALASKGALFLKVQVGSTPQDQRIVGYIACTHLHAPQEDSAIRCGQLDLLQDWLADFRKSTSSSSAANPEELVAFDVVCGDFNFDNCSSDDKLEQQHSLFTHYRDPCRLGPGTLLDTNGLYDEDVCTPDNLQKVLESEEGRREYLAFPTSKSSGQKGRKELLKGNGRRIDYMLHAEEGLCPDWKAEVEEFSFITQLSGLTDHLPVAMRLMVSSGEEEA

SEQ ID NO: 83408 - protein, 93 aa, Homo sapiens
  Payload ID: 16595
  Gene Symbol: SMPD3
  Gene Name: sphingomyelin phosphodiesterase 3, neutral membrane (neutral sphingomyelinase II)
  ENSP ID: ENSP00000457236
MVLYTTPFPNSCLSALHCVSWALIFPCYWLVDRLAASFIPTTYEKRQRADDPCCLQLLCTALFTPIYLALLVASLPFAFLGFLFWSPLQSARR

SEQ ID NO: 83409 - protein, 638 aa, Homo sapiens
  Payload ID: 16595
  Gene Symbol: SMPD3
  Gene Name: sphingomyelin phosphodiesterase 3, neutral membrane (neutral sphingomyelinase II)
  ENSP ID: ENSP00000457422
MVLYTTPFPNSCLSALHCVSWALIFPCYWLVDRLAASFIPTTYEKRQRADDPCCLQLLCTALFTPIYLALLVASLPFAFLGFLFWSPLQSARRPYIYSRLEDKGLAGGAALLSEWKGTGPGKSFCFATANVCLLPDSLARVNNLFNTQARAKEIGQRIRNGAARPQIKIYIDSPTNTSISAASFSSLVSPQGGDGVARAVPGSIKRTASVEYKGDGGRHPGDEAANGPASGDPVDSSSPEDACIVRIGGEEGGRPPEADDPVPGGQARNGAGGGPRGQTPNHNQQDGDSGSLGSPSASRESLVKGRAGPDTSASGEPGANSKLLYKASVVKKAAARRRRHPDEAFDHEVSAFFPANLDFLCLQEVFDKRAATKLKEQLHGYFEYILYDVGVYGCQGCCSFKCLNSGLLFASRYPIMDVAYHCYPNKCNDDALASKGALFLKVQVGSTPQDQRIVGYIACTHLHAPQEDSAIRCGQLDLLQDWLADFRKSTSSSSAANPEELVAFDVVCGDFNFDNCSSDDKLEQQHSLFTHYRDPCRLGPGEEKPWAIGTLLDTNGLYDEDVCTPDNLQNKSSGQKGRKELLKGNGRRIDYMLHAEEGLCPDWKAEVEEFSFITQLSGLTDHLPVAMRLMVSSGEEEA

SEQ ID NO: 83410 - protein, 207 aa, Homo sapiens
  Payload ID: 16595
  Gene Symbol: SMPD3
  Gene Name: sphingomyelin phosphodiesterase 3, neutral membrane (neutral sphingomyelinase II)
  ENSP ID: ENSP00000459317
  MOD_RES (1)..(1): Any amino acid
XAARAAAASSVSTAASSLPAATPSWTWPITVTPTSVTTMPWPLRELCFSRCRWEAHLRTKESSGTSPAHTCMPRKRTAPSGVGSWTCFRTGWLISENLPPRPAQPTPRSWWHLTSSVEISTLITAPLTTSWSSNTPCSPTTGTPAAWGLVRRSRGPSVLCWTRTACTMRMCAPPTTCRRSWRVRRAAGSTWRFPPARARARRGGRSC

SEQ ID NO: 83411 - protein, 837 aa, Homo sapiens
  Payload ID: 16596
  Gene Symbol: SMPD4
  Gene Name: sphingomyelin phosphodiesterase 4, neutral membrane (neutral sphingomyelinase-3)
  ENSP ID: ENSP00000259217
MTTFGAVAEWRLPSLRRATLWIPQWFAKKAIFNSPLEAAMAFPHLQQPSFLLASLKADSINKPFAQQCQDLVKVIEDFPAKELHTIFPWLVESIFGSLDGVLVGWNLRCLQGRVNPVEYSIVMEFLDPGGPMMKLVYKLQAEDYKFDFPVSYLPGPVKASIQECILPDSPLYHNKVQFTPTGGLGLNLALNPFEYYIFFFALSLITQKPLPVSLHVRTSDCAYFILVDRYLSWFLPTEGSVPPPLSSSPGGTSPSPPPRTPAIPFASYGLHHTSLLKRHISHQTSVNADPASHEIWRSETLLQVFVEMWLHHYSLEMYQKMQSPHAKESFTPTEEHVLVVRLLLKHLHAFANSLKPEQASPSAHSHATSPLEEFKRAAVPRFVQQKLYLFLQHCFGHWPLDASFRAVLEMWLSYLQPWRYAPDKQAPGSDSQPRCVSEKWAPFVQENLLMYTKLFVGFLNRALRTDLVSPKHALMVFRVAKVFAQPNLAEMIQKGEQLFLEPELVIPHRQHRLFTAPTFTGSFLSPWPPAVTDASFKVKSHVYSLEGQDCKYTPMFGPEARTLVLRLAQLITQAKHTAKSISDQCAESPAGHSFLSWLGFSSMDTNGSYTANDLDEMGQDSVRKTDEYLEKALEYLRQIFRLSEAQLRQFTLALGTTQDENGKKQLPDCIVGEDGLILTPLGRYQIINGLRRFEIEYQGDPELQPIRSYEIASLVRTLFRLSSAINHRFAGQMAALCSRDDFLGSFCRYHLTEPGLASRHLLSPVGRRQVAGHTRGPRLSLRFLGSYRTLVSLLLAFFVASLFCVGPLPCTLLLTLGYVLYASAMTLLTERGKLHQP

SEQ ID NO: 83412 - protein, 866 aa, Homo sapiens
  Payload ID: 16596
  Gene Symbol: SMPD4
  Gene Name: sphingomyelin phosphodiesterase 4, neutral membrane (neutral sphingomyelinase-3)
  ENSP ID: ENSP00000386531
MTTFGAVAEWRLPSLRRATLWIPQWFAKKAIFNSPLEAAMAFPHLQQPSFLLASLKADSINKPFAQQCQDLVKVIEDFPAKELHTIFPWLVESIFGSLDGVLVGWNLRCLQGRVNPVEYSIVMEFLDPGGPMMKLVYKLQAEDYKFDFPVSYLPGPVKASIQECILPDSPLYHNKVQFTPTGGLGLNLALNPFEYYIFFFALSLITQKPLPVSLHVRTSDCAYFILVDRYLSWFLPTEGSVPPPLSSSPGGTSPSPPPRTPAIPFASYGLHHTSLLKRHISHQTSVNADPASHEIWRSETLLQVFVEMWLHHYSLEMYQKMQSPHAKLEVLHYRLSVSSALYSPAQPSLQALHAYQESFTPTEEHVLVVRLLLKHLHAFANSLKPEQASPSAHSHATSPLEEFKRAAVPRFVQQKLYLFLQHCFGHWPLDASFRAVLEMWLSYLQPWRYAPDKQAPGSDSQPRCVSEKWAPFVQENLLMYTKLFVGFLNRALRTDLVSPKHALMVFRVAKVFAQPNLAEMIQKGEQLFLEPELVIPHRQHRLFTAPTFTGSFLSPWPPAVTDASFKVKSHVYSLEGQDCKYTPMFGPEARTLVLRLAQLITQAKHTAKSISDQCAESPAGHSFLSWLGFSSMDTNGSYTANDLDEMGQDSVRKTDEYLEKALEYLRQIFRLSEAQLRQFTLALGTTQDENGKKQLPDCIVGEDGLILTPLGRYQIINGLRRFEIEYQGDPELQPIRSYEIASLVRTLFRLSSAINHRFAGQMAALCSRDDFLGSFCRYHLTEPGLASRHLLSPVGRRQVAGHTRGPRLSLRFLGSYRTLVSLLLAFFVASLFCVGPLPCTLLLTLGYVLYASAMTLLTERGKLHQP

SEQ ID NO: 83413 - protein, 88 aa, Homo sapiens
  Payload ID: 16596
  Gene Symbol: SMPD4
  Gene Name: sphingomyelin phosphodiesterase 4, neutral membrane (neutral sphingomyelinase-3)
  ENSP ID: ENSP00000393791
MWLHHYSLEMYQKMQSPHAKESFTPTEEHVLVVRLLLKHLHAFANSLKPEQASPSAHSHATSPLEEFKRIALATGPWTHRSELSWRCG

SEQ ID NO: 83414 - protein, 313 aa, Homo sapiens
  Payload ID: 16596
  Gene Symbol: SMPD4
  Gene Name: sphingomyelin phosphodiesterase 4, neutral membrane (neutral sphingomyelinase-3)
  ENSP ID: ENSP00000397078
KRAAVPRFVQQKLYLFLQHCFGHWPLDASFRAVLEMWLSYLQPWRYAPDKQAPGSDSQPRCVSEKWAPFVQENLLMYTKLFVGFLNRALRTDLVSPKHALMVFRVAKVFAQPNLAEMIQKGEQLFLEPELVIPHRQHRLFTAPTFTGSFLSPWPPAVTDASFKVKSHVYSLEGQDCKYTPMFGPEARTLVLRLAQLITQAKHTAKSISDQCAESPAGHSFLSWLGFSSMDTNGSYTANDLDEMGQDSVRKTDEYLEKALEYLRQIFRFAGQMAALCSRDDFLGSFCRYHLTEPGLASRHLLSPVGRRQVAGHT

SEQ ID NO: 83415 - protein, 56 aa, Homo sapiens
  Payload ID: 16596
  Gene Symbol: SMPD4
  Gene Name: sphingomyelin phosphodiesterase 4, neutral membrane (neutral sphingomyelinase-3)
  ENSP ID: ENSP00000397278
MAFPHLQQPSFLLASLKADSINKPFAQQCQDLVKVIEDFPAKDTSHTLCFLWPPPH

SEQ ID NO: 83416 - protein, 741 aa, Homo sapiens
  Payload ID: 16596
  Gene Symbol: SMPD4
  Gene Name: sphingomyelin phosphodiesterase 4, neutral membrane (neutral sphingomyelinase-3)
  ENSP ID: ENSP00000401648
  MOD_RES (1)..(1): Any amino acid
XHNKVQFTPTGGLGLNLALNPFEYYIFFFALSLITQKPLPVSLHVRTSDCAYFILVDRYLSWFLPTEGSVPPPLSSSPGGTSPSPPPRTPAIPFASYGLHHTSLLKRHISHQTSVNADPASHEIWRSETLLQVFVEMWLHHYSLEMYQKMQSPHAKLEVLHYRLSVSSALYSPAQPSLQALHAYQESFTPTEEHVLVVRLLLKHLHAFANSLKPEQASPSAHSHATSPLEEFKRMGLNLPEVPSALPRRSQPSLMGALGSSVSRASLLGKQQVTLPIPCRAAVPRFVQQKLYLFLQHCFGHWPLDASFRAVLEMWLSYLQPWRYAPDKQAPGSDSQPRCVSEKWAPFVQENLLMYTKLFVGFLNRALRTDLVSPKHALMVFRVAKVFAQPNLAEMIQKGEQLFLEPELVIPHRQHRLFTAPTFTGSFLSPWPPAVTDASFKVKSHVYSLEGQDCKYTPMFGPEARTLVLRLAQLITQAKHTAKSISDQCAESPAGHSFLSWLGFSSMDTNGSYTANDLDEMGQDSVRKTDEYLEKALEYLRQIFRLSEAQLRQFTLALGTTQDENGKKQLPDCIVGEDGLILTPLGRYQIINGLRRFEIEYQGDPELQPIRSYEIASLVRTLFRLSSAINHRFAGQMAALCSRDDFLGSFCRYHLTEPGLASRHLLSPVGRRQVAGHTRGPRLSLRFLGSYRTLVSLLLAFFVASLFCVGPLPCTLLLTLGYVLYASAMTLLTERGKLHQP

SEQ ID NO: 83417 - protein, 57 aa, Homo sapiens
  Payload ID: 16596
  Gene Symbol: SMPD4
  Gene Name: sphingomyelin phosphodiesterase 4, neutral membrane (neutral sphingomyelinase-3)
  ENSP ID: ENSP00000403002
MAFPHLQQPSFLLASLKADSINKPFAQQCQDLVKVIEDFPAKMVSSLAGTSAAYRGA

SEQ ID NO: 83418 - protein, 211 aa, Homo sapiens
  Payload ID: 16596
  Gene Symbol: SMPD4
  Gene Name: sphingomyelin phosphodiesterase 4, neutral membrane (neutral sphingomyelinase-3)
  ENSP ID: ENSP00000403915
VSEKWAPFVQENLLMYTKLFVGFLNRALRTDLVSPKHALMVFRVAKVFAQPNLAEMIQKGEQLFLEPELVIPHRQHRLFTAPTFTGSFLSPWPPAVTDASFKVLRLAQLITQAKHTAKSISDQCAESPAGHSFLSWLGFSSMDTNGSYTANDLDEMGQDSVRKTDEYLEKALEYLRQIFRLSEAQLRQFTLALGTTQDENGKKQLPDCIVG

SEQ ID NO: 83419 - protein, 764 aa, Homo sapiens
  Payload ID: 16596
  Gene Symbol: SMPD4
  Gene Name: sphingomyelin phosphodiesterase 4, neutral membrane (neutral sphingomyelinase-3)
  Uniprot ID: Q9NXE4
  ENSP ID: ENSP00000405187
MTTFGAVAEWRLPSLRRATLWIPQWFAKKAIFNSPLEAAMAFPHLQQPSFLLASLKADSINKPFAQQCQDLVKVIEDFPAKGPVKASIQECILPDSPLYHNKVQFTPTGGLGLNLALNPFEYYIFFFALSLITQKPLPVSLHVRTSDCAYFILVDRYLSWFLPTEGSVPPPLSSSPGGTSPSPPPRTPAIPFASYGLHHTSLLKRHISHQTSVNADPASHEIWRSETLLQVFVEMWLHHYSLEMYQKMQSPHAKESFTPTEEHVLVVRLLLKHLHAFANSLKPEQASPSAHSHATSPLEEFKRAAVPRFVQQKLYLFLQHCFGHWPLDASFRAVLEMWLSYLQPWRYAPDKQAPGSDSQPRCVSEKWAPFVQENLLMYTKLFVGFLNRALRTDLVSPKHALMVFRVAKVFAQPNLAEMIQKGEQLFLEPELVIPHRQHRLFTAPTFTGSFLSPWPPAVTDASFKVKSHVYSLEGQDCKYTPMFGPEARTLVLRLAQLITQAKHTAKSISDQCAESPAGHSFLSWLGFSSMDTNGSYTANDLDEMGQDSVRKTDEYLEKALEYLRQIFRLSEAQLRQFTLALGTTQDENGKKQLPDCIVGEDGLILTPLGRYQIINGLRRFEIEYQGDPELQPIRSYEIASLVRTLFRLSSAINHRFAGQMAALCSRDDFLGSFCRYHLTEPGLASRHLLSPVGRRQVAGHTRGPRLSLRFLGSYRTLVSLLLAFFVASLFCVGPLPCTLLLTLGYVLYASAMTLLTERGKLHQP

SEQ ID NO: 83420 - protein, 265 aa, Homo sapiens
  Payload ID: 16596
  Gene Symbol: SMPD4
  Gene Name: sphingomyelin phosphodiesterase 4, neutral membrane (neutral sphingomyelinase-3)
  ENSP ID: ENSP00000405363
FILVDRYLSWFLPTEGSVPPPLSSSPGGTSPSPPPRTPAIPFASYGLHHTSLLKRHISHQTSVNADPASHEIWRSETLLQVFVEMWLHHYSLEMYQKMQSPHAKESFTPTEEHVLVVRLLLKHLHAFANSLKPEQASPSAHSHATSPLEEFKRAAVPRFVQQKLYLFLQHCFGHWPLDASFRAVLEMWLSYLQPWRYAPDKQAPGSDSQPRAPFVQENLLMYTKLFVGFLNRALRTDLVSPKHALMVFRVAKVFAQPNLAEMIQK

SEQ ID NO: 83421 - protein, 274 aa, Homo sapiens
  Payload ID: 16596
  Gene Symbol: SMPD4
  Gene Name: sphingomyelin phosphodiesterase 4, neutral membrane (neutral sphingomyelinase-3)
  ENSP ID: ENSP00000406325
  MOD_RES (1)..(1): Any amino acid
XVSLHVRTSDCAYFILVDRYLSWFLPTEGSVPPPLSSSPGGTSPSPPPRTPAIPFASYGLHHTSLLKRHISHQTSVNADPASHEIWRSETLLQVFVEMWLHHYSLEMYQKMQSPHAKVLEMWLSYLQPWRYAPDKQAPGSDSQPRCVSEKWAPFVQENLLMYTKLFVGFLNRALRTDLVSPKHALMVFRVAKVFAQPNLAEMIQKGEQLFLEPELVIPHRQHRLFTAPTFTGSFLSPWPPAVTDASFKVKSHVYSLEGQDCKYTPMFGPEARTL

SEQ ID NO: 83422 - protein, 135 aa, Homo sapiens
  Payload ID: 16596
  Gene Symbol: SMPD4
  Gene Name: sphingomyelin phosphodiesterase 4, neutral membrane (neutral sphingomyelinase-3)
  ENSP ID: ENSP00000406458
MAFPHLQQPSFLLASLKADSINKPFAQQCQDLVKVIEDFPAKELHTIFPWLVESIFGSLDGVLVGWNLRCLQGRVNPVEYSIVMEFLDPGGPMMKLVYKLQAEDYKFDFPVSYLPGPVKASIQECILPDSPLYHN

SEQ ID NO: 83423 - protein, 50 aa, Homo sapiens
  Payload ID: 16596
  Gene Symbol: SMPD4
  Gene Name: sphingomyelin phosphodiesterase 4, neutral membrane (neutral sphingomyelinase-3)
  ENSP ID: ENSP00000407591
MAFPHLQQPSFLLASLKADSINKPFAQQCQDLVKVIEDFPAKWPNDEVGL

SEQ ID NO: 83424 - protein, 56 aa, Homo sapiens; identical to SEQ ID NO: 83415
  Payload ID: 16596
  Gene Symbol: SMPD4
  Gene Name: sphingomyelin phosphodiesterase 4, neutral membrane (neutral sphingomyelinase-3)
  ENSP ID: ENSP00000416208

SEQ ID NO: 83425 - protein, 453 aa, Homo sapiens
  Payload ID: 16597
  Gene Symbol: SMPDL3A
  Gene Name: sphingomyelin phosphodiesterase, acid-like 3A
  Uniprot ID: Q92484
  ENSP ID: ENSP00000357425
MALVRALVCCLLTAWHCRSGLGLPVAPAGGRNPPPAIGQFWHVTDLHLDPTYHITDDHTKVCASSKGANASNPGPFGDVLCDSPYQLILSAFDFIKNSGQEASFMIWTGDSPPHVPVPELSTDTVINVITNMTTTIQSLFPNLQVFPALGNHDYWPQDQLPVVTSKVYNAVANLWKPWLDEEAISTLRKGGFYSQKVTTNPNLRIISLNTNLYYGPNIMTLNKTDPANQFEWLESTLNNSQQNKEKVYIIAHVPVGYLPSSQNITAMREYYNEKLIDIFQKYSDVIAGQFYGHTHRDSIMVLSDKKGSPVNSLFVAPAVTPVKSVLEKQTNNPGIRLFQYDPRDYKLLDMLQYYLNLTEANLKGESIWKLEYILTQTYDIEDLQPESLYGLAKQFTILDSKQFIKYYNYFFVSYDSSVTCDKTCKAFQICAIMNLDNISYADCLKQLYIKHNY

SEQ ID NO: 83426 - protein, 322 aa, Homo sapiens
  Payload ID: 16597
  Gene Symbol: SMPDL3A
  Gene Name: sphingomyelin phosphodiesterase, acid-like 3A
  Uniprot ID: Q92484
  ENSP ID: ENSP00000442152
MTTTIQSLFPNLQVFPALGNHDYWPQDQLPVVTSKVYNAVANLWKPWLDEEAISTLRKGGFYSQKVTTNPNLRIISLNTNLYYGPNIMTLNKTDPANQFEWLESTLNNSQQNKEKVYIIAHVPVGYLPSSQNITAMREYYNEKLIDIFQKYSDVIAGQFYGHTHRDSIMVLSDKKGSPVNSLFVAPAVTPVKSVLEKQTNNPGIRLFQYDPRDYKLLDMLQYYLNLTEANLKGESIWKLEYILTQTYDIEDLQPESLYGLAKQFTILDSKQFIKYYNYFFVSYDSSVTCDKTCKAFQICAIMNLDNISYADCLKQLYIKHNY

SEQ ID NO: 83427 - protein, 373 aa, Homo sapiens
  Payload ID: 16598
  Gene Symbol: SMPDL3B
  Gene Name: sphingomyelin phosphodiesterase, acid-like 3B
  Uniprot ID: Q92485
  ENSP ID: ENSP00000362995
MRLLAWLIFLANWGGARAEPGKFWHIADLHLDPDYKVSKDPFQVCPSAGSQPVPDAGPWGDYLCDSPWALINSSIYAMKEIEPEPDFILWTGDDTPHVPDEKLGEAAVLEIVERLTKLIREVFPDTKVYAALGNHDFHPKNQFPAGSNNIYNQIAELWKPWLSNESIALFKKGAFYCEKLPGPSGAGRIVVLNTNLYYTSNALTADMADPGQQFQWLEDVLTDASKAGDMVYIVGHVPPGFFEKTQNKAWFREGFNEKYLKVVRKHHRVIAGQFFGHHHTDSFRMLYDDAGVPISAMFITPGVTPWKTTLPGVVNGANNPAIRVFEYDRATLSLKVRSPAEARGGGWEGLKCITTFPHSQLIHLPLTTEPQEG

SEQ ID NO: 83428 - protein, 455 aa, Homo sapiens
  Payload ID: 16598
  Gene Symbol: SMPDL3B
  Gene Name: sphingomyelin phosphodiesterase, acid-like 3B
  Uniprot ID: Q92485
  ENSP ID: ENSP00000363001
MRLLAWLIFLANWGGARAEPGKFWHIADLHLDPDYKVSKDPFQVCPSAGSQPVPDAGPWGDYLCDSPWALINSSIYAMKEIEPEPDFILWTGDDTPHVPDEKLGEAAVLEIVERLTKLIREVFPDTKVYAALGNHDFHPKNQFPAGSNNIYNQIAELWKPWLSNESIALFKKGAFYCEKLPGPSGAGRIVVLNTNLYYTSNALTADMADPGQQFQWLEDVLTDASKAGDMVYIVGHVPPGFFEKTQNKAWFREGFNEKYLKVVRKHHRVIAGQFFGHHHTDSFRMLYDDAGVPISAMFITPGVTPWKTTLPGVVNGANNPAIRVFEYDRATLSLKDMVTYFMNLSQANAQGTPRWELEYQLTEAYGVPDASAHSMHTVLDRIAGDQSTLQRYYVYNSVSYSAGVCDEACSMQHVCAMRQVDIDAYTTCLYASGTTPVPQLPLLLMALLGLCTLVL

SEQ ID NO: 83429 - protein, 269 aa, Homo sapiens
  Payload ID: 16598
  Gene Symbol: SMPDL3B
  Gene Name: sphingomyelin phosphodiesterase, acid-like 3B
  ENSP ID: ENSP00000388092
MRLLAWLIFLANWGGARAEPEEAQGPCAQEKGKGPPPTSILASLAPGLEAGKFWHIADLHLDPDYKVSKDPFQVCPSAGSQPVPDAGPWGDYLCDSPWALINSSIYAMKEIEPEPDFILWTGDDTPHVPDEKLGEAAVLEIVERLTKLIREVFPDTKVYAALGNHDFHPKNQFPAGSNNIYNQIAELWKPWLSNESIALFKKGAFYCEKLPGPSGAGRIVVLNTNLYYTSNALTADMADPGQQFQWLEDVLTDASKAGDMVYIVGHVPP

SEQ ID NO: 83430 - protein, 102 aa, Homo sapiens
  Payload ID: 16598
  Gene Symbol: SMPDL3B
  Gene Name: sphingomyelin phosphodiesterase, acid-like 3B
  ENSP ID: ENSP00000449057
MRLLAWLIFLANWGGARAEPGKFWHIADLHLDPDYKVSKDPFQVCPSAGSQPVPDAGPWGDYLCDSPWALINSSIYAMKEIEPEPDFILWTGAVPSFSSAAS

SEQ ID NO: 83431 - protein, 407 aa, Homo sapiens
  Payload ID: 16598
  Gene Symbol: SMPDL3B
  Gene Name: sphingomyelin phosphodiesterase, acid-like 3B
  ENSP ID: ENSP00000449450
MRLLAWLIFLANWGGARAEPGKFWHIADLHLDPDYKVSKDPFQVCPSAGSQPVPDAGPWGDYLCDSPWALINSSIYAMKEIEPEPDFILWTGDDTPHVPDEKLGEAAVLEIVERLTKLIREVFPGAFYCEKLPGPSGAGRIVVLNTNLYYTSNALTADMADPGQQFQWLEDVLTDASKAGDMVYIVGHVPPGFFEKTQNKAWFREGFNEKYLKVVRKHHRVIAGQFFGHHHTDSFRMLYDDAGVPISAMFITPGVTPWKTTLPGVVNGANNPAIRVFEYDRATLSLKDMVTYFMNLSQANAQGTPRWELEYQLTEAYGVPDASAHSMHTVLDRIAGDQSTLQRYYVYNSVSYSAGVCDEACSMQHVCAMRQVDIDAYTTCLYASGTTPVPQLPLLLMALLGLCTLVL

SEQ ID NO: 83432 - protein, 413 aa, Homo sapiens
  Payload ID: 16599
  Gene Symbol: SGMS1
  Gene Name: sphingomyelin synthase 1
  ENSP ID: ENSP00000354829
MKEVVYWSPKKVADWLLENAMPEYCEPLEHFTGQDLINLTQEDFKKPPLCRVSSDNGQRLLDMIETLKMEHHLEAHKNGHANGHLNIGVDIPTPDGSFSIKIKPNGMPNGYRKEMIKIPMPELERSQYPMEWGKTFLAFLYALSCFVLTTVMISVVHERVPPKEVQPPLPDTFFDHFNRVQWAFSICEINGMILVGLWLIQWLLLKYKSIISRRFFCIVGTLYLYRCITMYVTTLPVPGMHFNCSPKLFGDWEAQLRRIMKLIAGGGLSITGSHNMCGDYLYSGHTVMLTLTYLFIKEYSPRRLWWYHWICWLLSVVGIFCILLAHDHYTVDVVVAYYITTRLFWWYHTMANQQVLKEASQMNLLARVWWYRPFQYFEKNVQGIVPRSYHWPFPWPVVHLSRQVKYSRLVNDT

SEQ ID NO: 83433 - protein, 241 aa, Homo sapiens
  Payload ID: 16599
  Gene Symbol: SGMS1
  Gene Name: sphingomyelin synthase 1
  ENSP ID: ENSP00000355235
MKEVVYWSPKKVADWLLENAMPEYCEPLEHFTGQDLINLTQEDFKKPPLCRVSSDNGQRLLDMIETLKMEHHLEAHKNGHANGHLNIGVDIPTPDGSFSIKIKPNGMPNGYRKEMIKIPMPELERSQYPMEWGKTFLAFLYALSCFVLTTVMISVVHERVPPKEVQPPLPDTFFDHFNRVQWAFSICEINGMILVGLWLIQWLLLKYKDVGNESRVVMIFLSIVHPVLLLGSIAGFLSLSL

SEQ ID NO: 83434 - protein, 219 aa, Homo sapiens
  Payload ID: 16599
  Gene Symbol: SGMS1
  Gene Name: sphingomyelin synthase 1
  ENSP ID: ENSP00000406795
MKEVVYWSPKKVADWLLENAMPEYCEPLEHFTGQDLINLTQEDFKKPPLCRVSSDNGQRLLDMIETLKMEHHLEAHKNGHANGHLNIGVDIPTPDGSFSIKIKPNGMPNGYRKEMIKIPMPELERSQYPMEWGKTFLAFLYALSCFVLTTVMISVVHERVPPKEVQPPLPDTFFDHFNRVQWAFSICEINGMILVGLWLIQWLLLKYNFSETGKPNCEE

SEQ ID NO: 83435 - protein, 35 aa, Homo sapiens
  Payload ID: 16599
  Gene Symbol: SGMS1
  Gene Name: sphingomyelin synthase 1
  ENSP ID: ENSP00000473668
MYVTTLPVPGMHFNCSPKLFGDWEAQLRRIMKLIA

SEQ ID NO: 83436 - protein, 12 aa, Homo sapiens
  Payload ID: 16599
  Gene Symbol: SGMS1
  Gene Name: sphingomyelin synthase 1
  ENSP ID: ENSP00000475427
LWLIQWLLLKYK

SEQ ID NO: 83437 - protein, 241 aa, Homo sapiens; identical to SEQ ID NO: 83433
  Payload ID: 16599
  Gene Symbol: SGMS1
  Gene Name: sphingomyelin synthase 1
  ENSP ID: ENSP00000479633

SEQ ID NO: 83438 - protein, 241 aa, Homo sapiens; identical to SEQ ID NO: 83433
  Payload ID: 16599
  Gene Symbol: SGMS1
  Gene Name: sphingomyelin synthase 1
  ENSP ID: ENSP00000486310

SEQ ID NO: 83439 - protein, 365 aa, Homo sapiens
  Payload ID: 16600
  Gene Symbol: SGMS2
  Gene Name: sphingomyelin synthase 2
  Uniprot ID: Q8NHU3
  ENSP ID: ENSP00000351981
MDIIETAKLEEHLENQPSDPTNTYARPAEPVEEENKNGNGKPKSLSSGLRKGTKKYPDYIQIAMPTESRNKFPLEWWKTGIAFIYAVFNLVLTTVMITVVHERVPPKELSPPLPDKFFDYIDRVKWAFSVSEINGIILVGLWITQWLFLRYKSIVGRRFCFIIGTLYLYRCITMYVTTLPVPGMHFQCAPKLNGDSQAKVQRILRLISGGGLSITGSHILCGDFLFSGHTVTLTLTYLFIKEYSPRHFWWYHLICWLLSAAGIICILVAHEHYTIDVIIAYYITTRLFWWYHSMANEKNLKVSSQTNFLSRAWWFPIFYFFEKNVQGSIPCCFSWPLSWPPGCFKSSCKKYSRVQKIGEDNEKST

SEQ ID NO: 83440 - protein, 365 aa, Homo sapiens; identical to SEQ ID NO: 83439
  Payload ID: 16600
  Gene Symbol: SGMS2
  Gene Name: sphingomyelin synthase 2
  Uniprot ID: Q8NHU3
  ENSP ID: ENSP00000378176

SEQ ID NO: 83441 - protein, 365 aa, Homo sapiens; identical to SEQ ID NO: 83439
  Payload ID: 16600
  Gene Symbol: SGMS2
  Gene Name: sphingomyelin synthase 2
  Uniprot ID: Q8NHU3
  ENSP ID: ENSP00000378178

SEQ ID NO: 83442 - protein, 125 aa, Homo sapiens
  Payload ID: 16600
  Gene Symbol: SGMS2
  Gene Name: sphingomyelin synthase 2
  ENSP ID: ENSP00000428176
MYVTTLPVPGMHFQCAPKLNGDSQAKVQRILRLISGGGLSITGSHILCGDFLFSGHTVTLTLTYLFIKEYSPRHFWWYHLICWLLSAAGIICILVAHEHYTIDVIIAYYITTRLFWWYHSMANEK

SEQ ID NO: 83443 - protein, 34 aa, Homo sapiens
  Payload ID: 16600
  Gene Symbol: SGMS2
  Gene Name: sphingomyelin synthase 2
  ENSP ID: ENSP00000428294
MDIIETAKLEEHLENQPSDPTNTYARPAEPVEEE

SEQ ID NO: 83444 - protein, 44 aa, Homo sapiens
  Payload ID: 16600
  Gene Symbol: SGMS2
  Gene Name: sphingomyelin synthase 2
  ENSP ID: ENSP00000430172
MDIIETAKLEEHLENQPSDPTNTYARPAEPVEEENKNGNGKPKS

SEQ ID NO: 83445 - protein, 470 aa, Homo sapiens
  Payload ID: 16601
  Gene Symbol: SPHK1
  Gene Name: sphingosine kinase 1
  Uniprot ID: Q9NYA1
  ENSP ID: ENSP00000313681
MSAQVLGFLRSWTPLPLAAPRGPAAAGNDAGAPAATAPGGEGEPHSRPCDARLGSTDKELKAGAAATGSAPTAPGTPWQREPRVEVMDPAGGPRGVLPRPCRVLVLLNPRGGKGKALQLFRSHVQPLLAEAEISFTLMLTERRNHARELVRSEELGRWDALVVMSGDGLMHEVVNGLMERPDWETAIQKPLCSLPAGSGNALAASLNHYAGYEQVTNEDLLTNCTLLLCRRLLSPMNLLSLHTASGLRLFSVLSLAWGFIADVDLESEKYRRLGEMRFTLGTFLRLAALRTYRGRLAYLPVGRVGSKTPASPVVVQQGPVDAHLVPLEEPVPSHWTVVPDEDFVLVLALLHSHLGSEMFAAPMGRCAAGVMHLFYVRAGVSRAMLLRLFLAMEKGRHMEYECPYLVYVPVVAFRLEPKDGKGVFAVDGELMVSEAVQGQVHPNYFWMVSGCVEPPPSWKPQQMPPPEEPL

SEQ ID NO: 83446 - protein, 384 aa, Homo sapiens
  Payload ID: 16601
  Gene Symbol: SPHK1
  Gene Name: sphingosine kinase 1
  Uniprot ID: Q9NYA1
  ENSP ID: ENSP00000376285
MDPAGGPRGVLPRPCRVLVLLNPRGGKGKALQLFRSHVQPLLAEAEISFTLMLTERRNHARELVRSEELGRWDALVVMSGDGLMHEVVNGLMERPDWETAIQKPLCSLPAGSGNALAASLNHYAGYEQVTNEDLLTNCTLLLCRRLLSPMNLLSLHTASGLRLFSVLSLAWGFIADVDLESEKYRRLGEMRFTLGTFLRLAALRTYRGRLAYLPVGRVGSKTPASPVVVQQGPVDAHLVPLEEPVPSHWTVVPDEDFVLVLALLHSHLGSEMFAAPMGRCAAGVMHLFYVRAGVSRAMLLRLFLAMEKGRHMEYECPYLVYVPVVAFRLEPKDGKGVFAVDGELMVSEAVQGQVHPNYFWMVSGCVEPPPSWKPQQMPPPEEPL

SEQ ID NO: 83447 - protein, 384 aa, Homo sapiens; identical to SEQ ID NO: 83446
  Payload ID: 16601
  Gene Symbol: SPHK1
  Gene Name: sphingosine kinase 1
  Uniprot ID: Q9NYA1
  ENSP ID: ENSP00000440970

SEQ ID NO: 83448 - protein, 111 aa, Homo sapiens
  Payload ID: 16601
  Gene Symbol: SPHK1
  Gene Name: sphingosine kinase 1
  ENSP ID: ENSP00000465002
MDPAGGPRGVLPRPCRVLVLLNPRGGKGKALQLFRSHVQPLLAEAEISFTLMLTERRNHARELVRSEELGRWDALVVMSGDGLMHEVVNGLMERPDWETAIQKPLCSLPAG

SEQ ID NO: 83449 - protein, 384 aa, Homo sapiens; identical to SEQ ID NO: 83446
  Payload ID: 16601
  Gene Symbol: SPHK1
  Gene Name: sphingosine kinase 1
  Uniprot ID: Q9NYA1
  ENSP ID: ENSP00000465726

SEQ ID NO: 83450 - protein, 152 aa, Homo sapiens
  Payload ID: 16601
  Gene Symbol: SPHK1
  Gene Name: sphingosine kinase 1
  ENSP ID: ENSP00000466422
MDPAGGPRGVLPRPCRVLVLLNPRGGKGKALQLFRSHVQPLLAEAEISFTLMLTERRNHARELVRSEELGRWDALVVMSGDGLMHEVVNGLMERPDWETAIQKPLCSLPAGSGNALAASLNHYAGYEQVTNEDLLTNCTLLLCRRLLSPMNL

SEQ ID NO: 83451 - protein, 5 aa, Homo sapiens
  Payload ID: 16601
  Gene Symbol: SPHK1
  Gene Name: sphingosine kinase 1
  ENSP ID: ENSP00000468474
MDPAG

SEQ ID NO: 83452 - protein, 398 aa, Homo sapiens
  Payload ID: 16601
  Gene Symbol: SPHK1
  Gene Name: sphingosine kinase 1
  Uniprot ID: Q9NYA1
  ENSP ID: ENSP00000468547
MDPVVGCGRGLFGFVFSAGGPRGVLPRPCRVLVLLNPRGGKGKALQLFRSHVQPLLAEAEISFTLMLTERRNHARELVRSEELGRWDALVVMSGDGLMHEVVNGLMERPDWETAIQKPLCSLPAGSGNALAASLNHYAGYEQVTNEDLLTNCTLLLCRRLLSPMNLLSLHTASGLRLFSVLSLAWGFIADVDLESEKYRRLGEMRFTLGTFLRLAALRTYRGRLAYLPVGRVGSKTPASPVVVQQGPVDAHLVPLEEPVPSHWTVVPDEDFVLVLALLHSHLGSEMFAAPMGRCAAGVMHLFYVRAGVSRAMLLRLFLAMEKGRHMEYECPYLVYVPVVAFRLEPKDGKGVFAVDGELMVSEAVQGQVHPNYFWMVSGCVEPPPSWKPQQMPPPEEPL

SEQ ID NO: 83453 - protein, 654 aa, Homo sapiens
  Payload ID: 16602
  Gene Symbol: SPHK2
  Gene Name: sphingosine kinase 2
  Uniprot ID: Q9NRA0
  ENSP ID: ENSP00000245222
MNGHLEAEEQQDQRPDQELTGSWGHGPRSTLVRAKAMAPPPPPLAASTPLLHGEFGSYPARGPRFALTLTSQALHIQRLRPKPEARPRGGLVPLAEVSGCCTLRSRSPSDSAAYFCIYTYPRGRRGARRRATRTFRADGAATYEENRAEAQRWATALTCLLRGLPLPGDGEITPDLLPRPPRLLLLVNPFGGRGLAWQWCKNHVLPMISEAGLSFNLIQTERQNHARELVQGLSLSEWDGIVTVSGDGLLHEVLNGLLDRPDWEEAVKMPVGILPCGSGNALAGAVNQHGGFEPALGLDLLLNCSLLLCRGGGHPLDLLSVTLASGSRCFSFLSVAWGFVSDVDIQSERFRALGSARFTLGTVLGLATLHTYRGRLSYLPATVEPASPTPAHSLPRAKSELTLTPDPAPPMAHSPLHRSVSDLPLPLPQPALASPGSPEPLPILSLNGGGPELAGDWGGAGDAPLSPDPLLSSPPGSPKAALHSPVSEGAPVIPPSSGLPLPTPDARVGASTCGPPDHLLPPLGTPLPPDWVTLEGDFVLMLAISPSHLGADLVAAPHARFDDGLVHLCWVRSGISRAALLRLFLAMERGSHFSLGCPQLGYAAARAFRLEPLTPRGVLTVDGEQVEYGPLQAQMHPGIGTLLTGPPGCPGREP

SEQ ID NO: 83454 - protein, 448 aa, Homo sapiens
  Payload ID: 16602
  Gene Symbol: SPHK2
  Gene Name: sphingosine kinase 2
  ENSP ID: ENSP00000341091
MISEAGLSFNLIQTERQNHARELVQGLSLSEWDGIVTVSGDGLLHEVLNGLLDRPDWEEAVKMPVGILPCGSGNALAGAVNQHGGFEPALGLDLLLNCSLLLCRGGGHPLDLLSVTLASGSRCFSFLSVAWGFVSDVDIQSERFRALGSARFTLGTVLGLATLHTYRGRLSYLPATVEPASPTPAHSLPRAKSELTLTPDPAPPMAHSPLHRSVSDLPLPLPQPALASPGSPEPLPILSLNGGGPELAGDWGGAGDAPLSPDPLLSSPPGSPKAALHSPVSEGAPVIPPSSGLPLPTPDARVGASTCGPPDHLLPPLGTPLPPDWVTLEGDFVLMLAISPSHLGADLVAAPHARFDDGLVHLCWVRSGISRAALLRLFLAMERGSHFSLGCPQLGYAAARAFRLEPLTPRGVLTVDGEQVEYGPLQAQMHPGIGTLLTGPPGCPGREP

SEQ ID NO: 83455 - protein, 49 aa, Homo sapiens
  Payload ID: 16602
  Gene Symbol: SPHK2
  Gene Name: sphingosine kinase 2
  ENSP ID: ENSP00000410044
MNGHLEAEEQQDQRSPLTCYLGRPGCFYWSIPLGVGAWPGSGVRTTCFP

SEQ ID NO: 83456 - protein, 654 aa, Homo sapiens; identical to SEQ ID NO: 83453
  Payload ID: 16602
  Gene Symbol: SPHK2
  Gene Name: sphingosine kinase 2
  Uniprot ID: Q9NRA0
  ENSP ID: ENSP00000469158

SEQ ID NO: 83457 - protein, 133 aa, Homo sapiens
  Payload ID: 16602
  Gene Symbol: SPHK2
  Gene Name: sphingosine kinase 2
  ENSP ID: ENSP00000469448
MAPPPPPLAASTPLLHGEFGSYPARGPRFALTLTSQALHIQRLRPKPEARPRGGLVPLAEVSGCCTLRSRSPSDSAAYFCIYTYPRGRRGARRRATRTFRADGAATYEENRAEAQRWATALTCLLRGLPLPGD

SEQ ID NO: 83458 - protein, 595 aa, Homo sapiens
  Payload ID: 16602
  Gene Symbol: SPHK2
  Gene Name: sphingosine kinase 2
  Uniprot ID: Q9NRA0
  ENSP ID: ENSP00000470092
MNGHLEAEEQQDQALHIQRLRPKPEARPRGGLVPLAEVSGCCTLRSRSPSDSAAYFCIYTYPRGRRGARRRATRTFRADGAATYEENRAEAQRWATALTCLLRGLPLPGDGEITPDLLPRPPRLLLLVNPFGGRGLAWQWCKNHVLPMISEAGLSFNLIQTERQNHARELVQGLSLSEWDGIVTVSGDGLLHEVLNGLLDRPDWEEAVKMPVGILPCGSGNALAGAVNQHGGFEPALGLDLLLNCSLLLCRGGGHPLDLLSVTLASGSRCFSFLSVAWGFVSDVDIQSERFRALGSARFTLGTVLGLATLHTYRGRLSYLPATVEPASPTPAHSLPRAKSELTLTPDPAPPMAHSPLHRSVSDLPLPLPQPALASPGSPEPLPILSLNGGGPELAGDWGGAGDAPLSPDPLLSSPPGSPKAALHSPVSEGAPVIPPSSGLPLPTPDARVGASTCGPPDHLLPPLGTPLPPDWVTLEGDFVLMLAISPSHLGADLVAAPHARFDDGLVHLCWVRSGISRAALLRLFLAMERGSHFSLGCPQLGYAAARAFRLEPLTPRGVLTVDGEQVEYGPLQAQMHPGIGTLLTGPPGCPGREP

SEQ ID NO: 83459 - protein, 72 aa, Homo sapiens
  Payload ID: 16602
  Gene Symbol: SPHK2
  Gene Name: sphingosine kinase 2
  ENSP ID: ENSP00000470679
MAPPPPPLAASTPLLHGEFGSYPARGPRFALTLTSQALHIQRLRPKPEARPRGGLVPLAEVSGCCTLRSRSP

SEQ ID NO: 83460 - protein, 349 aa, Homo sapiens
  Payload ID: 16602
  Gene Symbol: SPHK2
  Gene Name: sphingosine kinase 2
  ENSP ID: ENSP00000471111
MAPPPPPLAASTPLLHGEFGSYPARGPRFALTLTSQALHIQRLRPKPEARPRGGLVPLAEVSGCCTLRSRSPSDSAAYFCIYTYPRGRRGARRRATRTFRADGAATYEENRAEAQRWATALTCLLRGLPLPGDGEITPDLLPRPPRLLLLVNPFGGRGLAWQWCKNHVLPMISEAGLSFNLIQTERQNHARELVQGLSLSEWDGIVTVSGDGLLHEVLNGLLDRPDWEEAVKMPVGILPCGSGNALAGAVNQHGGPREDSDSSTSSSACPLWTTARSCPRAAASMPGSCPLLPQQLALGFSRFIQDRVNGGGGRIGSLTCRGHTQRTLPAPAREGGGSLFLKNINVFIC

SEQ ID NO: 83461 - protein, 255 aa, Homo sapiens
  Payload ID: 16602
  Gene Symbol: SPHK2
  Gene Name: sphingosine kinase 2
  ENSP ID: ENSP00000471180
MAPPPPPLAASTPLLHGEFGSYPARGPRFALTLTSQALHIQRLRPKPEARPRGGLVPLAEVSGCCTLRSRSPSDSAAYFCIYTYPRGRRGARRRATRTFRADGAATYEENRAEAQRWATALTCLLRGLPLPGDGEITPDLLPRPPRLLLLVNPFGGRGLAWQWCKNHVLPMISEAGLSFNLIQTERQNHARELVQGLSLSEWDGIVTVSGDGLLHEVLNGLLDRPDWEEAVKMPVGILPCGSGNALAGAVNQHGG

SEQ ID NO: 83462 - protein, 618 aa, Homo sapiens
  Payload ID: 16602
  Gene Symbol: SPHK2
  Gene Name: sphingosine kinase 2
  Uniprot ID: Q9NRA0
  ENSP ID: ENSP00000471205
MAPPPPPLAASTPLLHGEFGSYPARGPRFALTLTSQALHIQRLRPKPEARPRGGLVPLAEVSGCCTLRSRSPSDSAAYFCIYTYPRGRRGARRRATRTFRADGAATYEENRAEAQRWATALTCLLRGLPLPGDGEITPDLLPRPPRLLLLVNPFGGRGLAWQWCKNHVLPMISEAGLSFNLIQTERQNHARELVQGLSLSEWDGIVTVSGDGLLHEVLNGLLDRPDWEEAVKMPVGILPCGSGNALAGAVNQHGGFEPALGLDLLLNCSLLLCRGGGHPLDLLSVTLASGSRCFSFLSVAWGFVSDVDIQSERFRALGSARFTLGTVLGLATLHTYRGRLSYLPATVEPASPTPAHSLPRAKSELTLTPDPAPPMAHSPLHRSVSDLPLPLPQPALASPGSPEPLPILSLNGGGPELAGDWGGAGDAPLSPDPLLSSPPGSPKAALHSPVSEGAPVIPPSSGLPLPTPDARVGASTCGPPDHLLPPLGTPLPPDWVTLEGDFVLMLAISPSHLGADLVAAPHARFDDGLVHLCWVRSGISRAALLRLFLAMERGSHFSLGCPQLGYAAARAFRLEPLTPRGVLTVDGEQVEYGPLQAQMHPGIGTLLTGPPGCPGREP

SEQ ID NO: 83463 - protein, 663 aa, Homo sapiens
  Payload ID: 16602
  Gene Symbol: SPHK2
  Gene Name: sphingosine kinase 2
  ENSP ID: ENSP00000472983
MAPPPPPLAASTPLLHGEFGSYPARGPRFALTLTSQALHIQRLRPKPEARPRGGLVPLAEVSGCCTLRSRSPSDSAAYFCIYTYPRGRRGARRRATRTFRADGAATYEENRAEAQRWATALTCLLRGLPLPGDGEITPDLLPRPPRLLLLVNPFGGRGLAWQWCKNHVLPMISEAGLSFNLIQTERQNHARELVQGLSLSEWDGIVTVSGDGLLHEVLNGLLDRPDWEEAVKMPVGILPCGSGNALAGAVNQHGGFEPALGLDLLLNCSLLLCRGGGHPLDLLSVTLASGSRCFSFLSVAWGFVSDVDIQSERFRALGSARFTLGTVLGLATLHTYRGRLSYLPATVEPASPTPAHSLPRAKSELTLTPDPAPPMAHSPLHRSVSDLPLPLPQPALASPGSPEPLPILSLNGGGPELAGDWGGAGDAPLSPDPLLSSPPGSPKAALHSPVSEGAPVIPPSSGLPLPTPDARVGASTCGPPDHLLPPLGTPLPPDWVTLEGDFVLMLAISPSHLGADLVAAPHARFDDGLVHLCWVRSGISRAALLRLFLAMERGSHFSLGCPQLGYAAARAFRLEPLTPRGVLTVDGEQVEYGPLQAQMHPGIARGRTQTPALPAAPALYGRQPGAAHGLQPVCQGAALFFHNSWLWGSQDLFRIVLTEAVGG

SEQ ID NO: 83464 - protein, 202 aa, Homo sapiens
  Payload ID: 16603
  Gene Symbol: SGPL1
  Gene Name: sphingosine-1-phosphate lyase 1
  ENSP ID: ENSP00000299297
ILEVYSTKAKNYVNGHCTKYEPWQLIAWSVVWTLLIVWGYEFVFQPESLWSRFKKKCFKLTRKMPIIGRKIQDKLNKTKDDISKNMSFLKVDKEYVKALPSQGLSSSAVLEKLKEYSSMDAFWQEGRASGTVYSGEEKLTELLVKAYGDFAWSNPLHPDIFPGLRKIEAEIVRIACSLFNGGPDSCGCEALFLFCFSNMLAP

SEQ ID NO: 83465 - protein, 568 aa, Homo sapiens
  Payload ID: 16603
  Gene Symbol: SGPL1
  Gene Name: sphingosine-1-phosphate lyase 1
  Uniprot ID: O95470
  ENSP ID: ENSP00000362298
MPSTDLLMLKAFEPYLEILEVYSTKAKNYVNGHCTKYEPWQLIAWSVVWTLLIVWGYEFVFQPESLWSRFKKKCFKLTRKMPIIGRKIQDKLNKTKDDISKNMSFLKVDKEYVKALPSQGLSSSAVLEKLKEYSSMDAFWQEGRASGTVYSGEEKLTELLVKAYGDFAWSNPLHPDIFPGLRKIEAEIVRIACSLFNGGPDSCGCVTSGGTESILMACKAYRDLAFEKGIKTPEIVAPQSAHAAFNKAASYFGMKIVRVPLTKMMEVDVRAMRRAISRNTAMLVCSTPQFPHGVIDPVPEVAKLAVKYKIPLHVDACLGGFLIVFMEKAGYPLEHPFDFRVKGVTSISADTHKYGYAPKGSSLVLYSDKKYRNYQFFVDTDWQGGIYASPTIAGSRPGGISAACWAALMHFGENGYVEATKQIIKTARFLKSELENIKGIFVFGNPQLSVIALGSRDFDIYRLSNLMTAKGWNLNQLQFPPSIHFCITLLHARKRVAIQFLKDIRESVTQIMKNPKAKTTGMGAIYGMAQTTVDRNMVAELSSVFLDSLYSTDTVTQGSQMNGSPKPH

SEQ ID NO: 83466 - protein, 135 aa, Homo sapiens
  Payload ID: 16603
  Gene Symbol: SGPL1
  Gene Name: sphingosine-1-phosphate lyase 1
  ENSP ID: ENSP00000386549
  MOD_RES (1)..(1): Any amino acid
XIQDKLNKTKDDISKNMSFLKVDKEYVKALPSQGLSSSAVLEKLKEYSSMDAFWQEGRASGTVYSGEEKLTELLVKAYGDFAWSNPLHPDIFPGLRKIEAEIVRIACSLFNGGPDSCGCVSICKGHPIALFFRLK

SEQ ID NO: 83467 - protein, 441 aa, Homo sapiens
  Payload ID: 16604
  Gene Symbol: SGPP1
  Gene Name: sphingosine-1-phosphate phosphatase 1
  Uniprot ID: Q9BX95
  ENSP ID: ENSP00000247225
MSLRQRLAQLVGRLQDPQKVARFQRLCGVEAPPRRSADRREDEKAEAPLAGDPRLRGRQPGAPGGPQPPGSDRNQCPAKPDGGGAPNGVRNGLAAELGPASPRRAGALRRNSLTGEEGQLARVSNWPLYCLFCFGTELGNELFYILFFPFWIWNLDPLVGRRLVVIWVLVMYLGQCTKDIIRWPRPASPPVVKLEVFYNSEYSMPSTHAMSGTAIPISMVLLTYGRWQYPLIYGLILIPCWCSLVCLSRIYMGMHSILDIIAGFLYTILILAVFYPFVDLIDNFNQTHKYAPFIIIGLHLALGIFSFTLDTWSTSRGDTAEILGSGAGIACGSHVTYNMGLVLDPSLDTLPLAGPPITVTLFGKAILRILIGMVFVLIIRDVMKKITIPLACKIFNIPCDDIRKARQHMEVELPYRYITYGMVGFSITFFVPYIFFFIGIS

SEQ ID NO: 83468 - protein, 399 aa, Homo sapiens
  Payload ID: 16605
  Gene Symbol: SGPP2
  Gene Name: sphingosine-1-phosphate phosphatase 2
  Uniprot ID: Q8IWX5
  ENSP ID: ENSP00000315137
MAELLRSLQDSQLVARFQRRCGLFPAPDEGPRENGADPTERAARVPGVEHLPAANGKGGEAPANGLRRAAAPEAYVQKYVVKNYFYYYLFQFSAALGQEVFYITFLPFTHWNIDPYLSRRLIIIWVLVMYIGQVAKDVLKWPRPSSPPVVKLEKRLIAEYGMPSTHAMAATAIAFTLLISTMDRYQYPFVLGLVMAVVFSTLVCLSRLYTGMHTVLDVLGGVLITALLIVLTYPAWTFIDCLDSASPLFPVCVIVVPFFLCYNYPVSDYYSPTRADTTTILAAGAGVTIGFWINHFFQLVSKPAESLPVIQNIPPLTTYMLVLGLTKFAVGIVLILLVRQLVQNLSLQVLYSWFKVVTRNKEARRRLEIEVPYKFVTYTSVGICATTFVPMLHRFLGLP

SEQ ID NO: 83469 - protein, 382 aa, Homo sapiens
  Payload ID: 16606
  Gene Symbol: S1PR1
  Gene Name: sphingosine-1-phosphate receptor 1
  Uniprot ID: P21453
  ENSP ID: ENSP00000305416
MGPTSVPLVKAHRSSVSDYVNYDIIVRHYNYTGKLNISADKENSIKLTSVVFILICCFIILENIFVLLTIWKTKKFHRPMYYFIGNLALSDLLAGVAYTANLLLSGATTYKLTPAQWFLREGSMFVALSASVFSLLAIAIERYITMLKMKLHNGSNNFRLFLLISACWVISLILGGLPIMGWNCISALSSCSTVLPLYHKHYILFCTTVFTLLLLSIVILYCRIYSLVRTRSRRLTFRKNISKASRSSEKSLALLKTVIIVLSVFIACWAPLFILLLLDVGCKVKTCDILFRAEYFLVLAVLNSGTNPIIYTLTNKEMRRAFIRIMSCCKCPSGDSAGKFKRPIIAGMEFSRSKSDNSSHPQKDEGDNPETIMSSGNVNSSS

SEQ ID NO: 83470 - protein, 353 aa, Homo sapiens
  Payload ID: 16607
  Gene Symbol: S1PR2
  Gene Name: sphingosine-1-phosphate receptor 2
  Uniprot ID: O95136
  ENSP ID: ENSP00000466933
MGSLYSEYLNPNKVQEHYNYTKETLETQETTSRQVASAFIVILCCAIVVENLLVLIAVARNSKFHSAMYLFLGNLAASDLLAGVAFVANTLLSGSVTLRLTPVQWFAREGSAFITLSASVFSLLAIAIERHVAIAKVKLYGSDKSCRMLLLIGASWLISLVLGGLPILGWNCLGHLEACSTVLPLYAKHYVLCVVTIFSIILLAIVALYVRIYCVVRSSHADMAAPQTLALLKTVTIVLGVFIVCWLPAFSILLLDYACPVHSCPILYKAHYFFAVSTLNSLLNPVIYTWRSRDLRREVLRPLQCWRPGVGVQGRRRGGTPGHHLLPLRSSSSLERGMHMPTSPTFLEGNTVV

SEQ ID NO: 83471 - protein, 378 aa, Homo sapiens
  Payload ID: 16608
  Gene Symbol: S1PR3
  Gene Name: sphingosine-1-phosphate receptor 3
  Uniprot ID: Q99500
  ENSP ID: ENSP00000350878
MATALPPRLQPVRGNETLREHYQYVGKLAGRLKEASEGSTLTTVLFLVICSFIVLENLMVLIAIWKNNKFHNRMYFFIGNLALCDLLAGIAYKVNILMSGKKTFSLSPTVWFLREGSMFVALGASTCSLLAIAIERHLTMIKMRPYDANKRHRVFLLIGMCWLIAFTLGALPILGWNCLHNLPDCSTILPLYSKKYIAFCISIFTAILVTIVILYARIYFLVKSSSRKVANHNNSERSMALLRTVVIVVSVFIACWSPLFILFLIDVACRVQACPILFKAQWFIVLAVLNSAMNPVIYTLASKEMRRAFFRLVCNCLVRGRGARASPIQPALDPSRSKSSSSNNSSHSPKVKEDLPHTAPSSCIMDKNAALQNGIFCN

SEQ ID NO: 83472 - protein, 378 aa, Homo sapiens; identical to SEQ ID NO: 83471
  Payload ID: 16608
  Gene Symbol: S1PR3
  Gene Name: sphingosine-1-phosphate receptor 3
  Uniprot ID: Q99500
  ENSP ID: ENSP00000365006

SEQ ID NO: 83473 - protein, 384 aa, Homo sapiens
  Payload ID: 16609
  Gene Symbol: S1PR4
  Gene Name: sphingosine-1-phosphate receptor 4
  Uniprot ID: O95977
  ENSP ID: ENSP00000246115
MNATGTPVAPESCQQLAAGGHSRLIVLHYNHSGRLAGRGGPEDGGLGALRGLSVAASCLVVLENLLVLAAITSHMRSRRWVYYCLVNITLSDLLTGAAYLANVLLSGARTFRLAPAQWFLREGLLFTALAASTFSLLFTAGERFATMVRPVAESGATKTSRVYGFIGLCWLLAALLGMLPLLGWNCLCAFDRCSSLLPLYSKRYILFCLVIFAGVLATIMGLYGAIFRLVQASGQKAPRPAARRKARRLLKTVLMILLAFLVCWGPLFGLLLADVFGSNLWAQEYLRGMDWILALAVLNSAVNPIIYSFRSREVCRAVLSFLCCGCLRLGMRGPGDCLARAVEAHSGASTTDSSLRPRDSFRGSRSLSFRMREPLSSISSVRSI

SEQ ID NO: 83474 - protein, 398 aa, Homo sapiens
  Payload ID: 16610
  Gene Symbol: S1PR5
  Gene Name: sphingosine-1-phosphate receptor 5
  Uniprot ID: Q9H228
  ENSP ID: ENSP00000328472
MESGLLRPAPVSEVIVLHYNYTGKLRGARYQPGAGLRADAVVCLAVCAFIVLENLAVLLVLGRHPRFHAPMFLLLGSLTLSDLLAGAAYAANILLSGPLTLKLSPALWFAREGGVFVALTASVLSLLAIALERSLTMARRGPAPVSSRGRTLAMAAAAWGVSLLLGLLPALGWNCLGRLDACSTVLPLYAKAYVLFCVLAFVGILAAICALYARIYCQVRANARRLPARPGTAGTTSTRARRKPRSLALLRTLSVVLLAFVACWGPLFLLLLLDVACPARTCPVLLQADPFLGLAMANSLLNPIIYTLTNRDLRHALLRLVCCGRHSCGRDPSGSQQSASAAEASGGLRRCLPPGLDGSFSGSERSSPQRDGLDTSGSTGSPGAPTAARTLVSEPAAD

SEQ ID NO: 83475 - protein, 398 aa, Homo sapiens; identical to SEQ ID NO: 83474
  Payload ID: 16610
  Gene Symbol: S1PR5
  Gene Name: sphingosine-1-phosphate receptor 5
  Uniprot ID: Q9H228
  ENSP ID: ENSP00000416915

SEQ ID NO: 83476 - protein, 75 aa, Homo sapiens
  Payload ID: 16610
  Gene Symbol: S1PR5
  Gene Name: sphingosine-1-phosphate receptor 5
  ENSP ID: ENSP00000464884
MCNPVSLYLGSPPPAWPWGARPMESGLLRPAPVSEVIVLHYNYTGKLRGARYQPGAGLRADAVVCLAVCAFIVLE

SEQ ID NO: 83477 - protein, 254 aa, Homo sapiens
  Payload ID: 16610
  Gene Symbol: S1PR5
  Gene Name: sphingosine-1-phosphate receptor 5
  ENSP ID: ENSP00000481239
MESGLLRPAPVSEVIVLHYNYTGKLRGARYQPGAGLRADAVVCLAVCAFIVLENLAVLLVLGRHPRFHAPMFLLLGSLTLSDLARPGTAGTTSTRARRKPRSLALLRTLSVVLLAFVACWGPLFLLLLLDVACPARTCPVLLQADPFLGLAMANSLLNPIIYTLTNRDLRHALLRLVCCGRHSCGRDPSGSQQSASAAEASGGLRRCLPPGLDGSFSGSERSSPQRDGLDTSGSTGSPGAPTAARTLVSEPAAD

SEQ ID NO: 83478 - protein, 1671 aa, Homo sapiens
  Payload ID: 16611
  Gene Symbol: SPHKAP
  Gene Name: SPHK1 interactor, AKAP domain containing
  Uniprot ID: Q2M3C7
  ENSP ID: ENSP00000339886
MDGNSLLSVPSNLESSRMYDVLEPQQGRGCGSSGSGPGNSITACKKVLRSNSLLESTDYWLQNQRMPCQIGFVEDKSENCASVCFVNLDVNKDECSTEHLQQKLVNVSPDLPKLISSMNVQQPKENEIVVLSGLASGNLQADFEVSQCPWLPDICLVQCARGNRPNSTNCIIFEINKFLIGLELVQERQLHLETNILKLEDDTNCSLSSIEEDFLTASEHLEEESEVDESRNDYENINVSANVLESKQLKGATQVEWNCNKEKWLYALEDKYINKYPTPLIKTERSPENLTKNTALQSLDPSAKPSQWKREAVGNGRQATHYYHSEAFKGQMEKSQALYIPKDAYFSMMDKDVPSACAVAEQRSNLNPGDHEDTRNALPPRQDGEVTTGKYATNLAESVLQDAFIRLSQSQSTLPQESAVSVSVGSSLLPSCYSTKDTVVSRSWNELPKIVVVQSPDGSDAAPQPGISSWPEMEVSVETSSILSGENSSRQPQSALEVALACAATVIGTISSPQATERLKMEQVVSNFPPGSSGALQTQAPQGLKEPSINEYSFPSALCGMTQVASAVAVCGLGEREEVTCSVAPSGSLPPAAEASEAMPPLCGLASMELGKEAIAKGLLKEAALVLTRPNTYSSIGDFLDSMNRRIMETASKSQTLCSENVVRNELAHTLSNVILRHSIDEVHHKNMIIDPNDNRHSSEILDTLMESTNQLLLDVICFTFKKMSHIVRLGECPAVLSKETIRRRETEPSCQPSDPGASQAWTKATESSSSSPLSNSHNTSLVINNLVDGMYSKQDKGGVRPGLFKNPTLQSQLSRSHRVPDSSTATTSSKEIYLKGIAGEDTKSPHHSENECRASSEGQRSPTVSQSRSGSQEAEESIHPNTQEKYNCATSRINEVQVNLSLLGDDLLLPAQSTLQTKHPDIYCITDFAEELADTVVSMATEIAAICLDNSSGKQPWFCAWKRGSEFLMTPNVPCRSLKRKKESQGSGTAVRKHKPPRLSEIKRKTDEHPELKEKLMNRVVDESMNLEDVPDSVNLFANEVAAKIMNLTEFSMVDGMWQAQGYPRNRLLSGDRWSRLKASSCESIPEEDSEARAYVNSLGLMSTLSQPVSRASSVSKQSSCESITDEFSRFMVNQMENEGRGFELLLDYYAGKNASSILNSAMQQACRKSDHLSVRPSCPSKQSSTESITEEFYRYMLRDIERDSRESASSRRSSQDWTAGLLSPSLRSPVCHRQSSMPDSRSPCSRLTVNVPIKANSLDGFAQNCPQDFLSVQPVSSASSSGLCKSDSCLYRRGGTDHITNMLIHETWASSIEALMRKNKIIVDDAEEADTEPVSGGSPSQAEKCANRLAASRMCSGPTLLVQESLDCPRKDSVTECKQPPVSSLSKTASLTNHSPLDSKKETSSCQDPVPINHKRRSLCSREVPLIQIETDQREACAGEPEPFLSKSSLLEEAEGHSNDKNIPDVVRGGDTAVSACQIHSDSLDTRDVPEAEASTEARAPDEAPNPPSSSEESTGSWTQLANEEDNPDDTSSFLQLSERSMSELVEEKKILKGQSESTEAPASGPPTGTASPQRSLLVINFDLEPECPDAELRATLQWIAASELGIPTIYFKKSQENRIEKFLDVVQLVHRKSWKVGDIFHAVVQYCKMHEEQKDGRLSLFDWLLELG

SEQ ID NO: 83479 - protein, 1700 aa, Homo sapiens
  Payload ID: 16611
  Gene Symbol: SPHKAP
  Gene Name: SPHK1 interactor, AKAP domain containing
  Uniprot ID: Q2M3C7
  ENSP ID: ENSP00000375909
MDGNSLLSVPSNLESSRMYDVLEPQQGRGCGSSGSGPGNSITACKKVLRSNSLLESTDYWLQNQRMPCQIGFVEDKSENCASVCFVNLDVNKDECSTEHLQQKLVNVSPDLPKLISSMNVQQPKENEIVVLSGLASGNLQADFEVSQCPWLPDICLVQCARGNRPNSTNCIIFEINKFLIGLELVQERQLHLETNILKLEDDTNCSLSSIEEDFLTASEHLEEESEVDESRNDYENINVSANVLESKQLKGATQVEWNCNKEKWLYALEDKYINKYPTPLIKTERSPENLTKNTALQSLDPSAKPSQWKREAVGNGRQATHYYHSEAFKGQMEKSQALYIPKDAYFSMMDKDVPSACAVAEQRSNLNPGDHEDTRNALPPRQDGEVTTGKYATNLAESVLQDAFIRLSQSQSTLPQESAVSVSVGSSLLPSCYSTKDTVVSRSWNELPKIVVVQSPDGSDAAPQPGISSWPEMEVSVETSSILSGENSSRQPQSALEVALACAATVIGTISSPQATERLKMEQVVSNFPPGSSGALQTQAPQGLKEPSINEYSFPSALCGMTQVASAVAVCGLGEREEVTCSVAPSGSLPPAAEASEAMPPLCGLASMELGKEAIAKGLLKEAALVLTRPNTYSSIGDFLDSMNRRIMETASKSQTLCSENVVRNELAHTLSNVILRHSIDEVHHKNMIIDPNDNRHSSEILDTLMESTNQLLLDVICFTFKKMSHIVRLGECPAVLSKETIRRRETEPSCQPSDPGASQAWTKATESSSSSPLSNSHNTSLVINNLVDGMYSKQDKGGVRPGLFKNPTLQSQLSRSHRVPDSSTATTSSKEIYLKGIAGEDTKSPHHSENECRASSEGQRSPTVSQSRSGSQEAEESIHPNTQEKYNCATSRINEVQVNLSLLGDDLLLPAQSTLQTKHPDIYCITDFAEELADTVVSMATEIAAICLDNSSGKQPWFCAWKRGSEFLMTPNVPCRSLKRKKESQGSGTAVRKHKPPRLSEIKRKTDEHPELKEKLMNRVVDESMNLEDVPDSVNLFANEVAAKIMNLTEFSMVDGMWQAQGYPRNRLLSGDRWSRLKASSCESIPEEDSEARAYVNSLGLMSTLSQPVSRASSVSKQSSCESITDEFSRFMVNQMENEGRGFELLLDYYAGKNASSILNSAMQQACRKSDHLSVRPSCPSKQSSTESITEEFYRYMLRDIERDSRESASSRRSSQDWTAGLLSPSLRSPVCHRQSSMPDSRSPCSRLTVNVPIKANSLDGFAQNCPQDFLSVQPVSSASSSGLCKSDSCLYRRGGTDHITNMLIHETWASSIEALMRKNKIIVDDAEEADTEPVSGGSPSQAEKCANRLAASRMCSGPTLLVQESLDCPRKDSVTECKQPPVSSLSKTASLTNHSPLDSKKETSSCQDPVPINHKRRSLCSREVPLIQIETDQREACAGEPEPFLSKSSLLEEAEGHSNDKNIPDVVRGGDTAVSACQIHSDSLDTRDVPEAEASTEARAPDEAPNPPSSSEESTGSWTQLANEEDNPDDTSSFLQLSERSMSNGNSSATSSLGIMDLDIYQESMPSSPMINELVEEKKILKGQSESTEAPASGPPTGTASPQRSLLVINFDLEPECPDAELRATLQWIAASELGIPTIYFKKSQENRIEKFLDVVQLVHRKSWKVGDIFHAVVQYCKMHEEQKDGRLSLFDWLLELG

SEQ ID NO: 83480 - protein, 271 aa, Homo sapiens
  Payload ID: 16612
  Gene Symbol: SPI1
  Gene Name: Spi-1 proto-oncogene
  Uniprot ID: P17947
  ENSP ID: ENSP00000227163
MLQACKMEGFPLVPPQPSEDLVPYDTDLYQRQTHEYYPYLSSDGESHSDHYWDFHPHHVHSEFESFAENNFTELQSVQPPQLQQLYRHMELEQMHVLDTPMVPPHPSLGHQVSYLPRMCLQYPSLSPAQPSSDEEEGERQSPPLEVSDGEADGLEPGPGLLPGETGSKKKIRLYQFLLDLLRSGDMKDSIWWVDKDKGTFQFSSKHKEALAHRWGIQKGNRKKMTYQKMARALRNYGKTGEVKKVKKKLTYQFSGEVLGRGGLAERRHPPH

SEQ ID NO: 83481 - protein, 270 aa, Homo sapiens
  Payload ID: 16612
  Gene Symbol: SPI1
  Gene Name: Spi-1 proto-oncogene
  Uniprot ID: P17947
  ENSP ID: ENSP00000367799
MLQACKMEGFPLVPPPSEDLVPYDTDLYQRQTHEYYPYLSSDGESHSDHYWDFHPHHVHSEFESFAENNFTELQSVQPPQLQQLYRHMELEQMHVLDTPMVPPHPSLGHQVSYLPRMCLQYPSLSPAQPSSDEEEGERQSPPLEVSDGEADGLEPGPGLLPGETGSKKKIRLYQFLLDLLRSGDMKDSIWWVDKDKGTFQFSSKHKEALAHRWGIQKGNRKKMTYQKMARALRNYGKTGEVKKVKKKLTYQFSGEVLGRGGLAERRHPPH

SEQ ID NO: 83482 - protein, 245 aa, Homo sapiens
  Payload ID: 16612
  Gene Symbol: SPI1
  Gene Name: Spi-1 proto-oncogene
  ENSP ID: ENSP00000438846
MLQACKMEGFPLVPPPSEDLVPYDTDLYQRQTHEYYPYLSSDGESHSDHYWDFHPHHVHSEFESFAENNFTELQSVQPPQLQQLYRHMELEQMHVLDTPMVPPHPSLGHQVSYLPRMCLQYPSLSPAQPSSDEEEGERQSPPLEVSDGEADGLEPGPGLLPGETGGAPGPPPWPRPWPCLCPAPTQPGQLTQQPRHRVACVCVCMFASVCVLWGCLWLSLCVCICCVVHTGISMKCARCVCLSVP

SEQ ID NO: 83483 - protein, 35 aa, Homo sapiens
  Payload ID: 16612
  Gene Symbol: SPI1
  Gene Name: Spi-1 proto-oncogene
  ENSP ID: ENSP00000443865
MLQACKMEGFPLVPPAARRRSACTSSCWTCSAAAT

SEQ ID NO: 83484 - protein, 177 aa, Homo sapiens
  Payload ID: 16613
  Gene Symbol: SPIB
  Gene Name: Spi-B transcription factor (Spi-1/PU.1 related)
  Uniprot ID: Q01892
  ENSP ID: ENSP00000270632
MLALEAAQLDGPHFSCLYPDGVFYDLDSCKHSSYPDSEGAPDSLWDWTVAPPVPATPYEAFDPAAAAFSHPQAAQLCYEPPTYSPAGNLELAPSLEAPGPGLPAYPTENFASQTLVPPAYAPYPSPVLSEEEDLPLDSPALEVSDSESDEALVAGPEGKGSEGLARSCACTSSCWGY

SEQ ID NO: 83485 - protein, 171 aa, Homo sapiens
  Payload ID: 16613
  Gene Symbol: SPIB
  Gene Name: Spi-B transcription factor (Spi-1/PU.1 related)
  Uniprot ID: Q01892
  ENSP ID: ENSP00000391877
MASSMTWTAASIPATLIQRGLLTLVPPAYAPYPSPVLSEEEDLPLDSPALEVSDSESDEALVAGPEGKGSEAGTRKKLRLYQFLLGLLTRGDMRECVWWVEPGAGVFQFSSKHKELLARRWGQQKGNRKRMTYQKLARALRNYAKTGEIRKVKRKLTYQFDSALLPAVRRA

SEQ ID NO: 83486 - protein, 137 aa, Homo sapiens
  Payload ID: 16613
  Gene Symbol: SPIB
  Gene Name: Spi-B transcription factor (Spi-1/PU.1 related)
  ENSP ID: ENSP00000469023
MLALEAAQLDGPHFSCLYPDGVFYDLDSCKHSSYPDSEGAPDSLWDWTVAPPVPATPYEAFDPAAAAFSHPQAAQLCYEPPTYSPAGNLELAPSLEAPGPGLPAYPTENFASQPCAIRGGRLTVGQPCPGGLGQRVG

SEQ ID NO: 83487 - protein, 77 aa, Homo sapiens
  Payload ID: 16613
  Gene Symbol: SPIB
  Gene Name: Spi-B transcription factor (Spi-1/PU.1 related)
  ENSP ID: ENSP00000470970
MLALEAAQLDGPHFSCLYPDGVFYDLDSCKHSSYPDSEGAPDPGSPGICPVPQPCAIRGGRLTVGQPCPGGLGQRVG

SEQ ID NO: 83488 - protein, 262 aa, Homo sapiens
  Payload ID: 16613
  Gene Symbol: SPIB
  Gene Name: Spi-B transcription factor (Spi-1/PU.1 related)
  Uniprot ID: Q01892
  ENSP ID: ENSP00000471921
MLALEAAQLDGPHFSCLYPDGVFYDLDSCKHSSYPDSEGAPDSLWDWTVAPPVPATPYEAFDPAAAAFSHPQAAQLCYEPPTYSPAGNLELAPSLEAPGPGLPAYPTENFASQTLVPPAYAPYPSPVLSEEEDLPLDSPALEVSDSESDEALVAGPEGKGSEAGTRKKLRLYQFLLGLLTRGDMRECVWWVEPGAGVFQFSSKHKELLARRWGQQKGNRKRMTYQKLARALRNYAKTGEIRKVKRKLTYQFDSALLPAVRRA

SEQ ID NO: 83489 - protein, 127 aa, Homo sapiens
  Payload ID: 16613
  Gene Symbol: SPIB
  Gene Name: Spi-B transcription factor (Spi-1/PU.1 related)
  ENSP ID: ENSP00000472626
MLALEAAQFRWLEAASACPCVSPPPGSTGHTSAVCTQMASSMTWTAASIPATLIQRGLLTPCGTGLWPHLSQPPPMKPSTRQQPLLATPRLPSSATNPPPTALQGTSNWPPAWRPRGLASLHTPRRT

SEQ ID NO: 83490 - protein, 248 aa, Homo sapiens
  Payload ID: 16614
  Gene Symbol: SPIC
  Gene Name: Spi-C transcription factor (Spi-1/PU.1 related)
  Uniprot ID: Q8N5J4
  ENSP ID: ENSP00000448580
MTCVEQDKLGQAFEDAFEVLRQHSTGDLQYSPDYRNYLALINHRPHVKGNSSCYGVLPTEEPVYNWRTVINSAADFYFEGNIHQSLQNITENQLVQPTLLQQKGGKGRKKLRLFEYLHESLYNPEMASCIQWVDKTKGIFQFVSKNKEKLAELWGKRKGNRKTMTYQKMARALRNYGRSGEITKIRRKLTYQFSEAILQRLSPSYFLGKEIFYSQCVQPDQEYLSLNNWNANYNYTYANYHELNHHDC

SEQ ID NO: 83491 - protein, 855 aa, Homo sapiens
  Payload ID: 16615
  Gene Symbol: SPICE1
  Gene Name: spindle and centriole associated protein 1
  Uniprot ID: Q8N0Z3
  ENSP ID: ENSP00000295872
MSFVRVNRCGPRVGVRKTPKVKKKKTSVKQEWDNTVTDLTVHRATPEDLVRRHEIHKSKNRALVHWELQEKALKRKWRKQKPETLNLEKRRLSIMKEILSDQYQMQDVLEKSDHLIAAAKELFPRRRTGFPNVTVAPDSSQGPIVVNQDPITQSIFNESVIEPQALNDVDGEEEGTVNSQSGESENENELDNSLNSQSNTNTDRFLQQLTEENFELISKLWTDIQQKIATQSQITPPGTPSSALSSGEQRAALNATNAVKRLQTRLQPEESTETLDSSYVVGHVLNSRKQKQLLNKVKRKPNLHALSKPKKNISSGSTTSADLPNRTNSNLDVLKHMIHEVEHEMEEYERWTGREVKGLQSSQGLTGFTLSLVSSLCRLVRYLKESEIQLRKEVETRQQLEQVLGDHRELIDALTAEILRLREENAATQARLQQYMVTTDEQLISLTHAIKNCPVINNRQEIQASESGATGRRVMDSPERPVVNANVSVPLMFREEVAEFPQEELPVKLSQVPDPPDNMNLAKNFPAHIFEPAVLLTPPRQKSNLKFSPLQDVLRRTVQTRPAPRLPPTVEIIEKEQNWEEKTLPIDTDIQNSSEENRLFTQRWRVSHMGEDLENKTQAPFVNLSQPLCNSHSNTQQSRSPTFSEELPVLGDGQQLRTNESLIQRKDIMTRIADLTLQNSAIKAHMNNIIEPRGEQGDGLRELNKQESASDMTSTFPVAQSLTPGSMEERIAELNRQSMEARGKLLQLIEQQKLVGLNLSPPMSPVQLPLRAWTEGAKRTIEVSIPGAEAPESSKCSTVSPVSGINTRRSSGATGNSCSPLNATSGSGRFTPLNPRAKIEKQNEEGWFALSTHVS

SEQ ID NO: 83492 - protein, 19 aa, Homo sapiens
  Payload ID: 16615
  Gene Symbol: SPICE1
  Gene Name: spindle and centriole associated protein 1
  ENSP ID: ENSP00000417137
MSFVRVNRCGPRVGVRKTP

SEQ ID NO: 83493 - protein, 173 aa, Homo sapiens
  Payload ID: 16615
  Gene Symbol: SPICE1
  Gene Name: spindle and centriole associated protein 1
  ENSP ID: ENSP00000417944
MSFVRVNRCGPRVGVRKTPKVKKKKTSVKQEWDNTVTDLTVHRATPEDLVRRHEIHKSKNRALVHWELQEKALKRKWRKQKPETLNLEKRRLSIMKEILSDQYQMQDVLEKSDHLIAAAKELFPRRRTGFPNVTVAPDSSQGPIVVNQDPITQSIFNESVIEPQALNDVDGEE

SEQ ID NO: 83494 - protein, 160 aa, Homo sapiens
  Payload ID: 16615
  Gene Symbol: SPICE1
  Gene Name: spindle and centriole associated protein 1
  ENSP ID: ENSP00000418681
MSFVRVNRCGPRVGVRKTPKVKKKKTSVKQEWDNTVTDLTVHRATPEDLVRRHEIHKSKNRALVHWELQEKALKRKWRKQKPETLNLEKRRLSIMKEILSDQYQMQDVLEKSDHLIAAAKELFPRRRTGFPNVTVAPDSSQGPIVVNQDPITQSIFNESV

SEQ ID NO: 83495 - protein, 189 aa, Homo sapiens
  Payload ID: 16615
  Gene Symbol: SPICE1
  Gene Name: spindle and centriole associated protein 1
  ENSP ID: ENSP00000420363
  MOD_RES (1)..(1): Any amino acid
XLDNSLNSQSNTNTDRFLQQLTEENFELISKLWTDIQQKIATQSQITPPGTPSSALSSGEQRAALNATNAVKRLQTRLQPEESTETLDSSYVVGHVLNSRKQKQLLNKEGAKRTIEVSIPGAEAPESSKCSTVSPVSGINTRRSSGATGNSCSPLNATSGSGRFTPLNPRAKIEKQNEEGWFALSTHVS

SEQ ID NO: 83496 - protein, 255 aa, Homo sapiens
  Payload ID: 16616
  Gene Symbol: SKA1
  Gene Name: spindle and kinetochore associated complex subunit 1
  Uniprot ID: Q96BD8
  ENSP ID: ENSP00000285116
MASSDLEQLCSHVNEKIGNIKKTLSLRNCGQEPTLKTVLNKIGDEIIVINELLNKLELEIQYQEQTNNSLKELCESLEEDYKDIEHLKENVPSHLPQVTVTQSCVKGSDLDPEEPIKVEEPEPVKKPPKEQRSIKEMPFITCDEFNGVPSYMKSRLTYNQINDVIKEINKAVISKYKILHQPKKSMNSVTRNLYHRFIDEETKDTKGRYFIVEADIKEFTTLKADKKFHVLLNILRHCRRLSEVRGGGLTRYVIT

SEQ ID NO: 83497 - protein, 255 aa, Homo sapiens; identical to SEQ ID NO: 83496
  Payload ID: 16616
  Gene Symbol: SKA1
  Gene Name: spindle and kinetochore associated complex subunit 1
  Uniprot ID: Q96BD8
  ENSP ID: ENSP00000381470

SEQ ID NO: 83498 - protein, 209 aa, Homo sapiens
  Payload ID: 16616
  Gene Symbol: SKA1
  Gene Name: spindle and kinetochore associated complex subunit 1
  Uniprot ID: Q96BD8
  ENSP ID: ENSP00000397222
MASSDLEQLCSHVNEKIGNIKKTLSLRNCGQEPTLKTVLNKIGDEIIVINELLNKLELEIQYQEQTNNSLKELCESLEEDYKDIEHLKENVPSHLPQVTVTQSWYMKSRLTYNQINDVIKEINKAVISKYKILHQPKKSMNSVTRNLYHRFIDEETKDTKGRYFIVEADIKEFTTLKADKKFHVLLNILRHCRRLSEVRGGGLTRYVIT

SEQ ID NO: 83499 - protein, 255 aa, Homo sapiens; identical to SEQ ID NO: 83496
  Payload ID: 16616
  Gene Symbol: SKA1
  Gene Name: spindle and kinetochore associated complex subunit 1
  Uniprot ID: Q96BD8
  ENSP ID: ENSP00000458992

SEQ ID NO: 83500 - protein, 104 aa, Homo sapiens
  Payload ID: 16616
  Gene Symbol: SKA1
  Gene Name: spindle and kinetochore associated complex subunit 1
  ENSP ID: ENSP00000467242
MKSRLTYNQINDVIKEINKAVISKYKILHQPKKSMNSVTRNLYHRFIDEETKDTKGRYFIVEADIKEFTTLKADKKFHVLLNILRHCRRLSEVRGGGLTRYVIT

SEQ ID NO: 83501 - protein, 91 aa, Homo sapiens
  Payload ID: 16616
  Gene Symbol: SKA1
  Gene Name: spindle and kinetochore associated complex subunit 1
  ENSP ID: ENSP00000467559
MPFITCDEFNGVPSYMKSRLTYNQINDVIKEINKAVISKYKILHQPKKSMNSVTRNLYHRFIDEETKDTKGRYFIVEADIKEFTTLKADKK

SEQ ID NO: 83502 - protein, 255 aa, Homo sapiens; identical to SEQ ID NO: 83496
  Payload ID: 16616
  Gene Symbol: SKA1
  Gene Name: spindle and kinetochore associated complex subunit 1
  Uniprot ID: Q96BD8
  ENSP ID: ENSP00000478259

SEQ ID NO: 83503 - protein, 104 aa, Homo sapiens; identical to SEQ ID NO: 83500
  Payload ID: 16616
  Gene Symbol: SKA1
  Gene Name: spindle and kinetochore associated complex subunit 1
  ENSP ID: ENSP00000487620

SEQ ID NO: 83504 - protein, 91 aa, Homo sapiens; identical to SEQ ID NO: 83501
  Payload ID: 16616
  Gene Symbol: SKA1
  Gene Name: spindle and kinetochore associated complex subunit 1
  ENSP ID: ENSP00000487687

SEQ ID NO: 83505 - protein, 209 aa, Homo sapiens; identical to SEQ ID NO: 83498
  Payload ID: 16616
  Gene Symbol: SKA1
  Gene Name: spindle and kinetochore associated complex subunit 1
  Uniprot ID: Q96BD8
  ENSP ID: ENSP00000488815

SEQ ID NO: 83506 - protein, 121 aa, Homo sapiens
  Payload ID: 16617
  Gene Symbol: SKA2
  Gene Name: spindle and kinetochore associated complex subunit 2
  Uniprot ID: Q8WVK7
  ENSP ID: ENSP00000333433
MEAEVDKLELMFQKAESDLDYIQYRLEYEIKTNHPDSASEKNPVTLLKELSVIKSRYQTLYARFKPVAVEQKESKSRICATVKKTMNMIQKLQKQTDLELSPLTKEEKTAAEQFKFHMPDL

SEQ ID NO: 83507 - protein, 75 aa, Homo sapiens
  Payload ID: 16617
  Gene Symbol: SKA2
  Gene Name: spindle and kinetochore associated complex subunit 2
  Uniprot ID: Q8WVK7
  ENSP ID: ENSP00000411231
MASEVGHNLESPETPGGGGWTRVEFPPPAPKGAATVWCLNRLGSRKLSLIWITFNTGWNMKSRLIILIQQVSCHH

SEQ ID NO: 83508 - protein, 46 aa, Homo sapiens
  Payload ID: 16617
  Gene Symbol: SKA2
  Gene Name: spindle and kinetochore associated complex subunit 2
  ENSP ID: ENSP00000462197
MASEVGHNLESPETPGGGGWTRVEFPPPAPKGAATVWCLNRLGCHH

SEQ ID NO: 83509 - protein, 62 aa, Homo sapiens
  Payload ID: 16617
  Gene Symbol: SKA2
  Gene Name: spindle and kinetochore associated complex subunit 2
  ENSP ID: ENSP00000462220
MEAEVDKLELMFQKAESDLDYIQYRLEYEIKTNHPDSASELSPLTKEEKTAAEQFKFHMPDL

SEQ ID NO: 83510 - protein, 109 aa, Homo sapiens
  Payload ID: 16617
  Gene Symbol: SKA2
  Gene Name: spindle and kinetochore associated complex subunit 2
  ENSP ID: ENSP00000462574
MEAEVDKLELMFQKAESDLDYIQYRLEYEIKTNHPDSASEKNPVTLLKELSVIKSRYQTLYARFKPVAVEQKESKSRICATVKKTMNMIQKLQKQTDLEVMLSVDSCHH

SEQ ID NO: 83511 - protein, 92 aa, Homo sapiens
  Payload ID: 16617
  Gene Symbol: SKA2
  Gene Name: spindle and kinetochore associated complex subunit 2
  ENSP ID: ENSP00000462918
MEAEVDKLELMKNPVTLLKELSVIKSRYQTLYARFKPVAVEQKESKSRICATVKKTMNMIQKLQKQTDLELSPLTKEEKTAAEQFKFHMPDL

SEQ ID NO: 83512 - protein, 78 aa, Homo sapiens
  Payload ID: 16617
  Gene Symbol: SKA2
  Gene Name: spindle and kinetochore associated complex subunit 2
  ENSP ID: ENSP00000463167
MASEVGHNLESPETPGGGGWTRVEFPPPAPKGAATVWCLNRLGSRKLSLIWITFNTGWNMKSRLIILIQQVRKIQLHS

SEQ ID NO: 83513 - protein, 66 aa, Homo sapiens
  Payload ID: 16617
  Gene Symbol: SKA2
  Gene Name: spindle and kinetochore associated complex subunit 2
  ENSP ID: ENSP00000463315
MFQKAESDLDYIQYRLEYEIKTNHPDSASEKNPVTLLKELSVIKSRYQTLYARFKPVAVEQKESKS

SEQ ID NO: 83514 - protein, 61 aa, Homo sapiens
  Payload ID: 16617
  Gene Symbol: SKA2
  Gene Name: spindle and kinetochore associated complex subunit 2
  ENSP ID: ENSP00000464558
MEAEVDKLELMFQKAESDLDYIQYRLEYEIKTNHPDSASETESHSVVQTGVQWHDHGSLQL

SEQ ID NO: 83515 - protein, 35 aa, Homo sapiens
  Payload ID: 16618
  Gene Symbol: SKA3
  Gene Name: spindle and kinetochore associated complex subunit 3
  Uniprot ID: Q8IX90
  ENSP ID: ENSP00000298260
MDPIRSFCGKLRSLASTLDCETARLQRALDGEESG

SEQ ID NO: 83516 - protein, 412 aa, Homo sapiens
  Payload ID: 16618
  Gene Symbol: SKA3
  Gene Name: spindle and kinetochore associated complex subunit 3
  Uniprot ID: Q8IX90
  ENSP ID: ENSP00000319417
MDPIRSFCGKLRSLASTLDCETARLQRALDGEESDFEDYPMRILYDLHSEVQTLKDDVNILLDKARLENQEGIDFIKATKVLMEKNSMDIMKIREYFQKYGYSPRVKKNSVHEQEAINSDPELSNCENFQKTDVKDDLSDPPVASSCISEKSPRSPQLSDFGLERYIVSQVLPNPPQAVNNYKEEPVIVTPPTKQSLVKVLKTPKCALKMDDFECVTPKLEHFGISEYTMCLNEDYTMGLKNARNNKSEEAIDTESRLNDNVFATPSPIIQQLEKSDAEYTNSPLVPTFCTPGLKIPSTKNSIALVSTNYPLSKTNSSSNDLEVEDRTSLVLNSDTCFENLTDPSSPTISSYENLLRTPTPPEVTKIPEDILQLLSKYNSNLATPIAIKAVPPSKRFLKHGQNIRDVSNKEN

SEQ ID NO: 83517 - protein, 388 aa, Homo sapiens
  Payload ID: 16618
  Gene Symbol: SKA3
  Gene Name: spindle and kinetochore associated complex subunit 3
  Uniprot ID: Q8IX90
  ENSP ID: ENSP00000382896
MDPIRSFCGKLRSLASTLDCETARLQRALDGEESDFEDYPMRILYDLHSEVQTLKDDVNILLDKARLENQEGIDFIKATKVLMEKNSMDIMKIREYFQKYGYSPRVKKNSVHEQEAINSDPELSNCENFQKTDVKDDLSDPPVASSCISEKSPRSPQLSDFGLERYIVSQVLPNPPQAVNNYKEEPVIVTPPTKQSLVKVLKTPKCALKMDDFECVTPKLEHFGISEYTMCLNEDYTMGLKNARNNKSEEAIDTESRLNDNVFATPSPIIQQLEKSDAEYTNSPLVPTFCTPGLKIPSTKNSIALVSTNYPLSKTNSSSNDLEVEDRTSLVLNSDTCFENLTDPSSPTISSYENLLRTPTPPEVTKIPEDILQKFQWIYPTQKLNKMR

SEQ ID NO: 83518 - protein, 36 aa, Homo sapiens
  Payload ID: 16618
  Gene Symbol: SKA3
  Gene Name: spindle and kinetochore associated complex subunit 3
  ENSP ID: ENSP00000441632
MDPIRSFCGKLRSLASTLDCETARLQRALDGEESGA

SEQ ID NO: 83519 - protein, 49 aa, Homo sapiens
  Payload ID: 16618
  Gene Symbol: SKA3
  Gene Name: spindle and kinetochore associated complex subunit 3
  ENSP ID: ENSP00000443543
MDPIRSFCGKLRSLASTLDCETARLQRALDGEESAFIKIQLKPSYSNSN

SEQ ID NO: 83520 - protein, 605 aa, Homo sapiens
  Payload ID: 16619
  Gene Symbol: SPDL1
  Gene Name: spindle apparatus coiled-coil protein 1
  Uniprot ID: Q96EA4
  ENSP ID: ENSP00000265295
MEADIITNLRCRLKEAEEERLKAAQYGLQLVESQNELQNQLDKCRNEMMTMTESYEQEKYTLQREVELKSRMLESLSCECEAIKQQQKMHLEKLEEQLSRSHGQEVNELKTKIEKLKVELDEARLSEKQLKHQVDHQKELLSCKSEELRVMSERVQESMSSEMLALQIELTEMESMKTTLKEEVNELQYRQEQLELLITNLMRQVDRLKEEKEEREKEAVSYYNALEKARVANQDLQVQLDQALQQALDPNSKGNSLFAEVEDRRAAMERQLISMKVKYQSLKKQNVFNREQMQRMKLQIATLLQMKGSQTEFEQQERLLAMLEQKNGEIKHLLGEIRNLEKFKNLYDSMESKPSVDSGTLEDNTYYTDLLQMKLDNLNKEIESTKGELSIQRMKALFESQRALDIERKLFANERCLQLSESENMKLRAKLDELKLKYEPEETVEVPVLKKRREVLPVDITTAKDACVNNSALGGEVYRLPPQKEETQSCPNSLEDNNLQLEKSVSIYTPVVSLSPHKNLPVDMQLKKEKKCVKLIGVPADAEALSERSGNTPNSPRLAAESKLQTEVKEGKETSSKLEKETCKKLHPILYVSSKSTPETQCPQQ

SEQ ID NO: 83521 - protein, 86 aa, Homo sapiens
  Payload ID: 16619
  Gene Symbol: SPDL1
  Gene Name: spindle apparatus coiled-coil protein 1
  ENSP ID: ENSP00000421598
MEADIITNLRCRLKEAEEERLKAAQYGLQLVESQNELQNQLDKCRNEMMTMTESYEQEKYTLQREVELKSRMLESLSCECEAIKQQ

SEQ ID NO: 83522 - protein, 230 aa, Homo sapiens
  Payload ID: 16619
  Gene Symbol: SPDL1
  Gene Name: spindle apparatus coiled-coil protein 1
  ENSP ID: ENSP00000422352
MEADIITNLRCRLKEAEEERLKAAQYGLQLVESQNELQNQLDKCRNEMMTMTESYEQEKYTLQREVELKSRMLESLSCECEAIKQQQKMHLEKLEEQLSRSHGQEVNELKTKIEKLKVELDEARLSEKQLKHQVDHQKELLSCKSEELRVMSERVQESMSSEMLALQIELTEMESMKTTLKEEVNELQYRQEQLELLITNLMRQVDRLKEEKEEREKEAVSYYNALEKAR

SEQ ID NO: 83523 - protein, 88 aa, Homo sapiens
  Payload ID: 16619
  Gene Symbol: SPDL1
  Gene Name: spindle apparatus coiled-coil protein 1
  ENSP ID: ENSP00000423687
MEADIITNLRCRLKEAEEERLKAAQYGLQLVESQNELQNQLDKCRNEMMTMTESYEQEKYTLQREVELKSRMLESLSCECEAIKQQQK

SEQ ID NO: 83524 - protein, 44 aa, Homo sapiens
  Payload ID: 16619
  Gene Symbol: SPDL1
  Gene Name: spindle apparatus coiled-coil protein 1
  ENSP ID: ENSP00000425357
MEADIITNLRCRLKEAEEERLKAAQVMNKKNIPFKEKLNSRVEC

SEQ ID NO: 83525 - protein, 149 aa, Homo sapiens
  Payload ID: 16619
  Gene Symbol: SPDL1
  Gene Name: spindle apparatus coiled-coil protein 1
  ENSP ID: ENSP00000425922
MEADIITNLRCRLKEAEEERLKAAQYGLQLVESQNELQNQLDKCRNEMMTMTESYEQEKYTLQREVELKSRMLESLSCECEAIKQQQKMHLEKLEEQLSRSHGQEVNELKTKIEKLKVELDEARLSEKQLKHQVDHQKELLSCKSEELR

SEQ ID NO: 83526 - protein, 22 aa, Homo sapiens
  Payload ID: 16619
  Gene Symbol: SPDL1
  Gene Name: spindle apparatus coiled-coil protein 1
  ENSP ID: ENSP00000426881
  MOD_RES (1)..(1): Any amino acid
XLDKCRNEMMTMTEQRLLDLTC

SEQ ID NO: 83527 - protein, 60 aa, Homo sapiens
  Payload ID: 16619
  Gene Symbol: SPDL1
  Gene Name: spindle apparatus coiled-coil protein 1
  ENSP ID: ENSP00000426965
MEADIITNLRCRLKEAEEERLKAAQYGLQLVESQNELQNQLDKCRNEMMTMTERLLDLTC

SEQ ID NO: 83528 - protein, 60 aa, Homo sapiens; identical to SEQ ID NO: 83527
  Payload ID: 16619
  Gene Symbol: SPDL1
  Gene Name: spindle apparatus coiled-coil protein 1
  ENSP ID: ENSP00000427197

SEQ ID NO: 83529 - protein, 158 aa, Homo sapiens
  Payload ID: 16619
  Gene Symbol: SPDL1
  Gene Name: spindle apparatus coiled-coil protein 1
  ENSP ID: ENSP00000427510
MEADIITNLRCRLKEAEEERLKAAQYGLQLVESQNELQNQLDKCRNEMMTMTESYEQEKYTLQREVELKSRMLESLSCECEAIKQQQKMHLEKLEEQLSRSHGQEVNELKTKIEKLKVELDEARLSEKQLKHQVDHQKELLSCKSEELRVMSERVQES

SEQ ID NO: 83530 - protein, 312 aa, Homo sapiens
  Payload ID: 16619
  Gene Symbol: SPDL1
  Gene Name: spindle apparatus coiled-coil protein 1
  ENSP ID: ENSP00000429470
  MOD_RES (1)..(1): Any amino acid
XLESLSCECEAIKQQQKMHLEKLEEQLSRSHGQEVNELKTKIEKLKVELDEARLSEKQLKHQVDHQKELLSCKSEELRVMSERVQESMSSEMLALQIELTEMESMKTTLKEEVNELQYRQEQLELLITNLMRQVDRLKEEKEEREKEAVSYYNALEKARVANQDLQVQLDQALQQALDPNSKGNSLFAEVEDRRAAMERQLISMKVKYQSLKKQNVFNREQMQRMKMKGSQTEFEQQERLLAMLEQKNGEIKHLLGEIRNLEKFKNLYDSMESKPSVDSGTLEDNTYYTDLLQMKLDNLNKEIESTKGELSI

SEQ ID NO: 83531 - protein, 60 aa, Homo sapiens; identical to SEQ ID NO: 83527
  Payload ID: 16619
  Gene Symbol: SPDL1
  Gene Name: spindle apparatus coiled-coil protein 1
  ENSP ID: ENSP00000486653

SEQ ID NO: 83532 - protein, 262 aa, Homo sapiens
  Payload ID: 16620
  Gene Symbol: SPIN1
  Gene Name: spindlin 1
  Uniprot ID: Q9Y657
  ENSP ID: ENSP00000365019
MKTPFGKTPGQRSRADAGHAGVSANMMKKRTSHKKHRSSVGPSKPVSQPRRNIVGCRIQHGWKEGNGPVTQWKGTVLDQVPVNPSLYLIKYDGFDCVYGLELNKDERVSALEVLPDRVATSRISDAHLADTMIGKAVEHMFETEDGSKDEWRGMVLARAPVMNTWFYITYEKDPVLYMYQLLDDYKEGDLRIMPDSNDSPPAEREPGEVVDSLVGKQVEYAKEDGSKRTGMVIHQVEAKPSVYFIKFDDDFHIYVYDLVKTS

SEQ ID NO: 83533 - protein, 258 aa, Homo sapiens
  Payload ID: 16621
  Gene Symbol: SPIN2A
  Gene Name: spindlin family, member 2A
  Uniprot ID: Q99865
  ENSP ID: ENSP00000364041
MKTPNAQEAEGQQTRAAAGRATGSANMTKKKVSQKKQRGRPSSQPRRNIVGCRISHGWKEGDEPITQWKGTVLDQVPINPSLYLVKYDGIDCVYGLELHRDERVLSLKILSDRVASSHISDANLANTIIGKAVEHMFEGEHGSKDEWRGMVLAQAPIMKAWFYITYEKDPVLYMYQLLDDYKEGDLRIMPESSESPPTEREPGGVVDGLIGKHVEYTKEDGSKRIGMVIHQVETKPSVYFIKFDDDFHIYVYDLVKKS

SEQ ID NO: 83534 - protein, 258 aa, Homo sapiens; identical to SEQ ID NO: 83533
  Payload ID: 16621
  Gene Symbol: SPIN2A
  Gene Name: spindlin family, member 2A
  Uniprot ID: Q99865
  ENSP ID: ENSP00000364043

SEQ ID NO: 83535 - protein, 157 aa, Homo sapiens
  Payload ID: 16621
  Gene Symbol: SPIN2A
  Gene Name: spindlin family, member 2A
  ENSP ID: ENSP00000483149
MKTPNAQEAEGQQTRAAAGRATGSANMTKKKVSQKKQRGRPSSQPRRNIVGCRISHGWKEGDEPITQWKGTVLDQLLDDYKEGDLRIMPESSESPPTEREPGGVVDGLIGKHVEYTKEDGSKRIGMVIHQVETKPSVYFIKFDDDFHIYVYDLVKKS

SEQ ID NO: 83536 - protein, 258 aa, Homo sapiens
  Payload ID: 16622
  Gene Symbol: SPIN2B
  Gene Name: spindlin family, member 2B
  Uniprot ID: Q9BPZ2
  ENSP ID: ENSP00000275988
MKTPNAQEAEGQQTRAAAGRATGSANMTKKKVSQKKQRGRPSSQPRRNIVGCRISHGWKEGDEPITQWKGTVLDQVPINPSLYLVKYDGIDCVYGLELHRDERVLSLKILSDRVASSHISDANLANTIIGKAVEHMFEGEHGSKDEWRGMVLAQAPIMKAWFYITYEKDPVLYMYQLLDDYKEGDLRIMPESSESPPTEREPGGVVDGLIGKHVEYTKEDGSKRIGMVIHQVEAKPSVYFIKFDDDFHIYVYDLVKKS

SEQ ID NO: 83537 - protein, 258 aa, Homo sapiens; identical to SEQ ID NO: 83536
  Payload ID: 16622
  Gene Symbol: SPIN2B
  Gene Name: spindlin family, member 2B
  Uniprot ID: Q9BPZ2
  ENSP ID: ENSP00000335008

SEQ ID NO: 83538 - protein, 157 aa, Homo sapiens
  Payload ID: 16622
  Gene Symbol: SPIN2B
  Gene Name: spindlin family, member 2B
  ENSP ID: ENSP00000364045
MKTPNAQEAEGQQTRAAAGRATGSANMTKKKVSQKKQRGRPSSQPRRNIVGCRISHGWKEGDEPITQWKGTVLDQLLDDYKEGDLRIMPESSESPPTEREPGGVVDGLIGKHVEYTKEDGSKRIGMVIHQVEAKPSVYFIKFDDDFHIYVYDLVKKS

SEQ ID NO: 83539 - protein, 258 aa, Homo sapiens; identical to SEQ ID NO: 83536
  Payload ID: 16622
  Gene Symbol: SPIN2B
  Gene Name: spindlin family, member 2B
  Uniprot ID: Q9BPZ2
  ENSP ID: ENSP00000364047

SEQ ID NO: 83540 - protein, 247 aa, Homo sapiens
  Payload ID: 16622
  Gene Symbol: SPIN2B
  Gene Name: spindlin family, member 2B
  ENSP ID: ENSP00000404314
MKTPNAQEAEGQQTRAAAGRATGSANMTKKKVSQKKQRGRPSSQPRRNIVGCRISHGWKEGDEPITQWKGTVLDQVPINPSLYLVKYDGIDCVYGLELHRDERVLSLKILSDRVASSHISDANLANTIIGKAVEHMFEGEHGSKDEWRGMVLAQAPIMKAWFYITYEKDPVLYMYQLLDDYKEGDLRIMPESSESPPTEREPGGVVDGLIGKHVEYTKEDGSKRIGMVIHQVEAKPSVYFIKFDDDF

SEQ ID NO: 83541 - protein, 258 aa, Homo sapiens
  Payload ID: 16623
  Gene Symbol: SPIN3
  Gene Name: spindlin family, member 3
  Uniprot ID: Q5JUX0
  ENSP ID: ENSP00000364054
MKTPFGKAAAGQRSRTGAGHGSVSVTMIKRKAAHKKHRSRPTSQPRGNIVGCRIQHGWKDGDEPLTQWKGTVLDQVPVNPSLYLIKYDGFDCVYGLELHRDERVSSLEVLPNRVASSRISDTHLAEIMVGKAVEHIFETEEGSKNEWRGMVLAQAPVMNTWFYITYEKDPVLYMYQLLDDYKDGDLRILQDSNDSPLAEREPGEVIDSLVGKQVEYAKDDGSKRTGMVIHQVEAKPSVYFIKFDDDFHIYVYDLVKTS

SEQ ID NO: 83542 - protein, 77 aa, Homo sapiens
  Payload ID: 16623
  Gene Symbol: SPIN3
  Gene Name: spindlin family, member 3
  Uniprot ID: Q5JUX0
  ENSP ID: ENSP00000433337
MKTPFGKAAAGQRSRTGAGHGSVSVTMIKRKAAHKKHRSRPTSQPRGNIVGCRIQHGWKDGDEPLTQWKGTVLDQLL

SEQ ID NO: 83543 - protein, 77 aa, Homo sapiens; identical to SEQ ID NO: 83542
  Payload ID: 16623
  Gene Symbol: SPIN3
  Gene Name: spindlin family, member 3
  Uniprot ID: Q5JUX0
  ENSP ID: ENSP00000436805

SEQ ID NO: 83544 - protein, 249 aa, Homo sapiens
  Payload ID: 16624
  Gene Symbol: SPIN4
  Gene Name: spindlin family, member 4
  Uniprot ID: Q56A73
  ENSP ID: ENSP00000334163
MSPPTVPPMGVDGVSAYLMKKRHTHRKQRRKPTFLTRRNIVGCRIQHGWKEGNEPVEQWKGTVLEQVSVKPTLYIIKYDGKDSVYGLELHRDKRVLALEILPERVPTPRIDSRLADSLIGKAVEHVFEGEHGTKDEWKGMVLARAPVMDTWFYITYEKDPVLYMYTLLDDYKDGDLRIIPDSNYYFPTAEQEPGEVVDSLVGKQVEHAKDDGSKRTGIFIHQVVAKPSVYFIKFDDDIHIYVYGLVKTP

SEQ ID NO: 83545 - protein, 231 aa, Homo sapiens
  Payload ID: 16624
  Gene Symbol: SPIN4
  Gene Name: spindlin family, member 4
  ENSP ID: ENSP00000364018
MKKRHTHRKQRRKPTFLTRRNIVGCRIQHGWKEGNEPVEQWKGTVLEQVSVKPTLYIIKYDGKDSVYGLELHRDKRVLALEILPERVPTPRIDSRLADSLIGKAVEHVFEGEHGTKDEWKGMVLARAPVMDTWFYITYEKDPVLYMYTLLDDYKDGDLRIIPDSNYYFPTAEQEPGEVVDSLVGKQVEHAKDDGSKRTGIFIHQVVAKPSVYFIKFDDDIHIYVYGLVKTP

SEQ ID NO: 83546 - protein, 454 aa, Homo sapiens
  Payload ID: 16625
  Gene Symbol: SPNS1
  Gene Name: spinster homolog 1 (Drosophila)
  Uniprot ID: Q9H2V7
  ENSP ID: ENSP00000306050
MAGSDTAPFLSQADDPDDGPVPGTPGLPGSTGNPKSEEPEVPDQEGLQRITGLSPGRSALIVAVLCYINLLNYMDRFTVAVFISSYMVLAPVFGYLGDRYNRKYLMCGGIAFWSLVTLGSSFIPGEHFWLLLLTRGLVGVGEASYSTIAPTLIADLFVADQRSRMLSIFYFAIPVGSGLGYIAGSKVKDMAGDWHWALRVTPGLGVVAVLLLFLVVREPPRGAVERHSDLPPLNPTSWWADLRALARNLIFGLITCLTGVLGVGLGVEISRRLRHSNPRADPLVCATGLLGSAPFLFLSLACARGSIVATYIFIFIGETLLSMNWAIVADILLYVVIPTRRSTAEAFQIVLSHLLGDAGSPYLIGLISDRLRRNWPPSFLSEFRALQFSLMLCAFVGALGGAAFLGTAIFIEADRRRAQLHVQGLLHEAGSTDDRIVVPQRGRSTRVPVASVLI

SEQ ID NO: 83547 - protein, 528 aa, Homo sapiens
  Payload ID: 16625
  Gene Symbol: SPNS1
  Gene Name: spinster homolog 1 (Drosophila)
  Uniprot ID: Q9H2V7
  ENSP ID: ENSP00000309945
MAGSDTAPFLSQADDPDDGPVPGTPGLPGSTGNPKSEEPEVPDQEGLQRITGLSPGRSALIVAVLCYINLLNYMDRFTVAGVLPDIEQFFNIGDSSSGLIQTVFISSYMVLAPVFGYLGDRYNRKYLMCGGIAFWSLVTLGSSFIPGEHFWLLLLTRGLVGVGEASYSTIAPTLIADLFVADQRSRMLSIFYFAIPVGSGLGYIAGSKVKDMAGDWHWALRVTPGLGVVAVLLLFLVVREPPRGAVERHSDLPPLNPTSWWADLRALARNPSFVLSSLGFTAVAFVTGSLALWAPAFLLRSRVVLGETPPCLPGDSCSSSDSLIFGLITCLTGVLGVGLGVEISRRLRHSNPRADPLVCATGLLGSAPFLFLSLACARGSIVATYIFIFIGETLLSMNWAIVADILLYVVIPTRRSTAEAFQIVLSHLLGDAGSPYLIGLISDRLRRNWPPSFLSEFRALQFSLMLCAFVGALGGAAFLGTAIFIEADRRRAQLHVQGLLHEAGSTDDRIVVPQRGRSTRVPVASVLI

SEQ ID NO: 83548 - protein, 455 aa, Homo sapiens
  Payload ID: 16625
  Gene Symbol: SPNS1
  Gene Name: spinster homolog 1 (Drosophila)
  Uniprot ID: Q9H2V7
  ENSP ID: ENSP00000318228
MDRFTVAGVLPDIEQFFNIGDSSSGLIQTVFISSYMVLAPVFGYLGDRYNRKYLMCGGIAFWSLVTLGSSFIPGEHFWLLLLTRGLVGVGEASYSTIAPTLIADLFVADQRSRMLSIFYFAIPVGSGLGYIAGSKVKDMAGDWHWALRVTPGLGVVAVLLLFLVVREPPRGAVERHSDLPPLNPTSWWADLRALARNPSFVLSSLGFTAVAFVTGSLALWAPAFLLRSRVVLGETPPCLPGDSCSSSDSLIFGLITCLTGVLGVGLGVEISRRLRHSNPRADPLVCATGLLGSAPFLFLSLACARGSIVATYIFIFIGETLLSMNWAIVADILLYVVIPTRRSTAEAFQIVLSHLLGDAGSPYLIGLISDRLRRNWPPSFLSEFRALQFSLMLCAFVGALGGAAFLGTAIFIEADRRRAQLHVQGLLHEAGSTDDRIVVPQRGRSTRVPVASVLI

SEQ ID NO: 83549 - protein, 476 aa, Homo sapiens
  Payload ID: 16625
  Gene Symbol: SPNS1
  Gene Name: spinster homolog 1 (Drosophila)
  Uniprot ID: Q9H2V7
  ENSP ID: ENSP00000335494
MAGSDTAPFLSQADDPDDGPVPGTPGLPGSTGNPKSEEPEVPDQEGLQRITGLSPGRSALIVAVLCYINLLNYMDRFTVAGVLPDIEQFFNIGDSSSGLIQTVFISSYMVLAPVFGYLGDRYNRKYLMCGGIAFWSLVTLGSSFIPGEHFWLLLLTRGLVGVGEASYSTIAPTLIADLFVADQRSRMLSIFYFAIPVGSGLGYIAGSKVKDMAGDWHWALRVTPGLGVVAVLLLFLVVREPPRGAVERHSDLPPLNPTSWWADLRALARNLIFGLITCLTGVLGVGLGVEISRRLRHSNPRADPLVCATGLLGSAPFLFLSLACARGSIVATYIFIFIGETLLSMNWAIVADILLYVVIPTRRSTAEAFQIVLSHLLGDAGSPYLIGLISDRLRRNWPPSFLSEFRALQFSLMLCAFVGALGGAAFLGTAIFIEADRRRAQLHVQGLLHEAGSTDDRIVVPQRGRSTRVPVASVLI

SEQ ID NO: 83550 - protein, 573 aa, Homo sapiens
  Payload ID: 16625
  Gene Symbol: SPNS1
  Gene Name: spinster homolog 1 (Drosophila)
  ENSP ID: ENSP00000454360
MTGFKQHGGCRGAAPGLSDSKCSGLLPRVGSSVGPERGRARPPGTMAGSDTAPFLSQADDPDDGPVPGTPGLPGSTGNPKSEEPEVPDQEGLQRITGLSPGRSALIVAVLCYINLLNYMDRFTVAGVLPDIEQFFNIGDSSSGLIQTVFISSYMVLAPVFGYLGDRYNRKYLMCGGIAFWSLVTLGSSFIPGEHFWLLLLTRGLVGVGEASYSTIAPTLIADLFVADQRSRMLSIFYFAIPVGSGLGYIAGSKVKDMAGDWHWALRVTPGLGVVAVLLLFLVVREPPRGAVERHSDLPPLNPTSWWADLRALARNPSFVLSSLGFTAVAFVTGSLALWAPAFLLRSRVVLGETPPCLPGDSCSSSDSLIFGLITCLTGVLGVGLGVEISRRLRHSNPRADPLVCATGLLGSAPFLFLSLACARGSIVATYIFIFIGETLLSMNWAIVADILLYVVIPTRRSTAEAFQIVLSHLLGDAGSPYLIGLISDRLRRNWPPSFLSEFRALQFSLMLCAFVGALGGAAFLGTAIFIEADRRRAQLHVQGLLHEAGSTDDRIVVPQRGRSTRVPVASVLI

SEQ ID NO: 83551 - protein, 142 aa, Homo sapiens
  Payload ID: 16625
  Gene Symbol: SPNS1
  Gene Name: spinster homolog 1 (Drosophila)
  ENSP ID: ENSP00000455101
MDRFTVAGVLPDIEQFFNIGDSSSGLIQTVFISSYMVLAPVFGYLGDRYNRKYLMCGGIAFWSLVTLGSSFIPGEHFWLLLLTRGLVGVGEASYSTIAPTLIADLFVADQRSRMLSIFYFAIPVGSGLGYIAGSKVKDMAGD

SEQ ID NO: 83552 - protein, 274 aa, Homo sapiens
  Payload ID: 16625
  Gene Symbol: SPNS1
  Gene Name: spinster homolog 1 (Drosophila)
  ENSP ID: ENSP00000455429
  MOD_RES (1)..(1): Any amino acid
XDDGPVPGTPGLPGSTGNPKSEEPEVPDQEGLQRITGLSPGRSALIVAVLCYINLLNYMDRFTVAGVLPDIEQFFNIGDSSSGLIQTVFISSYMVLAPVFGYLGDRYNRKYLMCGGIAFWSLVTLGSSFIPGEHFWLLLLTRGLVGVGEASYSTIAPTLIADLFVADQRSRMLSIFYFAIPVGSGLGYIAGSKVKDMAGDWHWALRISDRLRRNWPPSFLSEFRALQFSLMLCAFVGALGGAAFLGTAIFIEADRRRAQLHVQGQLGAVPGPAS

SEQ ID NO: 83553 - protein, 179 aa, Homo sapiens
  Payload ID: 16625
  Gene Symbol: SPNS1
  Gene Name: spinster homolog 1 (Drosophila)
  ENSP ID: ENSP00000455467
  MOD_RES (1)..(1): Any amino acid
XVFGYLGDRYNRKYLMCGGIAFWSLVTLGSSFIPGEIFIFIGETLLSMNWAIVADILLYVVIPTRRSTAEAFQIVLSHLLGDAGSPYLIGLISDRLRRNWPPSFLSEFRALQFSLMLCAFVGALGGAAFLGTAIFIEADRRRAQLHVQGLLHEAGSTDDRIVVPQRGRSTRVPVASVLI

SEQ ID NO: 83554 - protein, 538 aa, Homo sapiens
  Payload ID: 16625
  Gene Symbol: SPNS1
  Gene Name: spinster homolog 1 (Drosophila)
  ENSP ID: ENSP00000456119
QADDPDDGPVPGTPGLPGSTGNPKSEEPEVPDQEGLQRITGLSPGRSALIVAVLCYINLLNYMDRFTVAGVLPDIEQFFNIGDSSSGLIQTVFISSYMVLAPVFGYLGDRYNRKYLMCGGIAFWSLVTLGSSFIPGEHFWLLLLTRGLVGVGEASYSTIAPTLIADLFVADQRSRMLSIFYFAIPVGSGLGYIAGSKVKDMAGDWHWALRPSVSQVTPGLGVVAVLLLFLVVREPPRGAVERHSDLPPLNPTSWWADLRALARNPSFVLSSLGFTAVAFVTGSLALWAPAFLLRSRVVLGETPPCLPGDSCSSSDSLIFGLITCLTGVLGVGLGVEISRRLRHSNPRADPLVCATGLLGSAPFLFLSLACARGSIVATYIFIFIGETLLSMNWAIVADILLYVVIPTRRSTAEAFQIVLSHLLGDAGSPYLIGLACCTKQGPQTTGLWCPSGAAPPACPWPVCSSERLPLTYLHICHSWPWAHPTKGLGLTPWPGPASRGTLGRVPAPRHYLGSSGEEVGVQEGDPSPQGQPQGLGAI

SEQ ID NO: 83555 - protein, 178 aa, Homo sapiens
  Payload ID: 16625
  Gene Symbol: SPNS1
  Gene Name: spinster homolog 1 (Drosophila)
  ENSP ID: ENSP00000457011
MAGSDTAPFLSQADDPDDGPVPGTPGLPGSTGNPKSEEPEVPDQEGLQRITGLSPGRSALIVAVLCYINLLNYMDRFTVAGVLPDIEQFFNIGDSSSGLIQTVFISSYMVLAPVFGYLGDRYNRKYLMCGGIAFWSLVTLGSSFIPGEHFWLLLLTRGLVGVGEASYSTIAPTLIADL

SEQ ID NO: 83556 - protein, 549 aa, Homo sapiens
  Payload ID: 16626
  Gene Symbol: SPNS2
  Gene Name: spinster homolog 2 (Drosophila)
  Uniprot ID: Q8IVW8
  ENSP ID: ENSP00000333292
MMCLECASAAAGGAEEEEADAERRRRRRGAQRGAGGSGCCGARGAGGAGVSAAGDEVQTLSGSVRRAPTGPPGTPGTPGCAATAKGPGAQQPKPASLGRGRGAAAAILSLGNVLNYLDRYTVAGVLLDIQQHFGVKDRGAGLLQSVFICSFMVAAPIFGYLGDRFNRKVILSCGIFFWSAVTFSSSFIPQQYFWLLVLSRGLVGIGEASYSTIAPTIIGDLFTKNTRTLMLSVFYFAIPLGSGLGYITGSSVKQAAGDWHWALRVSPVLGMITGTLILILVPATKRGHADQLGDQLKARTSWLRDMKALIRNRSYVFSSLATSAVSFATGALGMWIPLYLHRAQVVQKTAETCNSPPCGAKDSLIFGAITCFTGFLGVVTGAGATRWCRLKTQRADPLVCAVGMLGSAIFICLIFVAAKSSIVGAYICIFVGETLLFSNWAITADILMYVVIPTRRATAVALQSFTSHLLGDAGSPYLIGFISDLIRQSTKDSPLWEFLSLGYALMLCPFVVVLGGMFFLATALFFVSDRARAEQQVNQLAMPPASVKV

SEQ ID NO: 83557 - protein, 282 aa, Homo sapiens
  Payload ID: 16626
  Gene Symbol: SPNS2
  Gene Name: spinster homolog 2 (Drosophila)
  ENSP ID: ENSP00000461410
ALGMWIPLYLHRAQVVQKTAETCNSPPCGAKDSLIFGAITCFTGFLGVVTGAGATRWCRLKTQRADPLVCAVGMLGSAIFICLIFVAAKSSIVGAYICIFVGETLLFSNWAITADILMYVVIPTRRATAVALQSFTSHLLGDAGSPYLIGFGEPAGDAARICESLRWCHWDNEEPTLPPRLGGVLQRPGPAGLPQSFLCDPRLGTHPLWPRPAEWPWHQEEAVSSVTLEGCVCWSHTVGQVPSPRFGPQGPWGQGRRQPQVGVRGEPGLPPAYVILGKSLPS

SEQ ID NO: 83558 - protein, 512 aa, Homo sapiens
  Payload ID: 16627
  Gene Symbol: SPNS3
  Gene Name: spinster homolog 3 (Drosophila)
  Uniprot ID: Q6ZMD2
  ENSP ID: ENSP00000347721
MAGGMSAECPEPGPGGLQGQSPGPGRQCPPPITPTSWSLPPWRAYVAAAVLCYINLLNYMNWFIIAGVLLDIQEVFQISDNHAGLLQTVFVSCLLLSAPVFGYLGDRHSRKATMSFGILLWSGAGLSSSFISPRYSWLFFLSRGIVGTGSASYSTIAPTVLGDLFVRDQRTRVLAVFYIFIPVGSGLGYVLGSAVTMLTGNWRWALRVMPCLEAVALILLILLVPDPPRGAAETQGEGAVGGFRSSWCEDVRYLGKNWSFVWSTLGVTAMAFVTGALGFWAPKFLLEARVVHGLQPPCFQEPCSNPDSLIFGALTIMTGVIGVILGAEAARRYKKVIPGAEPLICASSLLATAPCLYLALVLAPTTLLASYVFLGLGELLLSCNWAVVADILLSVVVPRCRGTAEALQITVGHILGDAGSPYLTGLISSVLRARRPDSYLQRFRSLQQSFLCCAFVIALGGGCFLLTALYLERDETRAWQPVTGTPDSNDVDSNDLERQGLLSGAGASTEEP

SEQ ID NO: 83559 - protein, 202 aa, Homo sapiens
  Payload ID: 16627
  Gene Symbol: SPNS3
  Gene Name: spinster homolog 3 (Drosophila)
  ENSP ID: ENSP00000460781
MAGGMSAECPEPGPGGLQGQSPGPGRQCPPPITPTSWSLPPWRAYVAAAVLCYINLLNYMNWFIIAGVLLDIQEVFQISDNHAGLLQTVFLALLPVPGHRGHWLGQLLHHRAHRPGRPLREGPAHPRAGCLLHLYPRWKWSGLRAGVGCDDADWELALGPPSHALPGGRGLDPAYPAGSRPTPGSCRDTGGGGRGRLQEQLV

SEQ ID NO: 83560 - protein, 545 aa, Homo sapiens
  Payload ID: 16628
  Gene Symbol: SPIRE1
  Gene Name: spire-type actin nucleation factor 1
  ENSP ID: ENSP00000309661
METELCAAHLPTESDAPNHYQAVCRALFAETMELHTFLTKIKSAKENLKKIQEMEKSDESSTDLEELKNADWARFWVQVMRDLRNGVKLKKVQERQYNPLPIEYQLTPYEMLMDDIRCKRYTLRKVMVNGDIPPRLKKSAHEIILDFIRSRPPLNPVSARKLKPTPPRPRSLHERILEEIKAERKLRPVSPEEIRRSRLDVTTPESTKNLVESSMVNGGLTSQTKENGLSTSQQVPAQRKKLLRAPTLAELDSSESEEETLHKSTSSSSVSPSFPEEPVLEAVSTRKKPPKFLPISSTPQPERRQPPQRRHSIEKETPTNVRQFLPPSRQSSRSLEEFCYPVECLALTVEEVMHIRQVLVKAELEKYQQYKDIYTALKKGKLCFCCRTRRFSFFTWSYTCQFCKRPVCSQCCKKMRLPSKPYSTLPIFSLGPSALQRGESSMRSEKPSTAHHRPLRSIARFSSKSKSMDKSDEELQFPKELMEDWSTMEVCVDCKKFISEIISSSRRSLVLANKRARLKRKTQSFYMSSPGPSEYCPSERTISEI

SEQ ID NO: 83561 - protein, 742 aa, Homo sapiens
  Payload ID: 16628
  Gene Symbol: SPIRE1
  Gene Name: spire-type actin nucleation factor 1
  Uniprot ID: Q08AE8
  ENSP ID: ENSP00000387226
MAQAAGPAGGGEPRTEAVGGEGPREPGAAGGAAGGSRDALSLEEILRLYNQPINEEQAWAVCYQCCGSLRAAARRRQPRHRVRSAAQIRVWRDGAVTLAPAADDAGEPPPVAGKLGYSQCMETEVIESLGIIIYKALDYGLKENEERELSPPLEQLIDHMANTVEADGSNDEGYEAAEEGLGDEDEKRKISAIRSYRDVMKLCAAHLPTESDAPNHYQAVCRALFAETMELHTFLTKIKSAKENLKKIQEMEKSDESSTDLEELKNADWARFWVQVMRDLRNGVKLKKVQERQYNPLPIEYQLTPYEMLMDDIRCKRYTLRKVMVNGDIPPRLKKSAHEIILDFIRSRPPLNPVSARKLKPTPPRPRSLHERILEEIKAERKLRPVSPEEIRRSRLDVTTPESTKNLVESSMVNGGLTSQTKENGLSTSQQVPAQRKKLLRAPTLAELDSSESEEETLHKSTSSSSVSPSFPEEPVLEAVSTRKKPPKFLPISSTPQPERRQPPQRRHSIEKETPTNVRQFLPPSRQSSRSLEEFCYPVECLALTVEEVMHIRQVLVKAELEKYQQYKDIYTALKKGKLCFCCRTRRFSFFTWSYTCQFCKRPVCSQCCKKMRLPSKPYSTLPIFSLGPSALQRGESSMRSEKPSTAHHRPLRSIARFSSKSKSMDKSDEELQFPKELMEDWSTMEVCVDCKKFISEIISSSRRSLVLANKRARLKRKTQSFYMSSPGPSEYCPSERTISEI

SEQ ID NO: 83562 - protein, 756 aa, Homo sapiens
  Payload ID: 16628
  Gene Symbol: SPIRE1
  Gene Name: spire-type actin nucleation factor 1
  Uniprot ID: Q08AE8
  ENSP ID: ENSP00000387266
MAQAAGPAGGGEPRTEAVGGEGPREPGAAGGAAGGSRDALSLEEILRLYNQPINEEQAWAVCYQCCGSLRAAARRRQPRHRVRSAAQIRVWRDGAVTLAPAADDAGEPPPVAGKLGYSQCMETEVIESLGIIIYKALDYGLKENEERELSPPLEQLIDHMANTVEADGSNDEGYEAAEEGLGDEDEKRKISAIRSYRDVMKLCAAHLPTESDAPNHYQAVCRALFAETMELHTFLTKIKSAKENLKKIQEMEKSDESSTDLEELKNADWARFWVQVMRDLRNGVKLKKVQERQYNPLPIEYQLTPYEMLMDDIRCKRYTLRKVMVNGDIPPRLKKSAHEIILDFIRSRPPLNPVSARKLKPTPPRPRSLHERILEEIKAERKLRPVSPEEIRRSRLAMRPLSMSYSFDLSDVTTPESTKNLVESSMVNGGLTSQTKENGLSTSQQVPAQRKKLLRAPTLAELDSSESEEETLHKSTSSSSVSPSFPEEPVLEAVSTRKKPPKFLPISSTPQPERRQPPQRRHSIEKETPTNVRQFLPPSRQSSRSLEEFCYPVECLALTVEEVMHIRQVLVKAELEKYQQYKDIYTALKKGKLCFCCRTRRFSFFTWSYTCQFCKRPVCSQCCKKMRLPSKPYSTLPIFSLGPSALQRGESSMRSEKPSTAHHRPLRSIARFSSKSKSMDKSDEELQFPKELMEDWSTMEVCVDCKKFISEIISSSRRSLVLANKRARLKRKTQSFYMSSPGPSEYCPSERTISEI

SEQ ID NO: 83563 - protein, 197 aa, Homo sapiens
  Payload ID: 16628
  Gene Symbol: SPIRE1
  Gene Name: spire-type actin nucleation factor 1
  ENSP ID: ENSP00000401392
METEVIESLGIIIYKALDYGLKENEERELSPPLEQLIDHMANTVEADGSNDEGYEAAEEGLGDEDEKRKISAIRSYRDVMKLCAAHLPTESDAPNHYQAVCRALFAETMELHTFLTKIKSAKENLKKIQEMEKSDESSTDLEELKNADWARFWVQVMRDLRNGVKLKKVQERQYNPLPIEYQLTPYEMLMDDIRCKR

SEQ ID NO: 83564 - protein, 458 aa, Homo sapiens
  Payload ID: 16628
  Gene Symbol: SPIRE1
  Gene Name: spire-type actin nucleation factor 1
  Uniprot ID: Q08AE8
  ENSP ID: ENSP00000404752
MANTVEADGSNDEGYEAAEEGLGDEDEKRKISAIRSYRDVMKLCAAHLPTESDAPNHYQAVCRALFAETMELHTFLTKIKSAKENLKKIQEMEKSDESSTDLEELKNADWARFWVQVMRDLRNGVKLKKVQERQYNPLPIEYQLTPYEMLMDDIRCKRYTLRKVMVNGDIPPRLKKSAHEIILDFIRSRPPLNPVSARKLKPTPPRPRSLHERILEEIKAERKLRPVSPEEIRRSRLDVTTPESTKNLVESSMVNGGLTSQTKENGLSTSQQVPAQRKKLLRAPTLAELDSSESEEETLHKSTSSSSVSPSFPEEPVLEAVSTRKKPPKFLPISSTPQPERRQPPQRRHSIEKETPTNVRQFLPPSRQSSRSLEEFCYPVECLALTVEEVMHIRQVLVKAELEKYQQYKDIYTALKKGKLCFCCRTRRFSFFTWSYTCQFCKSDCLFNGTAHCQFYLG

SEQ ID NO: 83565 - protein, 622 aa, Homo sapiens
  Payload ID: 16628
  Gene Symbol: SPIRE1
  Gene Name: spire-type actin nucleation factor 1
  Uniprot ID: Q08AE8
  ENSP ID: ENSP00000407050
METEVIESLGIIIYKALDYGLKENEERELSPPLEQLIDHMANTVEADGSNDEGYEAAEEGLGDEDEKRKISAIRSYRDVMKLCAAHLPTESDAPNHYQAVCRALFAETMELHTFLTKIKSAKENLKKIQEMEKSDESSTDLEELKNADWARFWVQVMRDLRNGVKLKKVQERQYNPLPIEYQLTPYEMLMDDIRCKRYTLRKVMVNGDIPPRLKKSAHEIILDFIRSRPPLNPVSARKLKPTPPRPRSLHERILEEIKAERKLRPVSPEEIRRSRLDVTTPESTKNLVESSMVNGGLTSQTKENGLSTSQQVPAQRKKLLRAPTLAELDSSESEEETLHKSTSSSSVSPSFPEEPVLEAVSTRKKPPKFLPISSTPQPERRQPPQRRHSIEKETPTNVRQFLPPSRQSSRSLEEFCYPVECLALTVEEVMHIRQVLVKAELEKYQQYKDIYTALKKGKLCFCCRTRRFSFFTWSYTCQFCKRPVCSQCCKKMRLPSKPYSTLPIFSLGPSALQRGESSMRSEKPSTAHHRPLRSIARFSSKSKSMDKSDEELQFPKELMEDWSTMEVCVDCKKFISEIISSSRRSLVLANKRARLKRKTQSFYMSSPGPSEYCPSERTISEI

SEQ ID NO: 83566 - protein, 122 aa, Homo sapiens
  Payload ID: 16628
  Gene Symbol: SPIRE1
  Gene Name: spire-type actin nucleation factor 1
  ENSP ID: ENSP00000466531
  MOD_RES (1)..(1): Any amino acid
XDDIRCKRYTLRKVMVNGDIPPRLKKSAHEIILDFIRSRPPLNPVSARKLKPTPPRPRSLHERILEEIKAERKLRPVSPEEIRRSRLGGILLPSGMPRSYCGRSDAYSPGPGEGRAGKIPTV

SEQ ID NO: 83567 - protein, 147 aa, Homo sapiens
  Payload ID: 16628
  Gene Symbol: SPIRE1
  Gene Name: spire-type actin nucleation factor 1
  ENSP ID: ENSP00000467103
MSSGKTCCIAGKLGYSQCMETEVIESLGIIIYKALDYGLKENEERELSPPLEQLIDHMANTVEADGSNDEGYEAAEEGLGDEDEKRKISAIRSYRDVMKLCAAHLPTESDAPNHYQAVCRALFAETMELHTFLTKIKSAKENLKKIQ

SEQ ID NO: 83568 - protein, 122 aa, Homo sapiens
  Payload ID: 16628
  Gene Symbol: SPIRE1
  Gene Name: spire-type actin nucleation factor 1
  ENSP ID: ENSP00000467943
METEVIESLGIIIYKALDYGLKENEERELSPPLEQLIDHMANTVEADGSNDEGYEAAEEGLGDEDEKRKISAIRSYRDVMKLCAAHLPTESDAPNHYQAVCRALFAETMELHTFLTKIKSAK

SEQ ID NO: 83569 - protein, 622 aa, Homo sapiens
  Payload ID: 16628
  Gene Symbol: SPIRE1
  Gene Name: spire-type actin nucleation factor 1
  ENSP ID: ENSP00000486927
MELEVIESLGIIIYKALDYGLKENEERELSPPLEQLIDHMANTVEADGSNDEGYEAAEEGLGDEDEKRKISAIRSYRDVMKLCAAHLPTESDAPNHYQAVCRALFAETMELHTFLTKIKSAKENLKKIQEMEKSDESSTDLEELKNADWARFWVQVMRDLRNGVKLKKVQERQYNPLPIEYQLTPYEMLMDDIRCKRYTLRKVMVNGDIPPRLKKSAHEIILDFIRSRPPLNPVSARKLKPTPPRPRSLHERILEEIKAERKLRPVSPEEIRRSRLDVTTPESTKNLVESSMVNGGLTSQTKENGLSTSQQVPAQRKKLLRAPTLAELDSSESEEETLHKSTSSSSVSPSFPEEPVLEAVSTRKKPPKFLPISSTPQPERRQPPQRRHSIEKETPTNVRQFLPPSRQSSRSLEEFCYPVECLALTVEEVMHIRQVLVKAELEKYQQYKDIYTALKKGKLCFCCRTRRFSFFTWSYTCQFCKRPVCSQCCKKMRLPSKPYSTLPIFSLGPSALQRGESSMRSEKPSTAHHRPLRSIARFSSKSKSMDKSDEELQFPKELMEDWSTMEVCVDCKKFISEIISSSRRSLVLANKRARLKRKTQSFYMSSPGPSEYCPSERTISEI

SEQ ID NO: 83570 - protein, 714 aa, Homo sapiens
  Payload ID: 16629
  Gene Symbol: SPIRE2
  Gene Name: spire-type actin nucleation factor 2
  Uniprot ID: Q8WWL2
  ENSP ID: ENSP00000367494
MARAGSCGGAAAGAGRPEPWELSLEEVLKAYEQPLNEEQAWAVCFQGCRGLRGSPGRRLRDTGDLLLRGDGSVGAREPEAAEPATMVVPLASSEAQTVQSLGFAIYRALDWGLDESEERELSPQLERLIDLMANNDSEDSGCGAADEGYGGPEEEEEAEGVPRSVRTFAQAMRLCAARLTDPRGAQAHYQAVCRALFVETLELRAFLARVREAKEMLQKLREDEPHLETPRAELDSLGHTDWARLWVQLMRELRRGVKLKKVQEQEFNPLPTEFQLTPFEMLMQDIRARNYKLRKVMVDGDIPPRVKKDAHELILDFIRSRPPLKQVSERRLRPLPPKQRSLHEKILEEIKQERRLRPVRGEGWAARGFGSLPCILNACSGDAKSTSCINLSVTDAGGSAQRPRPRVLLKAPTLAEMEEMNTSEEEESPCGEVTLKRDRSFSEHDLAQLRSEVASGLQSATHPPGGTEPPRPRAGSAHVWRPGSRDQGTCPASVSDPSHPLLSNRGSSGDRPEASMTPDAKHLWLEFSHPVESLALTVEEVMDVRRVLVKAEMEKFLQNKELFSSLKKGKICCCCRAKFPLFSWPPSCLFCKRAVCTSCSIKMKMPSKKFGHIPVYTLGFESPQRVSAAKTAPIQRRDIFQSLQGPQWQSVEEAFPHIYSHGCVLKDVCSECTSFVADVVRSSRKSVDVLNTTPRRSRQTQSLYIPNTRTLDFK

SEQ ID NO: 83571 - protein, 666 aa, Homo sapiens
  Payload ID: 16629
  Gene Symbol: SPIRE2
  Gene Name: spire-type actin nucleation factor 2
  Uniprot ID: Q8WWL2
  ENSP ID: ENSP00000376782
MARAGSCGGAAAGAGRPEPWELSLEEVLKAYEQPLNEEQAWAVCFQGCRGLRGSPGRRLRDTGDLLLRGDGSVGAREPEAAEPATMVVPLASSEAQTVQSLGFAIYRALDWGLDESEERELSPQLERLIDLMANNDSEDSGCGAADEGYGGPEEEEEAEGVPRSVRTFAQAMRLCAARLTDPRGAQAHYQAVCRALFVETLELRAFLARVREAKEMLQKLREDEPHLETPRAELDSLGHTDWARLWVQLMRELRRGVKLKKVQEQEFNPLPTEFQLTPFEMLMQDIRARNYKLRKVMVDGDIPPRVKKDAHELILDFIRSRPPLKQVSERRLRPLPPKQRSLHEKILEEIKQERRLRPVRGEGWAARGFGSLPCILNACSGDAKSTSCINLSVTDAGGSAQRPRPRVLLKAPTLAEMEEMNTSEEEESPCGEVTLKRDRSFSEHDLAQLRSEVASGLQSATHPPGGTEPPRPRAGSAHVWRPGSRDQGTCPASVSDPSHPLLSNRGSSGDRPEASMTPDAKHLWLEFSHPVESLALTVEEVMDVRRVLVKAEMEKFLQNKELFSSLKKGKICCCCRAKFPLFSWPPSCLFCKRSLQGPQWQSVEEAFPHIYSHGCVLKDVCSECTSFVADVVRSSRKSVDVLNTTPRRSRQTQSLYIPNTRTLDFK

SEQ ID NO: 83572 - protein, 99 aa, Homo sapiens
  Payload ID: 16629
  Gene Symbol: SPIRE2
  Gene Name: spire-type actin nucleation factor 2
  ENSP ID: ENSP00000457940
MARAGSCGGAAAGAGRPEPWELSLEEVLKAYEQPLNEEQAWAVCFQGCRGLRGSPGRRLRDTGDLLLRGDGSVGAREPEAAEPATMVVPLASSEAQLHR

SEQ ID NO: 83573 - protein, 40 aa, Homo sapiens
  Payload ID: 16629
  Gene Symbol: SPIRE2
  Gene Name: spire-type actin nucleation factor 2
  ENSP ID: ENSP00000457981
GLRGSPGRRLRDTGDLLLRGDGSVGAREPEAAVEEVRNPG

SEQ ID NO: 83574 - protein, 273 aa, Homo sapiens
  Payload ID: 16630
  Gene Symbol: SPSB1
  Gene Name: splA/ryanodine receptor domain and SOCS box containing 1
  Uniprot ID: Q96BD6
  ENSP ID: ENSP00000330221
MGQKVTGGIKTVDMRDPTYRPLKQELQGLDYCKPTRLDLLLDMPPVSYDVQLLHSWNNNDRSLNVFVKEDDKLIFHRHPVAQSTDAIRGKVGYTRGLHVWQITWAMRQRGTHAVVGVATADAPLHSVGYTTLVGNNHESWGWDLGRNRLYHDGKNQPSKTYPAFLEPDETFIVPDSFLVALDMDDGTLSFIVDGQYMGVAFRGLKGKKLYPVVSAVWGHCEIRMRYLNGLDPEPLPLMDLCRRSVRLALGRERLGEIHTLPLPASLKAYLLYQ

SEQ ID NO: 83575 - protein, 273 aa, Homo sapiens; identical to SEQ ID NO: 83574
  Payload ID: 16630
  Gene Symbol: SPSB1
  Gene Name: splA/ryanodine receptor domain and SOCS box containing 1
  Uniprot ID: Q96BD6
  ENSP ID: ENSP00000350573

SEQ ID NO: 83576 - protein, 273 aa, Homo sapiens; identical to SEQ ID NO: 83574
  Payload ID: 16630
  Gene Symbol: SPSB1
  Gene Name: splA/ryanodine receptor domain and SOCS box containing 1
  Uniprot ID: Q96BD6
  ENSP ID: ENSP00000366616

SEQ ID NO: 83577 - protein, 202 aa, Homo sapiens
  Payload ID: 16630
  Gene Symbol: SPSB1
  Gene Name: splA/ryanodine receptor domain and SOCS box containing 1
  ENSP ID: ENSP00000409235
MGQKVTGGIKTVDMRDPTYRPLKQELQGLDYCKPTRLDLLLDMPPVSYDVQLLHSWNNNDRSLNVFVKEDDKLIFHRHPVAQSTDAIRGKVGYTRGLHVWQITWAMRQRGTHAVVGVATADAPLHSVGYTTLVGNNHESWGWDLGRNRLYHDGKNQPSKTYPAFLEPDETFIVPDSFLVALDMDDGTLSFIVDGQYMGVAFR

SEQ ID NO: 83578 - protein, 263 aa, Homo sapiens
  Payload ID: 16631
  Gene Symbol: SPSB2
  Gene Name: splA/ryanodine receptor domain and SOCS box containing 2
  Uniprot ID: Q99619
  ENSP ID: ENSP00000428338
MGQTALAGGSSSTPTPQALYPDLSCPEGLEELLSAPPPDLGAQRRHGWNPKDCSENIEVKEGGLYFERRPVAQSTDGARGKRGYSRGLHAWEISWPLEQRGTHAVVGVATALAPLQTDHYAALLGSNSESWGWDIGRGKLYHQSKGPGAPQYPAGTQGEQLEVPERLLVVLDMEEGTLGYAIGGTYLGPAFRGLKGRTLYPAVSAVWGQCQVRIRYLGERRAEPHSLLHLSRLCVRHNLGDTRLGQVSALPLPPAMKRYLLYQ

SEQ ID NO: 83579 - protein, 82 aa, Homo sapiens
  Payload ID: 16631
  Gene Symbol: SPSB2
  Gene Name: splA/ryanodine receptor domain and SOCS box containing 2
  ENSP ID: ENSP00000428458
MGQTALAGGSSSTPTPQALYPDLSCPEGLEELLSAPPPDLGAQRRHGWNPKDCSENIEVKEGGLYFERRPVAQSTDGARGKR

SEQ ID NO: 83580 - protein, 263 aa, Homo sapiens; identical to SEQ ID NO: 83578
  Payload ID: 16631
  Gene Symbol: SPSB2
  Gene Name: splA/ryanodine receptor domain and SOCS box containing 2
  Uniprot ID: Q99619
  ENSP ID: ENSP00000430872

SEQ ID NO: 83581 - protein, 267 aa, Homo sapiens
  Payload ID: 16631
  Gene Symbol: SPSB2
  Gene Name: splA/ryanodine receptor domain and SOCS box containing 2
  Uniprot ID: Q99619
  ENSP ID: ENSP00000431037
MGQTALAGGSSSTPTPQALYPDLSCPEGLEELLSAPPPDLGAQRRHGWNPKDCSENIEVKEGGLYFERRPVAQSTDGARGKRGYSRGLHAWEISWPLEQRGTHAVVGVATALAPLQTDHYAALLGSNSESWGWDIGRGKLYHQSKGPGAPQYPAGTQGEQLEVPERLLVVLDMEEGTLGYAIGGTYLGPAFRGLKGRTLYPAVSAVWGQCQVRIRYLGERRGEAWGRRGENFLSLVAVVWDGNSSDKSRGDGPSSSLPQPLFSAGKG

SEQ ID NO: 83582 - protein, 355 aa, Homo sapiens
  Payload ID: 16632
  Gene Symbol: SPSB3
  Gene Name: splA/ryanodine receptor domain and SOCS box containing 3
  Uniprot ID: Q6PJ21
  ENSP ID: ENSP00000301717
MARRPRNSRAWHFVLSAARRDADARAVALAGSTNWGYDSDGQHSDSDSDPEYSTLPPSIPSAVPVTGESFCDCAGQSEASFCSSLHSAHRGRDCRCGEEDEYFDWVWDDLNKSSATLLSCDNRKVSFHMEYSCGTAAIRGTKELGEGQHFWEIKMTSPVYGTDMMVGIGTSDVDLDKYRHTFCSLLGRDEDSWGLSYTGLLHHKGDKTSFSSRFGQGSIIGVHLDTWHGTLTFFKNRKCIGVAATKLQNKRFYPMVCSTAARSSMKVTRSCASATSLQYLCCHRLRQLRPDSGDTLEGLPLPPGLKQVLHNKLGWVLSMSCSRRKAPVSDPQAATSAHPSSREPRPCQRKRCRRT

SEQ ID NO: 83583 - protein, 168 aa, Homo sapiens
  Payload ID: 16632
  Gene Symbol: SPSB3
  Gene Name: splA/ryanodine receptor domain and SOCS box containing 3
  ENSP ID: ENSP00000455098
MARRPRNSRAWHFVLSAARRDADARAVALAGSTNWGYDSDGQHSDSDSDPEYSTLPPSIPSAVPVTGESFCDCAGQSEASFCSSLHSAHRGRDCRCGEEDEYFDWVWDDLNKSSATLLSCDNRKVSFHMEYSCGTAAIRGTKELGEGQHFWEIKMTSPVYGTDMMVGI

SEQ ID NO: 83584 - protein, 355 aa, Homo sapiens; identical to SEQ ID NO: 83582
  Payload ID: 16632
  Gene Symbol: SPSB3
  Gene Name: splA/ryanodine receptor domain and SOCS box containing 3
  Uniprot ID: Q6PJ21
  ENSP ID: ENSP00000457206

SEQ ID NO: 83585 - protein, 273 aa, Homo sapiens
  Payload ID: 16633
  Gene Symbol: SPSB4
  Gene Name: splA/ryanodine receptor domain and SOCS box containing 4
  Uniprot ID: Q96A44
  ENSP ID: ENSP00000311609
MGQKLSGSLKSVEVREPALRPAKRELRGAEPGRPARLDQLLDMPAAGLAVQLRHAWNPEDRSLNVFVKDDDRLTFHRHPVAQSTDGIRGKVGHARGLHAWQINWPARQRGTHAVVGVATARAPLHSVGYTALVGSDAESWGWDLGRSRLYHDGKNQPGVAYPAFLGPDEAFALPDSLLVVLDMDEGTLSFIVDGQYLGVAFRGLKGKKLYPVVSAVWGHCEVTMRYINGLDPEPLPLMDLCRRSIRSALGRQRLQDISSLPLPQSLKNYLQYQ

SEQ ID NO: 83586 - protein, 90 aa, Homo sapiens
  Payload ID: 16633
  Gene Symbol: SPSB4
  Gene Name: splA/ryanodine receptor domain and SOCS box containing 4
  ENSP ID: ENSP00000422034
  MOD_RES (1)..(1): Any amino acid
XVVLDMDEGTLSFIVDGQYLGVAFRGLKGKKLYPVVSAVWGHCEVTMRYINGLDHGVSLGCPGQSAVARSRLTATSASRVQAILLPQLPE

SEQ ID NO: 83587 - protein, 635 aa, Homo sapiens
  Payload ID: 16634
  Gene Symbol: SYK
  Gene Name: spleen tyrosine kinase
  Uniprot ID: P43405
  ENSP ID: ENSP00000364898
MASSGMADSANHLPFFFGNITREEAEDYLVQGGMSDGLYLLRQSRNYLGGFALSVAHGRKAHHYTIERELNGTYAIAGGRTHASPADLCHYHSQESDGLVCLLKKPFNRPQGVQPKTGPFEDLKENLIREYVKQTWNLQGQALEQAIISQKPQLEKLIATTAHEKMPWFHGKISREESEQIVLIGSKTNGKFLIRARDNNGSYALCLLHEGKVLHYRIDKDKTGKLSIPEGKKFDTLWQLVEHYSYKADGLLRVLTVPCQKIGTQGNVNFGGRPQLPGSHPATWSAGGIISRIKSYSFPKPGHRKSSPAQGNRQESTVSFNPYEPELAPWAADKGPQREALPMDTEVYESPYADPEEIRPKEVYLDRKLLTLEDKELGSGNFGTVKKGYYQMKKVVKTVAVKILKNEANDPALKDELLAEANVMQQLDNPYIVRMIGICEAESWMLVMEMAELGPLNKYLQQNRHVKDKNIIELVHQVSMGMKYLEESNFVHRDLAARNVLLVTQHYAKISDFGLSKALRADENYYKAQTHGKWPVKWYAPECINYYKFSSKSDVWSFGVLMWEAFSYGQKPYRGMKGSEVTAMLEKGERMGCPAGCPREMYDLMNLCWTYDVENRPGFAAVELRLRNYYYDVVN

SEQ ID NO: 83588 - protein, 612 aa, Homo sapiens
  Payload ID: 16634
  Gene Symbol: SYK
  Gene Name: spleen tyrosine kinase
  Uniprot ID: P43405
  ENSP ID: ENSP00000364899
MASSGMADSANHLPFFFGNITREEAEDYLVQGGMSDGLYLLRQSRNYLGGFALSVAHGRKAHHYTIERELNGTYAIAGGRTHASPADLCHYHSQESDGLVCLLKKPFNRPQGVQPKTGPFEDLKENLIREYVKQTWNLQGQALEQAIISQKPQLEKLIATTAHEKMPWFHGKISREESEQIVLIGSKTNGKFLIRARDNNGSYALCLLHEGKVLHYRIDKDKTGKLSIPEGKKFDTLWQLVEHYSYKADGLLRVLTVPCQKIGTQGNVNFGGRPQLPGSHPASSPAQGNRQESTVSFNPYEPELAPWAADKGPQREALPMDTEVYESPYADPEEIRPKEVYLDRKLLTLEDKELGSGNFGTVKKGYYQMKKVVKTVAVKILKNEANDPALKDELLAEANVMQQLDNPYIVRMIGICEAESWMLVMEMAELGPLNKYLQQNRHVKDKNIIELVHQVSMGMKYLEESNFVHRDLAARNVLLVTQHYAKISDFGLSKALRADENYYKAQTHGKWPVKWYAPECINYYKFSSKSDVWSFGVLMWEAFSYGQKPYRGMKGSEVTAMLEKGERMGCPAGCPREMYDLMNLCWTYDVENRPGFAAVELRLRNYYYDVVN

SEQ ID NO: 83589 - protein, 612 aa, Homo sapiens; identical to SEQ ID NO: 83588
  Payload ID: 16634
  Gene Symbol: SYK
  Gene Name: spleen tyrosine kinase
  Uniprot ID: P43405
  ENSP ID: ENSP00000364904

SEQ ID NO: 83590 - protein, 635 aa, Homo sapiens; identical to SEQ ID NO: 83587
  Payload ID: 16634
  Gene Symbol: SYK
  Gene Name: spleen tyrosine kinase
  Uniprot ID: P43405
  ENSP ID: ENSP00000364907

SEQ ID NO: 83591 - protein, 548 aa, Homo sapiens
  Payload ID: 16635
  Gene Symbol: SF1
  Gene Name: splicing factor 1
  Uniprot ID: Q15637
  ENSP ID: ENSP00000227503
MATGANATPLDFPSKKRKRSRWNQDTMEQKTVIPGMPTVIPPGLTREQERAYIVQLQIEDLTRKLRTGDLGIPPNPEDRSPSPEPIYNSEGKRLNTREFRTRKKLEEERHNLITEMVALNPDFKPPADYKPPATRVSDKVMIPQDEYPEINFVGLLIGPRGNTLKNIEKECNAKIMIRGKGSVKEGKVGRKDGQMLPGEDEPLHALVTANTMENVKKAVEQIRNILKQGIETPEDQNDLRKMQLRELARLNGTLREDDNRILRPWQSSETRSITNTTVCTKCGGAGHIASDCKFQRPGDPQSAQDKARMDKEYLSLMAELGEAPVPASVGSTSGPATTPLASAPRPAAPANNPPPPSLMSTTQSRPPWMNSGPSESRPYHGMHGGGPGGPGGGPHSFPHPLPSLTGGHGGHPMQHNPNGPPPPWMQPPPPPMNQGPHPPGHHGPPPMDQYLGSTPVGSGVYRLHQGKGMMPPPPMGMMPPPPPPPSGQPPPPPSGPLPPWQQQQQQPPPPPPPSSSMASSTPLPWQQRSLPAAAMARAMRVRTFRAHW

SEQ ID NO: 83592 - protein, 638 aa, Homo sapiens
  Payload ID: 16635
  Gene Symbol: SF1
  Gene Name: splicing factor 1
  Uniprot ID: Q15637
  ENSP ID: ENSP00000334414
MATGANATPLDFPSKKRKRSRWNQDTMEQKTVIPGMPTVIPPGLTREQERAYIVQLQIEDLTRKLRTGDLGIPPNPEDRSPSPEPIYNSEGKRLNTREFRTRKKLEEERHNLITEMVALNPDFKPPADYKPPATRVSDKVMIPQDEYPEINFVGLLIGPRGNTLKNIEKECNAKIMIRGKGSVKEGKVGRKDGQMLPGEDEPLHALVTANTMENVKKAVEQIRNILKQGIETPEDQNDLRKMQLRELARLNGTLREDDNRILRPWQSSETRSITNTTVCTKCGGAGHIASDCKFQRPGDPQSAQDKARMDKEYLSLMAELGEAPVPASVGSTSGPATTPLASAPRPAAPANNPPPPSLMSTTQSRPPWMNSGPSESRPYHGMHGGGPGGPGGGPHSFPHPLPSLTGGHGGHPMQHNPNGPPPPWMQPPPPPMNQGPHPPGHHGPPPMDQYLGSTPVGSGVYRLHQGKGMMPPPPMGMMPPPPPPPSGQPPPPPSGPLPPWQQQQQQPPPPPPPSSSMASSTPLPWQQNTTTTTTSAGTGSIPPWQQQQAAAAASPGAPQMQGNPTMVPLPPGVQPPLPPGAPPPPPPPPPGSAGMMIPPRGGDGPSHESEDFPRPLVTLPGRQPQQRPWWTGWFGKAA

SEQ ID NO: 83593 - protein, 673 aa, Homo sapiens
  Payload ID: 16635
  Gene Symbol: SF1
  Gene Name: splicing factor 1
  Uniprot ID: Q15637
  ENSP ID: ENSP00000366604
MATGANATPLGKLGPPGLPPLPGPKGGFEPGPPPAPGPGAGLLAPGPPPPPPVGSMGALTAAFPFAALPPPPPPPPPPPPQQPPPPPPPPSPGASYPPPQPPPPPPLYQRVSPPQPPPPQPPRKDQQPGPAGGGGDFPSKKRKRSRWNQDTMEQKTVIPGMPTVIPPGLTREQERAYIVQLQIEDLTRKLRTGDLGIPPNPEDRSPSPEPIYNSEGKRLNTREFRTRKKLEEERHNLITEMVALNPDFKPPADYKPPATRVSDKVMIPQDEYPEINFVGLLIGPRGNTLKNIEKECNAKIMIRGKGSVKEGKVGRKDGQMLPGEDEPLHALVTANTMENVKKAVEQIRNILKQGIETPEDQNDLRKMQLRELARLNGTLREDDNRILRPWQSSETRSITNTTVCTKCGGAGHIASDCKFQRPGDPQSAQDKARMDKEYLSLMAELGEAPVPASVGSTSGPATTPLASAPRPAAPANNPPPPSLMSTTQSRPPWMNSGPSESRPYHGMHGGGPGGPGGGPHSFPHPLPSLTGGHGGHPMQHNPNGPPPPWMQPPPPPMNQGPHPPGHHGPPPMDQYLGSTPVGSGVYRLHQGKGMMPPPPMGMMPPPPPPPSGQPPPPPSGPLPPWQQQQQQPPPPPPPSSSMASSTPLPWQQRSLPAAAMARAMRVRTFRAHW

SEQ ID NO: 83594 - protein, 639 aa, Homo sapiens
  Payload ID: 16635
  Gene Symbol: SF1
  Gene Name: splicing factor 1
  Uniprot ID: Q15637
  ENSP ID: ENSP00000366607
MATGANATPLDFPSKKRKRSRWNQDTMEQKTVIPGMPTVIPPGLTREQERAYIVQLQIEDLTRKLRTGDLGIPPNPEDRSPSPEPIYNSEGKRLNTREFRTRKKLEEERHNLITEMVALNPDFKPPADYKPPATRVSDKVMIPQDEYPEINFVGLLIGPRGNTLKNIEKECNAKIMIRGKGSVKEGKVGRKDGQMLPGEDEPLHALVTANTMENVKKAVEQIRNILKQGIETPEDQNDLRKMQLRELARLNGTLREDDNRILRPWQSSETRSITNTTVCTKCGGAGHIASDCKFQRPGDPQSAQDKARMDKEYLSLMAELGEAPVPASVGSTSGPATTPLASAPRPAAPANNPPPPSLMSTTQSRPPWMNSGPSESRPYHGMHGGGPGGPGGGPHSFPHPLPSLTGGHGGHPMQHNPNGPPPPWMQPPPPPMNQGPHPPGHHGPPPMDQYLGSTPVGSGVYRLHQGKGMMPPPPMGMMPPPPPPPSGQPPPPPSGPLPPWQQQQQQPPPPPPPSSSMASSTPLPWQQNTTTTTTSAGTGSIPPWQQQQAAAAASPGAPQMQGNPTMVPLPPGVQPPLPPGAPPPPPPPPPGSAGMMYAPPPPPPPPMDPSNFVTMMGMGVAGMPPFGMPPAPPPPPPQN

SEQ ID NO: 83595 - protein, 571 aa, Homo sapiens
  Payload ID: 16635
  Gene Symbol: SF1
  Gene Name: splicing factor 1
  Uniprot ID: Q15637
  ENSP ID: ENSP00000366611
MATGANATPLDFPSKKRKRSRWNQDTMEQKTVIPGMPTVIPPGLTREQERAYIVQLQIEDLTRKLRTGDLGIPPNPEDRSPSPEPIYNSEGKRLNTREFRTRKKLEEERHNLITEMVALNPDFKPPADYKPPATRVSDKVMIPQDEYPEINFVGLLIGPRGNTLKNIEKECNAKIMIRGKGSVKEGKVGRKDGQMLPGEDEPLHALVTANTMENVKKAVEQIRNILKQGIETPEDQNDLRKMQLRELARLNGTLREDDNRILRPWQSSETRSITNTTVCTKCGGAGHIASDCKFQRPGDPQSAQDKARMDKEYLSLMAELGEAPVPASVGSTSGPATTPLASAPRPAAPANNPPPPSLMSTTQSRPPWMNSGPSESRPYHGMHGGGPGGPGGGPHSFPHPLPSLTGGHGGHPMQHNPNGPPPPWMQPPPPPMNQGPHPPGHHGPPPMGKSVPGKYACGLWGLSPASRKRYDAATTYGHDAAAAAASQWAAPTPSLWSSSPMATTAAAASATPSAQQQYGFQYPLAMAAKIPPRGGDGPSHESEDFPRPLVTLPGRQPQQRPWWTGWFGKAA

SEQ ID NO: 83596 - protein, 51 aa, Homo sapiens
  Payload ID: 16635
  Gene Symbol: SF1
  Gene Name: splicing factor 1
  ENSP ID: ENSP00000388470
MATGANATPLAAAASTATVPRRLVPAAAAAPSAAALPARVAAAAAATPAAA

SEQ ID NO: 83597 - protein, 200 aa, Homo sapiens
  Payload ID: 16635
  Gene Symbol: SF1
  Gene Name: splicing factor 1
  ENSP ID: ENSP00000391198
SLMSTTQSRPPWMNSGPSESRPYHGMHGGGPGGPGGGPHSFPHPLPSLTGGHGGHPMQHNPNGPPPPWMQPPPPPMNQGPHPPGHHGPPPMVPALSFHQDQYLGSTPVGSGVYRLHQGKGMMPPPPMGMMPPPPPPPSGQPPPPPSGPLPPWQQQQQQPPPPPPPSSSMASSTPLPWQQRSLPAAAMARAMRVRTFRAHW

SEQ ID NO: 83598 - protein, 180 aa, Homo sapiens
  Payload ID: 16635
  Gene Symbol: SF1
  Gene Name: splicing factor 1
  ENSP ID: ENSP00000395927
  MOD_RES (1)..(1): Any amino acid
XNQGPHPPGHHGPPPMGKSVPGKYACGLWGLSPASRKRYDAATTYGHDAAAAAASQWAAPTPSLWSSSPMATTAAAASATPSAQQQYGFQYPLAMAAKYDDYHHERWHRVHPAMATAAGGCRSFSRSPSDARQPHYGAPAPRGPAASAAWGPSPSAASTAWFRRHDVCPAPSSSASHGPF

SEQ ID NO: 83599 - protein, 613 aa, Homo sapiens
  Payload ID: 16635
  Gene Symbol: SF1
  Gene Name: splicing factor 1
  Uniprot ID: Q15637
  ENSP ID: ENSP00000396793
MEQKTVIPGMPTVIPPGLTREQERAYIVQLQIEDLTRKLRTGDLGIPPNPEDRSPSPEPIYNSEGKRLNTREFRTRKKLEEERHNLITEMVALNPDFKPPADYKPPATRVSDKVMIPQDEYPEINFVGLLIGPRGNTLKNIEKECNAKIMIRGKGSVKEGKVGRKDGQMLPGEDEPLHALVTANTMENVKKAVEQIRNILKQGIETPEDQNDLRKMQLRELARLNGTLREDDNRILRPWQSSETRSITNTTVCTKCGGAGHIASDCKFQRPGDPQSAQDKARMDKEYLSLMAELGEAPVPASVGSTSGPATTPLASAPRPAAPANNPPPPSLMSTTQSRPPWMNSGPSESRPYHGMHGGGPGGPGGGPHSFPHPLPSLTGGHGGHPMQHNPNGPPPPWMQPPPPPMNQGPHPPGHHGPPPMDQYLGSTPVGSGVYRLHQGKGMMPPPPMGMMPPPPPPPSGQPPPPPSGPLPPWQQQQQQPPPPPPPSSSMASSTPLPWQQNTTTTTTSAGTGSIPPWQQQQAAAAASPGAPQMQGNPTMVPLPPGVQPPLPPGAPPPPPPPPPGSAGMMYAPPPPPPPPMDPSNFVTMMGMGVAGMPPFGMPPAPPPPPPQN

SEQ ID NO: 83600 - protein, 62 aa, Homo sapiens
  Payload ID: 16635
  Gene Symbol: SF1
  Gene Name: splicing factor 1
  ENSP ID: ENSP00000406354
MEQKTVIPGMPTVIPPGLTREQERAYIVQLQIEDLTRKLRTGDLGIPPNPEDRSPSPEPIYN

SEQ ID NO: 83601 - protein, 110 aa, Homo sapiens
  Payload ID: 16635
  Gene Symbol: SF1
  Gene Name: splicing factor 1
  ENSP ID: ENSP00000407962
MATGANATPLDFPSKKRKRSRWNQDTMEQKTVIPGMPTVIPPGLTREQERAYIGPLPLSPSTIARGSGLTPESSAPAKSWKRSGTTSSQRWLHSIRISSHLQITNLQQHV

SEQ ID NO: 83602 - protein, 291 aa, Homo sapiens
  Payload ID: 16635
  Gene Symbol: SF1
  Gene Name: splicing factor 1
  ENSP ID: ENSP00000419062
TKCGGAGHIASDCKFQRPGDPQSAQDKARMDKEYLSLMAELGEAPVPASVGSTSGPATTPLASAPRPAAPANNPPPPSLMSTTQSRPPWMNSGPSESRPYHGMHGGGPGGPGGGPHSFPHPLPSLTGGHGGHPMQHNPNGPPPPWMQPPPPPMNQGPHPPGHHGPPPMVPGKYACGLWGLSPASRKRYDAATTYGHDAAAAAASQWAAPTPSLWSSSPMATTAAAASATPSAQQQYGFQYPLAMAAKYDDYHHERWHRVHPAMATAAGGCRSFSRSPSDARQPHYGAPAPR

SEQ ID NO: 83603 - protein, 110 aa, Homo sapiens; identical to SEQ ID NO: 83601
  Payload ID: 16635
  Gene Symbol: SF1
  Gene Name: splicing factor 1
  ENSP ID: ENSP00000486693

SEQ ID NO: 83604 - protein, 793 aa, Homo sapiens
  Payload ID: 16636
  Gene Symbol: SF3A1
  Gene Name: splicing factor 3a, subunit 1, 120kDa
  Uniprot ID: Q15459
  ENSP ID: ENSP00000215793
MPAGPVQAVPPPPPVPTEPKQPTEEEASSKEDSAPSKPVVGIIYPPPEVRNIVDKTASFVARNGPEFEARIRQNEINNPKFNFLNPNDPYHAYYRHKVSEFKEGKAQEPSAAIPKVMQQQQQTTQQQLPQKVQAQVIQETIVPKEPPPEFEFIADPPSISAFDLDVVKLTAQFVARNGRQFLTQLMQKEQRNYQFDFLRPQHSLFNYFTKLVEQYTKILIPPKGLFSKLKKEAENPREVLDQVCYRVEWAKFQERERKKEEEEKEKERVAYAQIDWHDFVVVETVDFQPNEQGNFPPPTTPEELGARILIQERYEKFGESEEVEMEVESDEEDDKQEKAEEPPSQLDQDTQVQDMDEGSDDEEEGQKVPPPPETPMPPPLPPTPDQVIVRKDYDPKASKPLPPAPAPDEYLVSPITGEKIPASKMQEHMRIGLLDPRWLEQRDRSIREKQSDDEVYAPGLDIESSLKQLAERRTDIFGVEETAIGKKIGEEEIQKPEEKVTWDGHSGSMARTQQAAQANITLQEQIEAIHKAKGLVPEDDTKEKIGPSKPNEIPQQPPPPSSATNIPSSAPPITSVPRPPTMPPPVRTTVVSAVPVMPRPPMASVVRLPPGSVIAPMPPIIHAPRINVVPMPPSAPPIMAPRPPPMIVPTAFVPAPPVAPVPAPAPMPPVHPPPPMEDEPTSKKLKTEDSLMPEEEFLRRNKGPVSIKVQVPNMQDKTEWKLNGQVLVFTLPLTDQVSVIKVKIHEATGMPAGKQKLQYEGIFIKDSNSLAYYNMANGAVIHLALKERGGRKK

SEQ ID NO: 83605 - protein, 63 aa, Homo sapiens
  Payload ID: 16636
  Gene Symbol: SF3A1
  Gene Name: splicing factor 3a, subunit 1, 120kDa
  ENSP ID: ENSP00000397267
MPAGPVQAVPPPPPVPTEPKQPTEEEASSKEDSAPSKPVVGIIYPPPEVRNIVDKTASFVARS

SEQ ID NO: 83606 - protein, 259 aa, Homo sapiens
  Payload ID: 16636
  Gene Symbol: SF3A1
  Gene Name: splicing factor 3a, subunit 1, 120kDa
  ENSP ID: ENSP00000400862
GARILIQERYEKFGESEEVEMEVESDEEDDKQEKAEEPPSQLDQDTQVQDMDEGSDDEEEGQKVPPPPETPMPPPLPPTPDQVIVRKDYDPKASKPLPPAPAPDEYLVSPITGEKIPASKMQEHMRIGLLDPRWLEQRDRSIREKQSDDEVTWDGHSGSMARTQQAAQANITLQEQIEAIHKAKGLVPEDDTKEKIGPSKPNEIPQQPPPPSSATNIPSSAPPITSVPRPPTMPPPVRTTVVSAVPVMPRPPMASVVRL

SEQ ID NO: 83607 - protein, 38 aa, Homo sapiens
  Payload ID: 16636
  Gene Symbol: SF3A1
  Gene Name: splicing factor 3a, subunit 1, 120kDa
  ENSP ID: ENSP00000412715
MPAGPVQAVPPPPPVPTEPKQPLVRRSVRRRSRSQRKR

SEQ ID NO: 83608 - protein, 464 aa, Homo sapiens
  Payload ID: 16637
  Gene Symbol: SF3A2
  Gene Name: splicing factor 3a, subunit 2, 66kDa
  Uniprot ID: Q15428
  ENSP ID: ENSP00000221494
MDFQHRPGGKTGSGGVASSSESNRDRRERLRQLALETIDINKDPYFMKNHLGSYECKLCLTLHNNEGSYLAHTQGKKHQTNLARRAAKEAKEAPAQPAPEKVKVEVKKFVKIGRPGYKVTKQRDSEMGQQSLLFQIDYPEIAEGIMPRHRFMSAYEQRIEPPDRRWQYLLMAAEPYETIAFKVPSREIDKAEGKFWTHWNRETKQFFLQFHFKMEKPPAPPSLPAGPPGVKRPPPPLMNGLPPRPPLPESLPPPPPGGLPLPPMPPTGPAPSGPPGPPQLPPPAPGVHPPAPVVHPPASGVHPPAPGVHPPAPGVHPPAPGVHPPTSGVHPPAPGVHPPAPGVHPPAPGVHPPAPGVHPPAPGVHPPPSAGVHPQAPGVHPAAPAVHPQAPGVHPPAPGMHPQAPGVHPQPPGVHPSAPGVHPQPPGVHPSNPGVHPPTPMPPMLRPPLPSEGPGNIPPPPPTN

SEQ ID NO: 83609 - protein, 135 aa, Homo sapiens
  Payload ID: 16637
  Gene Symbol: SF3A2
  Gene Name: splicing factor 3a, subunit 2, 66kDa
  ENSP ID: ENSP00000466634
MDFQHRPGGKTGSGGVASSSESNRDRRERLRQLALETIDINKDPYFMKNHLGSYECKLCLTLHNNEGSYLAHTQGKKHQTNLARRAAKEAKEAPAQPAPEKVKVEVKKFVKIGRPGYKVTKQRDSEMGQQSLLFQ

SEQ ID NO: 83610 - protein, 501 aa, Homo sapiens
  Payload ID: 16638
  Gene Symbol: SF3A3
  Gene Name: splicing factor 3a, subunit 3, 60kDa
  Uniprot ID: Q12874
  ENSP ID: ENSP00000362110
METILEQQRRYHEEKERLMDVMAKEMLTKKSTLRDQINSDHRTRAMQDRYMEVSGNLRDLYDDKDGLRKEELNAISGPNEFAEFYNRLKQIKEFHRKHPNEICVPMSVEFEELLKARENPSEEAQNLVEFTDEEGYGRYLDLHDCYLKYINLKASEKLDYITYLSIFDQLFDIPKERKNAEYKRYLEMLLEYLQDYTDRVKPLQDQNELFGKIQAEFEKKWENGTFPGWPKETSSALTHAGAHLDLSAFSSWEELASLGLDRLKSALLALGLKCGGTLEERAQRLFSTKGKSLESLDTSLFAKNPKSKGTKRDTERNKDIAFLEAQIYEYVEILGEQRHLTHENVQRKQARTGEEREEEEEEQISESESEDEENEIIYNPKNLPLGWDGKPIPYWLYKLHGLNINYNCEICGNYTYRGPKAFQRHFAEWRHAHGMRCLGIPNTAHFANVTQIEDAVSLWAKLKLQKASERWQPDTEEEYEDSSGNVVNKKTYEDLKRQGLL

SEQ ID NO: 83611 - protein, 1304 aa, Homo sapiens
  Payload ID: 16639
  Gene Symbol: SF3B1
  Gene Name: splicing factor 3b, subunit 1, 155kDa
  Uniprot ID: O75533
  ENSP ID: ENSP00000335321
MAKIAKTHEDIEAQIREIQGKKAALDEAQGVGLDSTGYYDQEIYGGSDSRFAGYVTSIAATELEDDDDDYSSSTSLLGQKKPGYHAPVALLNDIPQSTEQYDPFAEHRPPKIADREDEYKKHRRTMIISPERLDPFADGGKTPDPKMNARTYMDVMREQHLTKEEREIRQQLAEKAKAGELKVVNGAAASQPPSKRKRRWDQTADQTPGATPKKLSSWDQAETPGHTPSLRWDETPGRAKGSETPGATPGSKIWDPTPSHTPAGAATPGRGDTPGHATPGHGGATSSARKNRWDETPKTERDTPGHGSGWAETPRTDRGGDSIGETPTPGASKRKSRWDETPASQMGGSTPVLTPGKTPIGTPAMNMATPTPGHIMSMTPEQLQAWRWEREIDERNRPLSDEELDAMFPEGYKVLPPPAGYVPIRTPARKLTATPTPLGGMTGFHMQTEDRTMKSVNDQPSGNLPFLKPDDIQYFDKLLVDVDESTLSPEEQKERKIMKLLLKIKNGTPPMRKAALRQITDKAREFGAGPLFNQILPLLMSPTLEDQERHLLVKVIDRILYKLDDLVRPYVHKILVVIEPLLIDEDYYARVEGREIISNLAKAAGLATMISTMRPDIDNMDEYVRNTTARAFAVVASALGIPSLLPFLKAVCKSKKSWQARHTGIKIVQQIAILMGCAILPHLRSLVEIIEHGLVDEQQKVRTISALAIAALAEAATPYGIESFDSVLKPLWKGIRQHRGKGLAAFLKAIGYLIPLMDAEYANYYTREVMLILIREFQSPDEEMKKIVLKVVKQCCGTDGVEANYIKTEILPPFFKHFWQHRMALDRRNYRQLVDTTVELANKVGAAEIISRIVDDLKDEAEQYRKMVMETIEKIMGNLGAADIDHKLEEQLIDGILYAFQEQTTEDSVMLNGFGTVVNALGKRVKPYLPQICGTVLWRLNNKSAKVRQQAADLISRTAVVMKTCQEEKLMGHLGVVLYEYLGEEYPEVLGSILGALKAIVNVIGMHKMTPPIKDLLPRLTPILKNRHEKVQENCIDLVGRIADRGAEYVSAREWMRICFELLELLKAHKKAIRRATVNTFGYIAKAIGPHDVLATLLNNLKVQERQNRVCTTVAIAIVAETCSPFTVLPALMNEYRVPELNVQNGVLKSLSFLFEYIGEMGKDYIYAVTPLLEDALMDRDLVHRQTASAVVQHMSLGVYGFGCEDSLNHLLNYVWPNVFETSPHVIQAVMGALEGLRVAIGPCRMLQYCLQGLFHPARKVRDVYWKIYNSIYIGSQDALIAHYPRIYNDDKNTYIRYELDYIL

SEQ ID NO: 83612 - protein, 37 aa, Homo sapiens
  Payload ID: 16639
  Gene Symbol: SF3B1
  Gene Name: splicing factor 3b, subunit 1, 155kDa
  ENSP ID: ENSP00000392117
MAKIAKTHEDIEAQIREIQGKKAALDEAQGVGLDSTG

SEQ ID NO: 83613 - protein, 144 aa, Homo sapiens
  Payload ID: 16639
  Gene Symbol: SF3B1
  Gene Name: splicing factor 3b, subunit 1, 155kDa
  Uniprot ID: O75533
  ENSP ID: ENSP00000402997
MAKIAKTHEDIEAQIREIQGKKAALDEAQGVGLDSTGYYDQEIYGGSDSRFAGYVTSIAATELEDDDDDYSSSTSLLGQKKPGYHAPVALLNDIPQSTEQYDPFAEHRPPKIADREDEYKKHRRTMIISPERLDPFADGFYSAA

SEQ ID NO: 83614 - protein, 241 aa, Homo sapiens
  Payload ID: 16639
  Gene Symbol: SF3B1
  Gene Name: splicing factor 3b, subunit 1, 155kDa
  ENSP ID: ENSP00000409435
  MOD_RES (1)..(1): Any amino acid
XSKYALHCRETGDLFVLQLKGMHKMTPPIKDLLPRLTPILKNRHEKVQENCIDLVGRIADRGAEYVSAREWMRICFELLELLKAHKKAIRRATVNTFGYIAKAIGPHDVLATLLNNLKVQERQNRVCTTVAIAIVAETCSPFTVLPALMNEYRVPELNVQNGVLKSLSFLFEYIGEMGKDYIYAVTPLLEDALMDRDLVHRQTASAVVQHMSLGVYGFGCEDSLNHLLNYVWPNVFETSPH

SEQ ID NO: 83615 - protein, 154 aa, Homo sapiens
  Payload ID: 16639
  Gene Symbol: SF3B1
  Gene Name: splicing factor 3b, subunit 1, 155kDa
  ENSP ID: ENSP00000419896
MAKIAKTHEDIEAQIREIQGKKAALDEAQGVGLDSTGYYDQEIYGGSDSRFAGYVTSIAATELEDDDDDYSSSTSLLGQKKPGYHAPVALLNDIPQSTEQYDPFAEHRPPKIADREDEYKKHRRTMIISPERLDPFADGNSFPLFYKYSEIYLY

SEQ ID NO: 83616 - protein, 144 aa, Homo sapiens; identical to SEQ ID NO: 83613
  Payload ID: 16639
  Gene Symbol: SF3B1
  Gene Name: splicing factor 3b, subunit 1, 155kDa
  Uniprot ID: O75533
  ENSP ID: ENSP00000428820

SEQ ID NO: 83617 - protein, 895 aa, Homo sapiens
  Payload ID: 16640
  Gene Symbol: SF3B2
  Gene Name: splicing factor 3b, subunit 2, 145kDa
  Uniprot ID: Q13435
  ENSP ID: ENSP00000318861
MATEHPEPPKAELQLPPPPPPGHYGAWAAQELQAKLAEIGAPIQGNREELVERLQSYTRQTGIVLNRPVLRGEDGDKAAPPPMSAQLPGIPMPPPPLGLPPLQPPPPPPPPPPGLGLGFPMAHPPNLGPPPPLRVGEPVALSEEERLKLAQQQAALLMQQEERAKQQGDHSLKEHELLEQQKRAAVLLEQERQQEIAKMGTPVPRPPQDMGQIGVRTPLGPRVAAPVGPVGPTPTVLPMGAPVPRPRGPPPPPGDENREMDDPSVGPKIPQALEKILQLKESRQEEMNSQQEEEEMETDARSSLGQSASETEEDTVSVSKKEKNRKRRNRKKKKKPQRVRGVSSESSGDREKDSTRSRGSDSPAADVEIEYVTEEPEIYEPNFIFFKRIFEAFKLTDDVKKEKEKEPEKLDKLENSAAPKKKGFEEEHKDSDDDSSDDEQEKKPEAPKLSKKKLRRMNRFTVAELKQLVARPDVVEMHDVTAQDPKLLVHLKATRNSVPVPRHWCFKRKYLQGKRGIEKPPFELPDFIKRTGIQEMREALQEKEEQKTMKSKMREKVRPKMGKIDIDYQKLHDAFFKWQTKPKLTIHGDLYYEGKEFETRLKEKKPGDLSDELRISLGMPVGPNAHKVPPPWLIAMQRYGPPPSYPNLKIPGLNSPIPESCSFGYHAGGWGKPPVDETGKPLYGDVFGTNAAEFQTKTEEEEIDRTPWGELEPSDEESSEEEEEEESDEDKPDETGFITPADSGLITPGGFSSVPAGMETPELIELRKKKIEEAMDGSETPQLFTVLPEKRTATVGGAMMGSTHIYDMSTVMSRKGPAPELQGVEVALAPEELELDPMAMTQKYEEHVREQQAQVEKEDFSDMVAEHAAKQKQKKRKAQPQDSRGGSKKYKEFKF

SEQ ID NO: 83618 - protein, 387 aa, Homo sapiens
  Payload ID: 16640
  Gene Symbol: SF3B2
  Gene Name: splicing factor 3b, subunit 2, 145kDa
  ENSP ID: ENSP00000431520
PEPPKAELQLPPPPPPGHYGAWAAQELQAKLAEIGAPIQGNREELVERLQSYTRQTGIVLNRPVLRGEDGDKAAPPPMSAQLPGIPMPPPPLGLPPLQPPPPPPPPPPGLGLGFPMAHPPNLGPPPPLRVGEPVALSEEERLKLAQQQAALLMQQEERAKQQGDHSLKEHELLEQQKRAAVLLEQERQQEIAKMGTPVPRPPQDMGQIGVRTPLGPRAAPVGPVGPTPTVLPMGAPVPRPRGPPPPPGDENREMDDPSVGPKIPQALEKILQLKESRQEEMNSQQEEEEMETDARSSLGQSASETEEDTVSVSKKEKNRKRRNRKKKKKPQRVRGVSSESSGDREKDSTRSRGSDSPAADVEIEYVTEEPEIYEPNFIFFKRIFEAF

SEQ ID NO: 83619 - protein, 353 aa, Homo sapiens
  Payload ID: 16640
  Gene Symbol: SF3B2
  Gene Name: splicing factor 3b, subunit 2, 145kDa
  ENSP ID: ENSP00000431908
MATEHPEPPKAELQLPPPPPPGHYGAWAAQELQAKLAEIGAPIQGNREELVERLQSYTRQTGIVLNRPVLRGEDGDKAAPPPMSAQLPGIPMPPPPLGLPPLQPPPPPPPPPPGLGLGFPMAHPPNLGPPPPLRVGEPVALSEEERLKLAQQQAALLMQQEERAKQGDHSLKEHELLEQQKRAAVLLEQERQQEIAKMGTPVPRPPQDMGQIGVRTPLGPRAAPVGPVGPTPTVLPMGAPVPRPRGPPPPPGDENREMDDPSVGPKIPQALEKILQLKESRQEEMNSQQEEEEMETDARSSLGQSASETEEDTVSVSKKEKNRKRRNRKKKKKPQRVRGVSSESSGDREKDST

SEQ ID NO: 83620 - protein, 878 aa, Homo sapiens
  Payload ID: 16640
  Gene Symbol: SF3B2
  Gene Name: splicing factor 3b, subunit 2, 145kDa
  ENSP ID: ENSP00000432655
MATEHPEPPKAELQLPPPPPPGHYGAWAAQELQAKLAEIGAPIQGNREELVERLQSYTRQTGIVLNRPVLRGEDGDKAAPPPMSAQLPGIPMPPPPLGLPPLQPPPPPPPPPPGLGLGFPMAHPPNLGPPPPLRVGEPVALSEEERLKLAQQQAALLMQQEERAKQAAVLLEQERQQEIAKMGTPVPRPPQDMGQIGVRTPLGPRVAAPVGPVGPTPTVLPMGAPVPRPRGPPPPPGDENREMDDPSVGPKIPQALEKILQLKESRQEEMNSQQEEEEMETDARSSLGQSASETEEDTVSVSKKEKNRKRRNRKKKKKPQRVRGVSSESSGDREKDSTRSRGSDSPAADVEIEYVTEEPEIYEPNFIFFKRIFEAFKLTDDVKKEKEKEPEKLDKLENSAAPKKKGFEEEHKDSDDDSSDDEQEKKPEAPKLSKKKLRRMNRFTVAELKQLVARPDVVEMHDVTAQDPKLLVHLKATRNSVPVPRHWCFKRKYLQGKRGIEKPPFELPDFIKRTGIQEMREALQEKEEQKTMKSKMREKVRPKMGKIDIDYQKLHDAFFKWQTKPKLTIHGDLYYEGKEFETRLKEKKPGDLSDELRISLGMPVGPNAHKVPPPWLIAMQRYGPPPSYPNLKIPGLNSPIPESCSFGYHAGGWGKPPVDETGKPLYGDVFGTNAAEFQTKTEEEEIDRTPWGELEPSDEESSEEEEEEESDEDKPDETGFITPADSGLITPGGFSSVPAGMETPELIELRKKKIEEAMDGSETPQLFTVLPEKRTATVGGAMMGSTHIYDMSTVMSRKGPAPELQGVEVALAPEELELDPMAMTQKYEEHVREQQAQVEKEDFSDMVAEHAAKQKQKKRKAQPQDSRGGSKKYKEFKF

SEQ ID NO: 83621 - protein, 273 aa, Homo sapiens
  Payload ID: 16640
  Gene Symbol: SF3B2
  Gene Name: splicing factor 3b, subunit 2, 145kDa
  ENSP ID: ENSP00000435495
MATEHPEPPKAELQLPPPPPPGHYGAWAAQELQAKLAEIGAPIQGNREELVERLQSYTRQTGIVLNRPVLRGEDGDKAAPPPMSAQLPGIPMPPPPLGLPPLQPPPPPPPPPPGLGLGFPMAHPPNLGPPPPLRVGEPVALSEEERLKLAQQQAALLMQQEERAKQGDHSLKEHELLEQQKRAAVLLEQERQQEIAKMGTPVPRPPQDMGQIGVRTPLGPRVAAPVGPVGPTPTVLPMGAPVPRPRGPPPPPGDENREMDDPSVGPKIPQALE

SEQ ID NO: 83622 - protein, 80 aa, Homo sapiens
  Payload ID: 16640
  Gene Symbol: SF3B2
  Gene Name: splicing factor 3b, subunit 2, 145kDa
  ENSP ID: ENSP00000435765
MSAQLPGIPMPPPPLGLPPLQPPPPPPPPPPGLGLGFPMAHPPNLGPPPPLRVGEPVALSEEERLKLAQQQAALLMQQEE

SEQ ID NO: 83623 - protein, 315 aa, Homo sapiens
  Payload ID: 16640
  Gene Symbol: SF3B2
  Gene Name: splicing factor 3b, subunit 2, 145kDa
  ENSP ID: ENSP00000436757
  MOD_RES (1)..(1): Any amino acid
XKPKLTIHGDLYYEGKEFETRLKEKKPGDLSDELRISLGMPVGPNAHKVPPPWLIAMQRYGPPPSYPNLKIPGLNSPIPESCSFGYHAGGWGKPPVDETGKPLYGDVFGTNAAEFQTKTEEEEIDRTPWGELEPSDEESSEEEEEEESDEDKPDETGFITPADSGLITPGGFSSVPAGMETPELIELRKKKIEEAMDGETPQLFTVLPEKRTATVGGAMMGSTHIYDMSTVMSRKGPAPELQGVEVALAPEELELDPMAMTQKYEEHVREQQAQVEKEDFSDMVAEHAAKQKQKKRKAQPQDSRGGSKKYKEFKF

SEQ ID NO: 83624 - protein, 871 aa, Homo sapiens
  Payload ID: 16640
  Gene Symbol: SF3B2
  Gene Name: splicing factor 3b, subunit 2, 145kDa
  ENSP ID: ENSP00000482986
MAPGAQELQAKLAEIGAPIQGNREELVERLQSYTRQTGIVLNRPVLRGEDGDKAAPPPMSAQLPGIPMPPPPLGLPPLQPPPPPPPPPPGLGLGFPMAHPPNLGPPPPLRVGEPVALSEEERLKLAQQQAALLMQQEERAKQQGDHSLKEHELLEQQKRAAVLLEQERQQEIAKMGTPVPRPPQDMGQIGVRTPLGPRVAAPVGPVGPTPTVLPMGAPVPRPRGPPPPPGDENREMDDPSVGPKIPQALEKILQLKESRQEEMNSQQEEEEMETDARSSLGQSASETEEDTVSVSKKEKNRKRRNRKKKKKPQRVRGVSSESSGDREKDSTRSRGSDSPAADVEIEYVTEEPEIYEPNFIFFKRIFEAFKLTDDVKKEKEKEPEKLDKLENSAAPKKKGFEEEHKDSDDDSSDDEQEKKPEAPKLSKKKLRRMNRFTVAELKQLVARPDVVEMHDVTAQDPKLLVHLKATRNSVPVPRHWCFKRKYLQGKRGIEKPPFELPDFIKRTGIQEMREALQEKEEQKTMKSKMREKVRPKMGKIDIDYQKLHDAFFKWQTKPKLTIHGDLYYEGKEFETRLKEKKPGDLSDELRISLGMPVGPNAHKVPPPWLIAMQRYGPPPSYPNLKIPGLNSPIPESCSFGYHAGGWGKPPVDETGKPLYGDVFGTNAAEFQTKTEEEEIDRTPWGELEPSDEESSEEEEEEESDEDKPDETGFITPADSGLITPGGFSSVPAGMETPELIELRKKKIEEAMDGSETPQLFTVLPEKRTATVGGAMMGSTHIYDMSTVMSRKGPAPELQGVEVALAPEELELDPMAMTQKYEEHVREQQAQVEKEDFSDMVAEHAAKQKQKKRKAQPQDSRGGSKKYKEFKF

SEQ ID NO: 83625 - protein, 1217 aa, Homo sapiens
  Payload ID: 16641
  Gene Symbol: SF3B3
  Gene Name: splicing factor 3b, subunit 3, 130kDa
  Uniprot ID: Q15393
  ENSP ID: ENSP00000305790
MFLYNLTLQRATGISFAIHGNFSGTKQQEIVVSRGKILELLRPDPNTGKVHTLLTVEVFGVIRSLMAFRLTGGTKDYIVVGSDSGRIVILEYQPSKNMFEKIHQETFGKSGCRRIVPGQFLAVDPKGRAVMISAIEKQKLVYILNRDAAARLTISSPLEAHKANTLVYHVVGVDVGFENPMFACLEMDYEEADNDPTGEAAANTQQTLTFYELDLGLNHVVRKYSEPLEEHGNFLITVPGGSDGPSGVLICSENYITYKNFGDQPDIRCPIPRRRNDLDDPERGMIFVCSATHKTKSMFFFLAQTEQGDIFKITLETDEDMVTEIRLKYFDTVPVAAAMCVLKTGFLFVASEFGNHYLYQIAHLGDDDEEPEFSSAMPLEEGDTFFFQPRPLKNLVLVDELDSLSPILFCQIADLANEDTPQLYVACGRGPRSSLRVLRHGLEVSEMAVSELPGNPNAVWTVRRHIEDEFDAYIIVSFVNATLVLSIGETVEEVTDSGFLGTTPTLSCSLLGDDALVQVYPDGIRHIRADKRVNEWKTPGKKTIVKCAVNQRQVVIALTGGELVYFEMDPSGQLNEYTERKEMSADVVCMSLANVPPGEQRSRFLAVGLVDNTVRIISLDPSDCLQPLSMQALPAQPESLCIVEMGGTEKQDELGERGSIGFLYLNIGLQNGVLLRTVLDPVTGDLSDTRTRYLGSRPVKLFRVRMQGQEAVLAMSSRSWLSYSYQSRFHLTPLSYETLEFASGFASEQCPEGIVAISTNTLRILALEKLGAVFNQVAFPLQYTPRKFVIHPESNNLIIIETDHNAYTEATKAQRKQQMAEEMVEAAGEDERELAAEMAAAFLNENLPESIFGAPKAGNGQWASVIRVMNPIQGNTLDLVQLEQNEAAFSVAVCRFSNTGEDWYVLVGVAKDLILNPRSVAGGFVYTYKLVNNGEKLEFLHKTPVEEVPAAIAPFQGRVLIGVGKLLRVYDLGKKKLLRKCENKHIANYISGIQTIGHRVIVSDVQESFIWVRYKRNENQLIIFADDTYPRWVTTASLLDYDTVAGADKFGNICVVRLPPNTNDEVDEDPTGNKALWDRGLLNGASQKAEVIMNYHVGETVLSLQKTTLIPGGSESLVYTTLSGGIGILVPFTSHEDHDFFQHVEMHLRSEHPPLCGRDHLSFRSYYFPVKNVIDGDLCEQFNSMEPNKQKNVSEELDRTPPEVSKKLEDIRTRYAF

SEQ ID NO: 83626 - protein, 30 aa, Homo sapiens
  Payload ID: 16641
  Gene Symbol: SF3B3
  Gene Name: splicing factor 3b, subunit 3, 130kDa
  ENSP ID: ENSP00000454308
MFLYNLTLQRATGISFAIHGNFSGTKQQEI

SEQ ID NO: 83627 - protein, 72 aa, Homo sapiens
  Payload ID: 16641
  Gene Symbol: SF3B3
  Gene Name: splicing factor 3b, subunit 3, 130kDa
  ENSP ID: ENSP00000461236
MFLYNLTLQRATGISFAIHGNFSGTKQQEIVVSRGKILELLRPDPNTGKVHTLLTVEVFGVIRSLMAFRLTG

SEQ ID NO: 83628 - protein, 4 aa, Homo sapiens
  Payload ID: 16641
  Gene Symbol: SF3B3
  Gene Name: splicing factor 3b, subunit 3, 130kDa
  ENSP ID: ENSP00000461342
MFLY

SEQ ID NO: 83629 - protein, 91 aa, Homo sapiens
  Payload ID: 16641
  Gene Symbol: SF3B3
  Gene Name: splicing factor 3b, subunit 3, 130kDa
  ENSP ID: ENSP00000463253
EEGDTFFFQPRPLKNLVLVDELDSLSPILFCQIADLANEDTPQLYVACGRGPRSSLRVLRHGLEVSEMAVSELPGNPNAVWTVRRHIEGGW

SEQ ID NO: 83630 - protein, 57 aa, Homo sapiens
  Payload ID: 16641
  Gene Symbol: SF3B3
  Gene Name: splicing factor 3b, subunit 3, 130kDa
  ENSP ID: ENSP00000463359
MAFRLTGGTKDYIVVGSDSGRIVILEYQPSKNMFEKIHQETFGKSGCRRIVPGQFLA

SEQ ID NO: 83631 - protein, 31 aa, Homo sapiens
  Payload ID: 16641
  Gene Symbol: SF3B3
  Gene Name: splicing factor 3b, subunit 3, 130kDa
  ENSP ID: ENSP00000464126
MAFRLTGGTKDYIVVGSDSGRIVILEYQPSK

SEQ ID NO: 83632 - protein, 424 aa, Homo sapiens
  Payload ID: 16642
  Gene Symbol: SF3B4
  Gene Name: splicing factor 3b, subunit 4, 49kDa
  Uniprot ID: Q15427
  ENSP ID: ENSP00000271628
MAAGPISERNQDATVYVGGLDEKVSEPLLWELFLQAGPVVNTHMPKDRVTGQHQGYGFVEFLSEEDADYAIKIMNMIKLYGKPIRVNKASAHNKNLDVGANIFIGNLDPEIDEKLLYDTFSAFGVILQTPKIMRDPDTGNSKGYAFINFASFDASDAAIEAMNGQYLCNRPITVSYAFKKDSKGERHGSAAERLLAAQNPLSQADRPHQLFADAPPPPSAPNPVVSSLGSGLPPPGMPPPGSFPPPVPPPGALPPGIPPAMPPPPMPPGAAGHGPPSAGTPGAGHPGHGHSHPHPFPPGGMPHPGMSQMQLAHHGPHGLGHPHAGPPGSGGQPPPRPPPGMPHPGPPPMGMPPRGPPFGSPMGHPGPMPPHGMRGPPPLMPPHGYTGPPRPPPYGYQRGPLPPPRPTPRPPVPPRGPLRGPLPQ

SEQ ID NO: 83633 - protein, 190 aa, Homo sapiens
  Payload ID: 16642
  Gene Symbol: SF3B4
  Gene Name: splicing factor 3b, subunit 4, 49kDa
  ENSP ID: ENSP00000391114
MPKDRVTGQHQGYGFVEFLSEEDADYAIKIMNMIKLYGKPIRVNKASAHNKNLDVGANIFIGNLDPEIDEKLLYDTFSAFGVILQTPKIMRDPDTGNSKGYAFINFASFDASDAAIEAMNGQYLCNRPITVSYAFKKDSKGERHGSAAERLLAAQNPLSQADRPHQLFADAPPPPSAPNPVVSSLGSGLP

SEQ ID NO: 83634 - protein, 86 aa, Homo sapiens
  Payload ID: 16643
  Gene Symbol: SF3B5
  Gene Name: splicing factor 3b, subunit 5, 10kDa
  Uniprot ID: Q9BWJ5
  ENSP ID: ENSP00000356541
MTDRYTIHSQLEHLQSKYIGTGHADTTKWEWLVNQHRDSYCSYMGHFDLLNYFAIAENESKARVRFNLMEKMLQPCGPPADKPEEN

SEQ ID NO: 83635 - protein, 125 aa, Homo sapiens
  Payload ID: 16644
  Gene Symbol: SF3B6
  Gene Name: splicing factor 3b, subunit 6, 14kDa
  Uniprot ID: Q9Y3B4
  ENSP ID: ENSP00000233468
MAMQAAKRANIRLPPEVNRILYIRNLPYKITAEEMYDIFGKYGPIRQIRVGNTPETRGTAYVVYEDIFDAKNACDHLSGFNVCNRYLVVLYYNANRAFQKMDTKKKEEQLKLLKEKYGINTDPPK

SEQ ID NO: 83636 - protein, 707 aa, Homo sapiens
  Payload ID: 16645
  Gene Symbol: SFPQ
  Gene Name: splicing factor proline/glutamine-rich
  Uniprot ID: P23246
  ENSP ID: ENSP00000349748
MSRDRFRSRGGGGGGFHRRGGGGGRGGLHDFRSPPPGMGLNQNRGPMGPGPGQSGPKPPIPPPPPHQQQQQPPPQQPPPQQPPPHQPPPHPQPHQQQQPPPPPQDSSKPVVAQGPGPAPGVGSAPPASSSAPPATPPTSGAPPGSGPGPTPTPPPAVTSAPPGAPPPTPPSSGVPTTPPQAGGPPPPPAAVPGPGPGPKQGPGPGGPKGGKMPGGPKPGGGPGLSTPGGHPKPPHRGGGEPRGGRQHHPPYHQQHHQGPPPGGPGGRSEEKISDSEGFKANLSLLRRPGEKTYTQRCRLFVGNLPADITEDEFKRLFAKYGEPGEVFINKGKGFGFIKLESRALAEIAKAELDDTPMRGRQLRVRFATHAAALSVRNLSPYVSNELLEEAFSQFGPIERAVVIVDDRGRSTGKGIVEFASKPAARKAFERCSEGVFLLTTTPRPVIVEPLEQLDDEDGLPEKLAQKNPMYQKERETPPRFAQHGTFEYEYSQRWKSLDEMEKQQREQVEKNMKDAKDKLESEMEDAYHEHQANLLRQDLMRRQEELRRMEELHNQEMQKRKEMQLRQEEERRRREEEMMIRQREMEEQMRRQREESYSRMGYMDPRERDMRMGGGGAMNMGDPYGSGGQKFPPLGGGGGIGYEANPGVPPATMSGSMMGSDMRTERFGQGGAGPVGGQGPRGMGPGTPAGYGRGREEYEGPNKKPRF

SEQ ID NO: 83637 - protein, 223 aa, Homo sapiens
  Payload ID: 16645
  Gene Symbol: SFPQ
  Gene Name: splicing factor proline/glutamine-rich
  ENSP ID: ENSP00000424440
VEPLEQLDDEDGLPEKLAQKNPMYQKERETPPRFAQHGTFEYEYSQRWKSLDEMEKQQREQVEKNMKDAKDKLESEMEDAYHEHQANLLRQDLMRRQEELRRMEELHNQEMQKRKEMQLRQEEERRRREEEMMIRQREMEEQMRRQREESYSRMGYMDPRERDMRMGGGGAMNMGDPYGSGGQKFPPLGGGGGIGYEANPGVPPATMSGSMMGSDMVRMIDVG

SEQ ID NO: 83638 - protein, 88 aa, Homo sapiens
  Payload ID: 16645
  Gene Symbol: SFPQ
  Gene Name: splicing factor proline/glutamine-rich
  ENSP ID: ENSP00000425071
  MOD_RES (1)..(1): Any amino acid
XREMEEQMRRQREESYSRMGYMDPRERDMRMGGGGAMNMGDPYGSGGQKFPPLGGGGGIGYEANPGVPPATMSGSMMGSDMVRMIDVG

SEQ ID NO: 83639 - protein, 951 aa, Homo sapiens
  Payload ID: 16646
  Gene Symbol: SFSWAP
  Gene Name: splicing factor, suppressor of white-apricot family
  Uniprot ID: Q12872
  ENSP ID: ENSP00000261674
MYGASGGRAKPERKSGAKEEAGPGGAGGGGSRVELLVFGYACKLFRDDERALAQEQGQHLIPWMGDHKILIDRYDGRGHLHDLSEYDAEYSTWNRDYQLSEEEARIEALCDEERYLALHTDLLEEEARQEEEYKRLSEALAEDGSYNAVGFTYGSDYYDPSEPTEEEEPSKQREKNEAENLEENEEPFVAPLGLSVPSDVELPPTAKMHAIIERTASFVCRQGAQFEIMLKAKQARNSQFDFLRFDHYLNPYYKFIQKAMKEGRYTVLAENKSDEKKKSGVSSDNEDDDDEEDGNYLHPSLFASKKCNRLEELMKPLKVVDPDHPLAALVRKAQADSSTPTPHNADGAPVQPSQVEYTADSTVAAMYYSYYMLPDGTYCLAPPPPGIDVTTYYSTLPAGVTVSNSPGVTTTAPPPPGTTPLPPPTTAETSSGATSTTTTTSALAPVAAIIPPPPDVQPVIDKLAEYVARNGLKFETSVRAKNDQRFEFLQPWHQYNAYYEFKKQFFLQKEGGDSMQAVSAPEEAPTDSAPEKPSDAGEDGAPEDAAEVGARAGSGGKKEASSSKTVPDGKLVKASFAPISFAIKAKENDLLPLEKNRVKLDDDSDDDEESKEGQESSSSAANTNPAVAPPCVVVEEKKPQLTQEELEAKQAKQKLEDRLAAAAREKLAQASKESKEKQLQAERKRKAALFLQTLKNPLPEAEAGKIEESPFSVEESSTTPCPLLTGGRPLPTLEVKPPDRPSSKSKDPPREEEKEKKKKKHKKRSRTRSRSPKYHSSSKSRSRSHSKAKHSLPSAYRTVRRSRSRSRSPRRRAHSPERRREERSVPTAYRVSRSPGASRKRTRSRSPHEKKKKRRSRSRTKSKARSQSVSPSKQAAPRPAAPAAHSAHSASVSPVESRGSSQERSRGVSQEKEAQISSAIVSSVQSKITQDLMAKVRAMLAASKNLQTSAS

SEQ ID NO: 83640 - protein, 1003 aa, Homo sapiens
  Payload ID: 16646
  Gene Symbol: SFSWAP
  Gene Name: splicing factor, suppressor of white-apricot family
  Uniprot ID: Q12872
  ENSP ID: ENSP00000437738
MYGASGGRAKPERKSGAKEEAGPGGAGGGGSRVELLVFGYACKLFRDDERALAQEQGQHLIPWMGDHKILIDRYDGRGHLHDLSEYDAEYSTWNRDYQLSEEEARIEALCDEERYLALHTDLLEEEARQEEEYKRLSEALAEDGSYNAVGFTYGSDYYDPSEPTEEEEPSKQREKNEAENLEENEEPFVAPLGLSVPSDVELPPTAKMHAIIERTASFVCRQGAQFEIMLKAKQARNSQFDFLRFDHYLNPYYKFIQKAMKEGRYTVLAENKSDEKKKSGVSSDNEDDDDEEDGNYLHPSLFASKKCNRLEELMKPLKVVDPDHPLAALVRKAQADSSTPTPHNADGAPVQPSQVEYTADSTVAAMYYSYYMLPDGTYCLAPPPPGIDVTTYYSTLPAGVTVSNSPGVTTTAPPPPGTTPLPPPTTAETSSGATSTTTTTSALAPVAAIIPPPPDVQPVIDKLAEYVARNGLKFETSVRAKNDQRFEFLQPWHQYNAYYEFKKQFFLQKEGGDSMQAVSAPEEAPTDSAPEKPSDAGEDGAPEDAAEVGARAGSGGKKEASSSKTVPDGKLVKASFAPISFAIKAKENDLLPLEKNRVKLDDDSDDDEESKEGQESSSSAANTNPAVAPPCVVVEEKKPQLTQEELEAKQAKQKLEDRLAAAAREKLAQASKESKEKQLQAERKRKAALFLQTLKNPLPEAEAGKIEESPFSVEESSTTPCPLLTGGRPLPTLEVKPPDRPSSKSKDPPREEEKEKKKKKHKKRSRTRSRSPKYHSSSKSRSRSHSKAKHSLPSAYRTVRRSRVTASPGTLRAEPCQSSASVTAAAEPGSYQAASTTTRFDSASSFEGKPGKTSRSRSRSPRRRAHSPERRREERSVPTAYRVSRSPGASRKRTRSRSPHEKKKKRRSRSRTKSKARSQSVSPSKQAAPRPAAPAAHSAHSASVSPVESRGSSQERSRGVSQEKEAQISSAIVSSVQSKITQDLMAKVRAMLAASKNLQTSAS

SEQ ID NO: 83641 - protein, 320 aa, Homo sapiens
  Payload ID: 16646
  Gene Symbol: SFSWAP
  Gene Name: splicing factor, suppressor of white-apricot family
  ENSP ID: ENSP00000439957
  MOD_RES (1)..(1): Any amino acid
XTVAAMYYSYYMLPDGTYCLAPPPPGIDVTTYYSTLPAGVTVSNSPGVTTTAPPPPGTTPLPPPTTAETSSGATSTTTTTSALAPVAAIIPPPPDVQPVIDKLAEYVARNGLKFETSVRAKNDQRFEFLQPWHQYNAYYEFKKQFFLQKEGGDSMQAVSAPEEAPTDSAPEKPSDAGEDGAPEDAAEVGARAGSGGKKEASSSKTVPDGKLVKAKQKLEDRLAAAAREKLAQASKESKEKQLQAERKRKAALFLQTLKNPLPEAEAGKIEESPFSVEESSTTPCPLLTGGRPLPTLEVKPPDRPSSKSKDPPREEEKEKK

SEQ ID NO: 83642 - protein, 121 aa, Homo sapiens
  Payload ID: 16646
  Gene Symbol: SFSWAP
  Gene Name: splicing factor, suppressor of white-apricot family
  ENSP ID: ENSP00000445832
MYGASGGRAKPERKSGAKEEAGPGGAGGGGSRVELLVFGYACKLFRDDERALAQEQGQHLIPWMGDHKILIDRYDGRGHLHDLSEYDAEYSTWNRDYQLSEEEARIEALCDEERGRIQAIE

SEQ ID NO: 83643 - protein, 624 aa, Homo sapiens
  Payload ID: 16647
  Gene Symbol: SREK1
  Gene Name: splicing regulatory glutamine/lysine-rich protein 1
  Uniprot ID: Q8WXA9
  ENSP ID: ENSP00000334538
MNSGGGFGLGLGFGLTPTSVIQVTNLSSAVTSEQMRTLFSFLGEIEELRLYPPDNAPLAFSSKVCYVKFRDPSSVGVAQHLTNTVFIDRALIVVPCAEGKIPEESKALSLLAPAPTMTSLMPGAGLLPIPTPNPLTTLGVSLSSLGAIPAAALDPNIATLGEIPQPPLMGNVDPSKIDEIRRTVYVGNLNSQTTTADQLLEFFKQVGEVKFVRMAGDETQPTRFAFVEFADQNSVPRALAFNGVMFGDRPLKINHSNNAIVKPPEMTPQAAAKELEEVMKRVREAQSFISAAIEPESGKSNERKGGRSRSHTRSKSRSSSKSHSRRKRSQSKHRSRSHNRSRSRQKDRRRSKSPHKKRSKSRERRKSRSRSHSRDKRKDTREKIKEKERVKEKDREKEREREKEREKEKERGKNKDRDKEREKDREKDKEKDREREREKEHEKDRDKEKEKEQDKEKEREKDRSKEIDEKRKKDKKSRTPPRSYNASRRSRSSSRERRRRRSRSSSRSPRTSKTIKRKSSRSPSPRSRNKKDKKREKERDHISERRERERSTSMRKSSNDRDGKEKLEKNSTSLKEKEHNKEPDSSVSKEVDDKDAPRTEENKIQHNGNCQLNEENLSTKTEAV

SEQ ID NO: 83644 - protein, 508 aa, Homo sapiens
  Payload ID: 16647
  Gene Symbol: SREK1
  Gene Name: splicing regulatory glutamine/lysine-rich protein 1
  Uniprot ID: Q8WXA9
  ENSP ID: ENSP00000370305
MTSLMPGAGLLPIPTPNPLTTLGVSLSSLGAIPAAALDPNIATLGEIPQPPLMGNVDPSKIDEIRRTVYVGNLNSQTTTADQLLEFFKQVGEVKFVRMAGDETQPTRFAFVEFADQNSVPRALAFNGVMFGDRPLKINHSNNAIVKPPEMTPQAAAKELEEVMKRVREAQSFISAAIEPESGKSNERKGGRSRSHTRSKSRSSSKSHSRRKRSQSKHRSRSHNRSRSRQKDRRRSKSPHKKRSKSRERRKSRSRSHSRDKRKDTREKIKEKERVKEKDREKEREREKEREKEKERGKNKDRDKEREKDREKDKEKDREREREKEHEKDRDKEKEKEQDKEKEREKDRSKEIDEKRKKDKKSRTPPRSYNASRRSRSSSRERRRRRSRSSSRSPRTSKTIKRKSSRSPSPRSRNKKDKKREKERDHISERRERERSTSMRKSSNDRDGKEKLEKNSTSLKEKEHNKEPDSSVSKEVDDKDAPRTEENKIQHNGNCQLNEENLSTKTEAV

SEQ ID NO: 83645 - protein, 132 aa, Homo sapiens
  Payload ID: 16647
  Gene Symbol: SREK1
  Gene Name: splicing regulatory glutamine/lysine-rich protein 1
  ENSP ID: ENSP00000427935
MNSGGGFGLGLGFGLTPTSVIQVTNLSSAVTSEQMRTLFSFLGEIEELRLYPPDNAPLAFSSKVCYVKFRDPSSVGVAQHLTNTVFIDRALIVVPCAEVMQPTRTVVMCNTTFDHRENTVLGKRPCLISFGS

SEQ ID NO: 83646 - protein, 76 aa, Homo sapiens
  Payload ID: 16647
  Gene Symbol: SREK1
  Gene Name: splicing regulatory glutamine/lysine-rich protein 1
  ENSP ID: ENSP00000428272
MTSLMPGAGLLPIPTPNPLTTLGVSLSSLGAIPAAALDPNIATLGEIPQPPLMGNVDPSKIDEIRRTVYVGNLNSQ

SEQ ID NO: 83647 - protein, 42 aa, Homo sapiens
  Payload ID: 16647
  Gene Symbol: SREK1
  Gene Name: splicing regulatory glutamine/lysine-rich protein 1
  ENSP ID: ENSP00000428970
MNSGGGFGLGLGFGLTPTSVIQSSDSCSLCRSDAANTNGCHV

SEQ ID NO: 83648 - protein, 60 aa, Homo sapiens
  Payload ID: 16647
  Gene Symbol: SREK1
  Gene Name: splicing regulatory glutamine/lysine-rich protein 1
  ENSP ID: ENSP00000430894
  MOD_RES (1)..(1): Any amino acid
XINHSNNAIVKPPEMTPQAAAKELEEVMKRVREAQSFISAAIEPGWLHSTSLCNDFLGCF

SEQ ID NO: 83649 - protein, 100 aa, Homo sapiens
  Payload ID: 16647
  Gene Symbol: SREK1
  Gene Name: splicing regulatory glutamine/lysine-rich protein 1
  ENSP ID: ENSP00000481430
MNSGGGFGLGLGFGLTPTSVIQVTNLSSAVTSEQMRTLFSFLGEIEELRLYPPDNAPLAFSSKVCYVKFRDPSSVGVAQHLTNTVFIDRALIVVPCAEDD

SEQ ID NO: 83650 - protein, 70 aa, Homo sapiens
  Payload ID: 16648
  Gene Symbol: SHFM1
  Gene Name: split hand/foot malformation (ectrodactyly) type 1
  Uniprot ID: P60896
  ENSP ID: ENSP00000248566
MSEKKQPVDLGLLEEDDEFEEFPAEDWAGLDEDEDAHVWEDNWDDDNVEDDFSNQLRAELEKHGYKMETS

SEQ ID NO: 83651 - protein, 128 aa, Homo sapiens
  Payload ID: 16648
  Gene Symbol: SHFM1
  Gene Name: split hand/foot malformation (ectrodactyly) type 1
  Uniprot ID: Q6ZVN7
  ENSP ID: ENSP00000349114
MYCQDSNICAVFAVQGGKVGRKHGIKRGRRPSIRSPAQRARGPWIHESKHPAFAKQQINLEMPNSRATTELAWVCSSTSRKKKWARSLTLSTAPLSPPPSLVHCEDCSCLPGCHSGDLYNLAPAERTC

SEQ ID NO: 83652 - protein, 62 aa, Homo sapiens
  Payload ID: 16648
  Gene Symbol: SHFM1
  Gene Name: split hand/foot malformation (ectrodactyly) type 1
  ENSP ID: ENSP00000390049
MSEKKQPVDLGLLEEDDEFEEFPAEDWAGLDEDEDAHVWEDNWDDDNVEDDFSNQLRCEKKP

SEQ ID NO: 83653 - protein, 89 aa, Homo sapiens
  Payload ID: 16648
  Gene Symbol: SHFM1
  Gene Name: split hand/foot malformation (ectrodactyly) type 1
  ENSP ID: ENSP00000392852
MSEKKQPVDLGLLEEDDEFEEFPAEDWAGLDEDEDAHVWEDNWDDDNVEDDFSNQLRATVLLMILVCETPYGCYVLHQKGRMCSAFLCC

SEQ ID NO: 83654 - protein, 89 aa, Homo sapiens; identical to SEQ ID NO: 83653
  Payload ID: 16648
  Gene Symbol: SHFM1
  Gene Name: split hand/foot malformation (ectrodactyly) type 1
  ENSP ID: ENSP00000409481

SEQ ID NO: 83655 - protein, 65 aa, Homo sapiens
  Payload ID: 16648
  Gene Symbol: SHFM1
  Gene Name: split hand/foot malformation (ectrodactyly) type 1
  ENSP ID: ENSP00000416322
MSEKKQPVDLGLLEEDDEFEEFPAEDWAGLDEDEDAHVWEDNWDDDNVEDDFSNQLRAGYSELEE

SEQ ID NO: 83656 - protein, 30 aa, Homo sapiens
  Payload ID: 16648
  Gene Symbol: SHFM1
  Gene Name: split hand/foot malformation (ectrodactyly) type 1
  ENSP ID: ENSP00000478651
MSEKKQPVDLGLLEEDDEFEEFPAEGQLYS

SEQ ID NO: 83657 - protein, 61 aa, Homo sapiens
  Payload ID: 16648
  Gene Symbol: SHFM1
  Gene Name: split hand/foot malformation (ectrodactyly) type 1
  ENSP ID: ENSP00000480885
MSEKKQPVDLGLLEEDDEFEEFPAEDWAGLDEDEDAHVWEDNWDDDNVEDDFSNQLRSQNG

SEQ ID NO: 83658 - protein, 118 aa, Homo sapiens
  Payload ID: 16648
  Gene Symbol: SHFM1
  Gene Name: split hand/foot malformation (ectrodactyly) type 1
  ENSP ID: ENSP00000481021
MYCQDSNICAVFAVQGGKVGRKHGIKRGRRPSIRSPAQRARGPWIHESKHPAFAKQQINLEMPNSRATTELAWVCRSLTLSTAPLSPPPSLVHCEDCSCLPGCHSGDLYNLAPAERTC

SEQ ID NO: 83659 - protein, 61 aa, Homo sapiens; identical to SEQ ID NO: 83657
  Payload ID: 16648
  Gene Symbol: SHFM1
  Gene Name: split hand/foot malformation (ectrodactyly) type 1
  ENSP ID: ENSP00000481400

SEQ ID NO: 83660 - protein, 66 aa, Homo sapiens
  Payload ID: 16648
  Gene Symbol: SHFM1
  Gene Name: split hand/foot malformation (ectrodactyly) type 1
  ENSP ID: ENSP00000482085
MSEKKQPVDLGLLEEDDEFEEFPAEDWAGLDEDEDAHVWEDNWDDDNVEDDFSNQLRDMGNVSISV

SEQ ID NO: 83661 - protein, 89 aa, Homo sapiens
  Payload ID: 16648
  Gene Symbol: SHFM1
  Gene Name: split hand/foot malformation (ectrodactyly) type 1
  ENSP ID: ENSP00000484478
MSEKKQPVDLGLLEEDDEFEEFPAEDWAGLDEDEDAHVWEDNWDDDNVEDDFSNQLRHGHASAGLLQEKLLGEEPRWPNRNSSSLQLPA

SEQ ID NO: 83662 - protein, 58 aa, Homo sapiens
  Payload ID: 16648
  Gene Symbol: SHFM1
  Gene Name: split hand/foot malformation (ectrodactyly) type 1
  ENSP ID: ENSP00000484726
MSEKKQPVDLGLLEEDDEFEEFPAEDWAGLDEDEDAHVWEDNWDDDNVEDDFSNQLRS

SEQ ID NO: 83663 - protein, 57 aa, Homo sapiens
  Payload ID: 16648
  Gene Symbol: SHFM1
  Gene Name: split hand/foot malformation (ectrodactyly) type 1
  ENSP ID: ENSP00000485341
MSEKKQPVDLGLLEEDDEFEEFPAEDWAGLDEDEDAHVWEDNWDDDNVEDDFSNQLR

SEQ ID NO: 83664 - protein, 120 aa, Homo sapiens
  Payload ID: 16648
  Gene Symbol: SHFM1
  Gene Name: split hand/foot malformation (ectrodactyly) type 1
  ENSP ID: ENSP00000485353
MSEKKQPVDLGLLEEDDEFEEFPAEDWAGLDEDEDAHVWEDNWDDDNVEDDFSNQLRHSIISTHKRWHSARLRRCPPPFPESRPSLTHTRTTEASPLVLLLVTPPQLPLIHPSIYPAWVM

SEQ ID NO: 83665 - protein, 358 aa, Homo sapiens
  Payload ID: 16649
  Gene Symbol: SPO11
  Gene Name: SPO11 meiotic protein covalently bound to DSB
  Uniprot ID: Q9Y5K1
  ENSP ID: ENSP00000316034
MAFAPMGPEASFFDVLDRHRESLLAALRRGGREPPTGGSRLASRFEDSVGLQMVSHCTTRKIKSDSPKSAQKFSLILKILSMIYKLVQSNTYATKRDIYYTDSQLFGNQTVVDNIINDISCMLKVSRRSLHILSTSKGLIAGNLRYIEEDGTKVNCTCGATAVAVPSNIQGIRNLVTDAKFVLIVEKDATFQRLLDDNFCNKLSPCIMITGKGVPDLNTRLLVKKLWDTFHVPVFTLVDADPHGIEIMCIYKYGSMSMSFEAHHLTVPAIRWLGLLPSDLKRLNVPKDSLIPLTKRDQMKLDSILRRPYVTCQPFWRKEMEIMADSKMKAEIQALTFLSSDYLSRVYLPNKLKFGGWI

SEQ ID NO: 83666 - protein, 354 aa, Homo sapiens
  Payload ID: 16649
  Gene Symbol: SPO11
  Gene Name: SPO11 meiotic protein covalently bound to DSB
  ENSP ID: ENSP00000360307
MAFAPMGPEASFFDVLDRHRESLLAALRRGGREPPTGGSRLASRFEDSVGLQMVSHCTTRKIKSDSPKSAQKFSLILKILSMIYKLVQSNTYATKRDIYYTDSQLFGNQTVVDNIINDISCMLKVSRRSLHILSTSKGLIAGNLRYIEEDGTKVNCTCGATAVAVPSNIQGIRNAKFVLIVEKDATFQRLLDDNFCNKLSPCIMITGKGVPDLNTRLLVKKLWDTFHVPVFTLVDADPHGIEIMCIYKYGSMSMSFEAHHLTVPAIRWLGLLPSDLKRLNVPKDSLIPLTKRDQMKLDSILRRPYVTCQPFWRKEMEIMADSKMKAEIQALTFLSSDYLSRVYLPNKLKFGGWI

SEQ ID NO: 83667 - protein, 396 aa, Homo sapiens
  Payload ID: 16649
  Gene Symbol: SPO11
  Gene Name: SPO11 meiotic protein covalently bound to DSB
  Uniprot ID: Q9Y5K1
  ENSP ID: ENSP00000360310
MAFAPMGPEASFFDVLDRHRESLLAALRRGGREPPTGGSRLASSSEVLASIENIIQDIITSLARNEAPAFTIDNRSSWENIKFEDSVGLQMVSHCTTRKIKSDSPKSAQKFSLILKILSMIYKLVQSNTYATKRDIYYTDSQLFGNQTVVDNIINDISCMLKVSRRSLHILSTSKGLIAGNLRYIEEDGTKVNCTCGATAVAVPSNIQGIRNLVTDAKFVLIVEKDATFQRLLDDNFCNKLSPCIMITGKGVPDLNTRLLVKKLWDTFHVPVFTLVDADPHGIEIMCIYKYGSMSMSFEAHHLTVPAIRWLGLLPSDLKRLNVPKDSLIPLTKRDQMKLDSILRRPYVTCQPFWRKEMEIMADSKMKAEIQALTFLSSDYLSRVYLPNKLKFGGWI

SEQ ID NO: 83668 - protein, 270 aa, Homo sapiens
  Payload ID: 16649
  Gene Symbol: SPO11
  Gene Name: SPO11 meiotic protein covalently bound to DSB
  ENSP ID: ENSP00000413185
LLAALRRGGREPPTGGSRLASSSEVLASIENIIQDIITSLARNEAPAFTIDNRSSWENIKFEDSVGLQMVSHCTTRKIKSDSPKSAQKFSLILKILSMIYKLVQSNTYATKRDIYYTDSQLFGNQTVVDNIINDISCMLKVSRRSLHILSTSKGLIAGNLRYIEEDGTKVNCTCGATAVAVPSNIQGIRITDAKFVLIVEKDATFQRLLDDNFCNKLSPCIMITGKGVPDLNTRLLVKKLWDTFHVPVFTLVDADPHGIEIMCIYKYGSM

SEQ ID NO: 83669 - protein, 123 aa, Homo sapiens
  Payload ID: 16649
  Gene Symbol: SPO11
  Gene Name: SPO11 meiotic protein covalently bound to DSB
  ENSP ID: ENSP00000431842
LSTSKGLIAGNLRYIEEDGTKVNCTCGATAVAVPSNIQGIRNLVTDAKFVLIVEKDATFQRLLDDNFCNKLSPCIMITSTPVFQHLKSKGKGVPDLNTRLLVKKLWDTFHVPVFTLVDADPHD

SEQ ID NO: 83670 - protein, 696 aa, Homo sapiens
  Payload ID: 16650
  Gene Symbol: SPOCD1
  Gene Name: SPOC domain containing 1
  Uniprot ID: Q6ZMY3
  ENSP ID: ENSP00000257100
MEVSSPSPAQRLRRKKRPMVQGPAGCQVFQPSPSGGTAGDPGGLSDPFYPPRSGSLALGDPSSDPACSQSGPMEAEEDSLPEQPEDSAQLQQEKPSLYIGVRGTVVRSMQEVLWTRLRELPDPVLSEEVVEGIAAGIEAALWDLTQGTNGRYKTKYRSLLFNLRDPRNLDLFLKVVHGDVTPYDLVRMSSMQLAPQELARWRDQEEKRGLNIIEQQQKEPCRLPASKMTHKGEVEIQRDMDQTLTLEDLVGPQMFMDCSPQALPIASEDTTGQHDHHFLDPNCHICKDWEPSNELLGSFEAAKSCGDNIFQKALSQTPMPAPEMPKTRELSPTEPQDRVPPSGLHVPAAPTKALPCLPPWEGVLDMFSIKRFRARAQLVSGHSCRLVQALPTVIRSAGCIPSNIVWDLLASICPAKAKDVCVVRLCPHGARDTQNCRLLYSYLNDRQRHGLASVEHMGMVLLPLPAFQPLPTRLRPLGGPGLEVTHSSLLLAVLLPKEGLPDTAGSSPWLGKVQKMVSFNSKVEKRYYQPDDRRPNVPLKGTPPPGGAWQQSQGRGSIAPRGISAWQRPPRGRGRLWPEPENWQHPGRGQWPPEPGLRQSQHPYSVAPAGHGFGRGQHFHRDSCPHQALLRHLESLATMSHQLQALLCPQTKSSIPRPLQRLSSALAAPEPPGPARDSSLGPTDEAGSECPFPRKA

SEQ ID NO: 83671 - protein, 1216 aa, Homo sapiens
  Payload ID: 16650
  Gene Symbol: SPOCD1
  Gene Name: SPOC domain containing 1
  Uniprot ID: Q6ZMY3
  ENSP ID: ENSP00000353670
MSQAGDVEGPSTGDPVLSPQHNCELLQNMEGASSMPGLSPDGPGASSGPGVRAGSRRKIPRKEALRGGSSRAAGAAEVRPGVLELLAVVQSRGSMLAPGLHMQLPSVPTQGRALTSKRLQVSLCDILDDSCPRKLCSRSAGLPERALACRERLAGVEEVSCLRPREARDGGMSSPGCDRRSPTLSKEEPPGRPLTSSPDPVPVRVRKKWRRQGAHSECEEGAGDFLWLDQSPRGDNLLSVGDPPQVADLESLGGPCRPPSPKDTGSGPGEPGGSGAGCASGTEKFGYLPATGDGPQPGSPCGPVGFPVPSGGESLSSAAQAPPQSAALCLGASAQASAEQQEAVCVVRTGSDEGQAPAQDQEELEAKAQPASRGRLEQGLAAPADTCASSREPLGGLSSSLDTEASRACSGPFMEQRRSKGTKNLKKGPVPCAQDRGTDRSSDNSHQDRPEEPSPGGCPRLEEVKIPHGVKLVCYLGSGPVIQLLGAISHGQAGGQLPPKLEVLEDLMEVSSPSPAQRLRRKKRPMVQGPAGCQVFQPSPSGGTAGDPGGLSDPFYPPRSGSLALGDPSSDPACSQSGPMEAEEDSLPEQPEDSAQLQQEKPSLYIGVRGTVVRSMQEVLWTRLRELPDPVLSEEVVEGIAAGIEAALWDLTQGTNGRYKTKYRSLLFNLRDPRNLDLFLKVVHGDVTPYDLVRMSSMQLAPQELARWRDQEEKRGLNIIEQQQKEPCRLPASKMTHKGEVEIQRDMDQTLTLEDLVGPQMFMDCSPQALPIASEDTTGQHDHHFLDPNCHICKDWEPSNELLGSFEAAKSCGDNIFQKALSQTPMPAPEMPKTRELSPTEPQDRVPPSGLHVPAAPTKALPCLPPWEGVLDMFSIKRFRARAQLVSGHSCRLVQALPTVIRSAGCIPSNIVWDLLASICPAKAKDVCVVRLCPHGARDTQNCRLLYSYLNDRQRHGLASVEHMGMVLLPLPAFQPLPTRLRPLGGPGLWALPVSPLLSPGLEVTHSSLLLAVLLPKEGLPDTAGSSPWLGKVQKMVSFNSKVEKRYYQPDDRRPNVPLKGTPPPGGAWQQSQGRGSIAPRGISAWQRPPRGRGRLWPEPENWQHPGRGQWPPEPGLRQSQHPYSVAPAGHGFGRGQHFHRDSCPHQALLRHLESLATMSHQLQALLCPQTKSSIPRPLQRLSSALAAPEPPGPARDSSLGPTDEAGSECPFPRKA

SEQ ID NO: 83672 - protein, 639 aa, Homo sapiens
  Payload ID: 16650
  Gene Symbol: SPOCD1
  Gene Name: SPOC domain containing 1
  ENSP ID: ENSP00000399778
MILFPPHGVGVRISRFLQGNTHDRNKLAQTLPPTQLPPSGTKCLESLLGSVPPPCPGLHSLRELPDPVLSEEVVEGIAAGIEAALWDLTQGTNGRYKTKYRSLLFNLRDPRNLDLFLKVVHGDVTPYDLVRMSSMQLAPQELARWRDQEEKRGLNIIEQQQKEPCRLPASKMTHKGEVEIQRDMDQTLTLEDLGPQMFMDCSPQALPIASEDTTGQHDHHFLDPNCHICKDWEPSNELLGSFEAAKSCGDNIFQKALSQTPMPAPEMPKTRELSPTEPQDRVPPSGLHVPAAPTKALPCLPPWEGVLDMFSIKRFRARAQLVSGHSCRLVQALPTVIRSAGCIPSNIVWDLLASICPAKAKDVCVVRLCPHGARDTQNCRLLYSYLNDRQRHGLASVEHMGMVLLPLPAFQPLPTRLRPLGGPGLEVTHSSLLLAVLLPKEGLPDTAGSSPWLGKVQKMVSFNSKVEKRYYQPDDRRPNVPLKGTPPPGGAWQQSQGRGSIAPRGISAWQRPPRGRGRLWPEPENWQHPGRGQWPPEPGLRQSQHPYSVAPAGHGFGRGQHFHRDSCPHQALLRHLESLATMSHQLQALLCPQTKSSIPRPLQRLSSALAAPEPPGPARDSSLGPTDEAGSECPFPRKA

SEQ ID NO: 83673 - protein, 87 aa, Homo sapiens
  Payload ID: 16650
  Gene Symbol: SPOCD1
  Gene Name: SPOC domain containing 1
  ENSP ID: ENSP00000435385
MEVSSPSPAQRLRRKKRPMVQGPAGCQVFQPSPSGGTAGDPGGLSDPFYPPRSGSLALGDPSSDPACSQSGPMEAEEDSLPEQPEDS

SEQ ID NO: 83674 - protein, 1203 aa, Homo sapiens
  Payload ID: 16650
  Gene Symbol: SPOCD1
  Gene Name: SPOC domain containing 1
  Uniprot ID: Q6ZMY3
  ENSP ID: ENSP00000435851
MSQAGDVEGPSTGDPVLSPQHNCELLQNMEGASSMPGLSPDGPGASSGPGVRAGSRRKIPRKEALRGGSSRAAGAAEVRPGVLELLAVVQSRGSMLAPGLHMQLPSVPTQGRALTSKRLQVSLCDILDDSCPRKLCSRSAGLPERALACRERLAGVEEVSCLRPREARDGGMSSPGCDRRSPTLSKEEPPGRPLTSSPDPVPVRVRKKWRRQGAHSECEEGAGDFLWLDQSPRGDNLLSVGDPPQVADLESLGGPCRPPSPKDTGSGPGEPGGSGAGCASGTEKFGYLPATGDGPQPGSPCGPVGFPVPSGGESLSSAAQAPPQSAALCLGASAQASAEQQEAVCVVRTGSDEGQAPAQDQEELEAKAQPASRGRLEQGLAAPADTCASSREPLGGLSSSLDTEASRACSGPFMEQRRSKGTKNLKKGPVPCAQDRGTDRSSDNSHQDRPEEPSPGGCPRLEEVKIPHGVKLVCYLGSGPVIQLLGAISHGQAGGQLPPKLEVLEDLMEVSSPSPAQRLRRKKRPMVQGPAGCQVFQPSPSGGTAGDPGGLSDPFYPPRSGSLALGDPSSDPACSQSGPMEAEEDSLPEQPEDSAQLQQEKPSLYIGVRGTVVRSMQEVLWTRLRELPDPVLSEEVVEGIAAGIEAALWDLTQGTNGRYKTKYRSLLFNLRDPRNLDLFLKVVHGDVTPYDLVRMSSMQLAPQELARWRDQEEKRGLNIIEQQQKEPCRLPASKMTHKGEVEIQRDMDQTLTLEDLVGPQMFMDCSPQALPIASEDTTGQHDHHFLDPNCHICKDWEPSNELLGSFEAAKSCGDNIFQKALSQTPMPAPEMPKTRELSPTEPQDRVPPSGLHVPAAPTKALPCLPPWEGVLDMFSIKRFRARAQLVSGHSCRLVQALPTVIRSAGCIPSNIVWDLLASICPAKAKDVCVVRLCPHGARDTQNCRLLYSYLNDRQRHGLASVEHMGMVLLPLPAFQPLPTRLRPLGGPGLEVTHSSLLLAVLLPKEGLPDTAGSSPWLGKVQKMVSFNSKVEKRYYQPDDRRPNVPLKGTPPPGGAWQQSQGRGSIAPRGISAWQRPPRGRGRLWPEPENWQHPGRGQWPPEPGLRQSQHPYSVAPAGHGFGRGQHFHRDSCPHQALLRHLESLATMSHQLQALLCPQTKSSIPRPLQRLSSALAAPEPPGPARDSSLGPTDEAGSECPFPRKA

SEQ ID NO: 83675 - protein, 20 aa, Homo sapiens
  Payload ID: 16650
  Gene Symbol: SPOCD1
  Gene Name: SPOC domain containing 1
  ENSP ID: ENSP00000436239
MEVSSPSPAQRLRRKKRPMV

SEQ ID NO: 83676 - protein, 255 aa, Homo sapiens
  Payload ID: 16650
  Gene Symbol: SPOCD1
  Gene Name: SPOC domain containing 1
  ENSP ID: ENSP00000437197
  MOD_RES (1)..(1): Any amino acid
XDRNKLAQTLPPTQLPPSGTKCLESLLGSVPPPCPGLHSLRELPDPVLSEEVVEGIAAGIEAALWDLTQGTNGRYKTKYRSLLFNLRDPRNLDLFLKVVHGDVTPYDLVRMSSMQLAPQELARWRDQEEKRGPQMFMDCSPQALPIASEDTTGQHDHHFLDPNCHICKDWEPSNELLGSFEAAKSCGDNIFQKALSQTPMPAPEMPKTRELSPTEPQDRVPPSGLHVPAAPTKALPCLPPWEGVLDMFSIKRFRA

SEQ ID NO: 83677 - protein, 43 aa, Homo sapiens
  Payload ID: 16650
  Gene Symbol: SPOCD1
  Gene Name: SPOC domain containing 1
  ENSP ID: ENSP00000437270
MEAEEDSLPEQPEDSAQLQQEKPSLYIGVRGTVVRSMQEVLWT

SEQ ID NO: 83678 - protein, 807 aa, Homo sapiens
  Payload ID: 16651
  Gene Symbol: SPON1
  Gene Name: spondin 1, extracellular matrix protein
  Uniprot ID: Q9HCB6
  ENSP ID: ENSP00000460236
MRLSPAPLKLSRTPALLALALPLAAALAFSDETLDKVPKSEGYCSRILRAQGTRREGYTEFSLRVEGDPDFYKPGTSYRVTLSAAPPSYFRGFTLIALRENREGDKEEDHAGTFQIIDEEETQFMSNCPVAVTESTPRRRTRIQVFWIAPPAGTGCVILKASIVQKRIIYFQDEGSLTKKLCEQDSTFDGVTDKPILDCCACGTAKYRLTFYGNWSEKTHPKDYPRRANHWSAIIGGSHSKNYVLWEYGGYASEGVKQVAELGSPVKMEEEIRQQSDEVLTVIKAKAQWPAWQPLNVRAAPSAEFSVDRTRHLMSFLTMMGPSPDWNVGLSAEDLCTKECGWVQKVVQDLIPWDAGTDSGVTYESPNKPTIPQEKIRPLTSLDHPQSPFYDPEGGSITQVARVVIERIARKGEQCNIVPDNVDDIVADLAPEEKDEDDTPETCIYSNWSPWSACSSSTCDKGKRMRQRMLKAQLDLSVPCPDTQDFQPCMGPGCSDEDGSTCTMSEWITWSPCSISCGMGMRSRERYVKQFPEDGSVCTLPTEETEKCTVNEECSPSSCLMTEWGEWDECSATCGMGMKKRHRMIKMNPADGSMCKAETSQAEKCMMPECHTIPCLLSPWSEWSDCSVTCGKGMRTRQRMLKSLAELGDCNEDLEQVEKCMLPECPIDCELTEWSQWSECNKSCGKGHVIRTRMIQMEPQFGGAPCPETVQRKKCRIRKCLRNPSIQKLRWREARESRRSEQLKEESEGEQFPGCRMRPWTAWSECTKLCGGGIQERYMTVKKRFKSSQFTSCKDKKEIRACNVHPC

SEQ ID NO: 83679 - protein, 331 aa, Homo sapiens
  Payload ID: 16652
  Gene Symbol: SPON2
  Gene Name: spondin 2, extracellular matrix protein
  Uniprot ID: Q9BUD6
  ENSP ID: ENSP00000290902
MENPSPAAALGKALCALLLATLGAAGQPLGGESICSARALAKYSITFTGKWSQTAFPKQYPLFRPPAQWSSLLGAAHSSDYSMWRKNQYVSNGLRDFAERGEAWALMKEIEAAGEALQSVHAVFSAPAVPSGTGQTSAELEVQRRHSLVSFVVRIVPSPDWFVGVDSLDLCDGDRWREQAALDLYPYDAGTDSGFTFSSPNFATIPQDTVTEITSSSPSHPANSFYYPRLKALPPIARVTLVRLRQSPRAFIPPAPVLPSRDNEIVDSASVPETPLDCEVSLWSSWGLCGGHCGRLGTKSRTRYVRVQPANNGSPCPELEEEAECVPDNCV

SEQ ID NO: 83680 - protein, 331 aa, Homo sapiens; identical to SEQ ID NO: 83679
  Payload ID: 16652
  Gene Symbol: SPON2
  Gene Name: spondin 2, extracellular matrix protein
  Uniprot ID: Q9BUD6
  ENSP ID: ENSP00000394832

SEQ ID NO: 83681 - protein, 16 aa, Homo sapiens
  Payload ID: 16652
  Gene Symbol: SPON2
  Gene Name: spondin 2, extracellular matrix protein
  ENSP ID: ENSP00000421379
MENPSPAAALGKALCA

SEQ ID NO: 83682 - protein, 24 aa, Homo sapiens
  Payload ID: 16652
  Gene Symbol: SPON2
  Gene Name: spondin 2, extracellular matrix protein
  ENSP ID: ENSP00000421634
MENPSPAAALGKALCALLLATLGA

SEQ ID NO: 83683 - protein, 7 aa, Homo sapiens
  Payload ID: 16652
  Gene Symbol: SPON2
  Gene Name: spondin 2, extracellular matrix protein
  ENSP ID: ENSP00000421858
MENPSPA

SEQ ID NO: 83684 - protein, 61 aa, Homo sapiens
  Payload ID: 16652
  Gene Symbol: SPON2
  Gene Name: spondin 2, extracellular matrix protein
  ENSP ID: ENSP00000422516
MENPSPAAALGKALCALLLATLGAAGQPLGGESICSARALAKYSITFTGKWSQTAFPKQYP

SEQ ID NO: 83685 - protein, 15 aa, Homo sapiens
  Payload ID: 16652
  Gene Symbol: SPON2
  Gene Name: spondin 2, extracellular matrix protein
  ENSP ID: ENSP00000423414
MENPSPAAALGKALC

SEQ ID NO: 83686 - protein, 108 aa, Homo sapiens
  Payload ID: 16652
  Gene Symbol: SPON2
  Gene Name: spondin 2, extracellular matrix protein
  ENSP ID: ENSP00000424542
MENPSPAAALGKALCALLLATLGAAGQPLGGESICSARALAKYSITFTGKWSQTAFPKQYPLFRPPAQWSSLLGAAHSSDYSMWRKNQYVSNGLRDFAERGEAWALMK

SEQ ID NO: 83687 - protein, 64 aa, Homo sapiens
  Payload ID: 16652
  Gene Symbol: SPON2
  Gene Name: spondin 2, extracellular matrix protein
  ENSP ID: ENSP00000425871
MENPSPAAALGKALCALLLATLGAAGQPLGGESICSARALAKYSITFTGKWSQTAFPKQYPLFR

SEQ ID NO: 83688 - protein, 331 aa, Homo sapiens; identical to SEQ ID NO: 83679
  Payload ID: 16652
  Gene Symbol: SPON2
  Gene Name: spondin 2, extracellular matrix protein
  Uniprot ID: Q9BUD6
  ENSP ID: ENSP00000483599

SEQ ID NO: 83689 - protein, 319 aa, Homo sapiens
  Payload ID: 16653
  Gene Symbol: SPRY1
  Gene Name: sprouty RTK signaling antagonist 1
  Uniprot ID: O43609
  ENSP ID: ENSP00000343785
MDPQNQHGSGSSLVVIQQPSLDSRQRLDYEREIQPTAILSLDQIKAIRGSNEYTEGPSVVKRPAPRTAPRQEKHERTHEIIPINVNNNYEHRHTSHLGHAVLPSNARGPILSRSTSTGSAASSGSNSSASSEQGLLGRSPPTRPVPGHRSERAIRTQPKQLIVDDLKGSLKEDLTQHKFICEQCGKCKCGECTAPRTLPSCLACNRQCLCSAESMVEYGTCMCLVKGIFYHCSNDDEGDSYSDNPCSCSQSHCCSRYLCMGAMSLFLPCLLCYPPAKGCLKLCRRCYDWIHRPGCRCKNSNTVYCKLESCPSRGQGKPS

SEQ ID NO: 83690 - protein, 319 aa, Homo sapiens; identical to SEQ ID NO: 83689
  Payload ID: 16653
  Gene Symbol: SPRY1
  Gene Name: sprouty RTK signaling antagonist 1
  Uniprot ID: O43609
  ENSP ID: ENSP00000377871

SEQ ID NO: 83691 - protein, 209 aa, Homo sapiens
  Payload ID: 16653
  Gene Symbol: SPRY1
  Gene Name: sprouty RTK signaling antagonist 1
  ENSP ID: ENSP00000421036
MDPQNQHGSGSSLVVIQQPSLDSRQRLDYEREIQPTAILSLDQIKAIRGSNEYTEGPSVVKRPAPRTAPRQEKHERTHEIIPINVNNNYEHRHTSHLGHAVLPSNARGPILSRSTSTGSAASSGSNSSASSEQGLLGRSPPTRPVPGHRSERAIRTQPKQLIVDDLKGSLKEDLTQHKFICEQCGKCKCGECTAPRTLPSCLACNRQCL

SEQ ID NO: 83692 - protein, 67 aa, Homo sapiens
  Payload ID: 16653
  Gene Symbol: SPRY1
  Gene Name: sprouty RTK signaling antagonist 1
  ENSP ID: ENSP00000421622
MDPQNQHGSGSSLVVIQQPSLDSRQRLDYEREIQPTAILSLDQIKAIRGSNEYTEGPSVVKRPAPRT

SEQ ID NO: 83693 - protein, 35 aa, Homo sapiens
  Payload ID: 16653
  Gene Symbol: SPRY1
  Gene Name: sprouty RTK signaling antagonist 1
  ENSP ID: ENSP00000425946
MDPQNQHGSGSSLVVIQQPSLDSRQRLDYEREIQP

SEQ ID NO: 83694 - protein, 319 aa, Homo sapiens; identical to SEQ ID NO: 83689
  Payload ID: 16653
  Gene Symbol: SPRY1
  Gene Name: sprouty RTK signaling antagonist 1
  Uniprot ID: O43609
  ENSP ID: ENSP00000480540

SEQ ID NO: 83695 - protein, 319 aa, Homo sapiens; identical to SEQ ID NO: 83689
  Payload ID: 16653
  Gene Symbol: SPRY1
  Gene Name: sprouty RTK signaling antagonist 1
  Uniprot ID: O43609
  ENSP ID: ENSP00000481675

SEQ ID NO: 83696 - protein, 315 aa, Homo sapiens
  Payload ID: 16654
  Gene Symbol: SPRY2
  Gene Name: sprouty RTK signaling antagonist 2
  Uniprot ID: O43597
  ENSP ID: ENSP00000366306
MEARAQSGNGSQPLLQTPRDGGRQRGEPDPRDALTQQVHVLSLDQIRAIRNTNEYTEGPTVVPRPGLKPAPRPSTQHKHERLHGLPEHRQPPRLQHSQVHSSARAPLSRSISTVSSGSRSSTRTSTSSSSSEQRLLGSSFSSGPVADGIIRVQPKSELKPGELKPLSKEDLGLHAYRCEDCGKCKCKECTYPRPLPSDWICDKQCLCSAQNVIDYGTCVCCVKGLFYHCSNDDEDNCADNPCSCSQSHCCTRWSAMGVMSLFLPCLWCYLPAKGCLKLCQGCYDRVNRPGCRCKNSNTVCCKVPTVPPRNFEKPT

SEQ ID NO: 83697 - protein, 315 aa, Homo sapiens; identical to SEQ ID NO: 83696
  Payload ID: 16654
  Gene Symbol: SPRY2
  Gene Name: sprouty RTK signaling antagonist 2
  Uniprot ID: O43597
  ENSP ID: ENSP00000366308

SEQ ID NO: 83698 - protein, 353 aa, Homo sapiens
  Payload ID: 16654
  Gene Symbol: SPRY2
  Gene Name: sprouty RTK signaling antagonist 2
  ENSP ID: ENSP00000439027
MEARAQSGNGSQPLLQTPRDGGRQRGEPDPRDALTQQVHVLSLDQIRAIRNTNEYTEGPTVVPRPGLKPAPRPSTQHKHERLHGLPEHRQPPRLQHSQVHSSARAPLSRSISTVSSGSRSSTRTSTSSSSSEQRLLGSSFSSGPVADGIIRVQPKSELKPGELKPLSKEDLGLHAYRCEDCGKCKCKECTYPRPLPSDWICDKQCLCSAQNVIDYGTCVCCVKGLFYHCSNDDEDNCADNPCSCSQSHCCTRWSAMGVMSLFLPCLWCYLPAKGCLKLCQGCYDRVNRPGCRCKNSNTVCCKVPTVPPRTLKNQHSIINQEYYSNEDFFFLFLIHICNQLNSYNLGTVNRKVG

SEQ ID NO: 83699 - protein, 288 aa, Homo sapiens
  Payload ID: 16655
  Gene Symbol: SPRY3
  Gene Name: sprouty RTK signaling antagonist 3
  Uniprot ID: O43610
  ENSP ID: ENSP00000302978
MDAAVTDDFQQILPIEQLRSTHASNDYVERPPAPCKQALSSPSLIVQTHKSDWSLATMPTSLPRSLSQCHQLQPLPQHLSQSSIASSMSHSTTASDQRLLASITPSPSGQSIIRTQPGAGVHPKADGALKGEAEQSAGHPSEHLFICEECGRCKCVPCTAARPLPSCWLCNQRCLCSAESLLDYGTCLCCVKGLFYHCSTDDEDNCADEPCSCGPSSCFVRWAAMSLISLFLPCLCCYLPTRGCLHLCQQGYDSLRRPGCRCKRHTNTVCRKISSGSAPFPKAQEKSV

SEQ ID NO: 83700 - protein, 322 aa, Homo sapiens
  Payload ID: 16656
  Gene Symbol: SPRY4
  Gene Name: sprouty RTK signaling antagonist 4
  ENSP ID: ENSP00000344967
MLSPLPTGPLEACFSVQSRTSSPMEPPIPQSAPLTPNSVMVQPLLDSRMSHSRLQHPLTILPIDQVKTSHVENDYIDNPSLALTTGPKRTRGGAPELAPTPARCDQDVTHHWISFSGRPSSVSSSSSTSSDQRLLDHMAPPPVADQASPRAVRIQPKVVHCQPLDLKGPAVPPELDKHFLLCEACGKCKCKECASPRTLPSCWVCNQECLCSAQTLVNYGTCMCLVQGIFYHCTNEDDEGSCADHPCSCSRSNCCARWSFMGALSVVLPCLLCYLPATGCVKLAQRGYDRLRRPGCRCKHTNSVICKAASGDAKTSRPDKPF

SEQ ID NO: 83701 - protein, 299 aa, Homo sapiens
  Payload ID: 16656
  Gene Symbol: SPRY4
  Gene Name: sprouty RTK signaling antagonist 4
  Uniprot ID: Q9C004
  ENSP ID: ENSP00000399468
MEPPIPQSAPLTPNSVMVQPLLDSRMSHSRLQHPLTILPIDQVKTSHVENDYIDNPSLALTTGPKRTRGGAPELAPTPARCDQDVTHHWISFSGRPSSVSSSSSTSSDQRLLDHMAPPPVADQASPRAVRIQPKVVHCQPLDLKGPAVPPELDKHFLLCEACGKCKCKECASPRTLPSCWVCNQECLCSAQTLVNYGTCMCLVQGIFYHCTNEDDEGSCADHPCSCSRSNCCARWSFMGALSVVLPCLLCYLPATGCVKLAQRGYDRLRRPGCRCKHTNSVICKAASGDAKTSRPDKPF

SEQ ID NO: 83702 - protein, 50 aa, Homo sapiens
  Payload ID: 16656
  Gene Symbol: SPRY4
  Gene Name: sprouty RTK signaling antagonist 4
  ENSP ID: ENSP00000424411
MEPPIPQSAPLTPNSVMVQPLLDSRMSHSRLQHPLTILPIDQVKTSHVEN

SEQ ID NO: 83703 - protein, 444 aa, Homo sapiens
  Payload ID: 16657
  Gene Symbol: SPRED1
  Gene Name: sprouty-related, EVH1 domain containing 1
  Uniprot ID: Q7Z699
  ENSP ID: ENSP00000299084
MSEETATSDNDNSYARVRAVVMTRDDSSGGWLPLGGSGLSSVTVFKVPHQEENGCADFFIRGERLRDKMVVLECMLKKDLIYNKVTPTFHHWKIDDKKFGLTFQSPADARAFDRGIRRAIEDISQGCPESKNEAEGADDLQANEEDSSSSLVKDHLFQQETVVTSEPYRSSNIRPSPFEDLNARRVYMQSQANQITFGQPGLDIQSRSMEYVQRQISKECGSLKSQNRVPLKSIRHVSFQDEDEIVRINPRDILIRRYADYRHPDMWKNDLERDDADSSIQFSKPDSKKSDYLYSCGDETKLSSPKDSVVFKTQPSSLKIKKSKRRKEDGERSRCVYCQERFNHEENVRGKCQDAPDPIKRCIYQVSCMLCAESMLYHCMSDSEGDFSDPCSCDTSDDKFCLRWLALVALSFIVPCMCCYVPLRMCHRCGEACGCCGGKHKAAG

SEQ ID NO: 83704 - protein, 131 aa, Homo sapiens
  Payload ID: 16657
  Gene Symbol: SPRED1
  Gene Name: sprouty-related, EVH1 domain containing 1
  ENSP ID: ENSP00000453680
MTRDDSSGGWLPLGGSGLSSVTVFKVPHQEENGCADFFIRGERLRDKMVVLECMLKKDLIYNKVTPTFHHWKIDDKKFGLTFQSPADARAFDRGIRRAIEDISQGCPESKNEAEGADDLQANEEDSSSSLV

SEQ ID NO: 83705 - protein, 418 aa, Homo sapiens
  Payload ID: 16658
  Gene Symbol: SPRED2
  Gene Name: sprouty-related, EVH1 domain containing 2
  Uniprot ID: Q7Z698
  ENSP ID: ENSP00000348753
MTEETHPDDDSYIVRVKAVVMTRDDSSGGWFPQEGGGISRVGVCKVMHPEGNGRSGFLIHGERQKDKLVVLECYVRKDLVYTKANPTFHHWKVDNRKFGLTFQSPADARAFDRGVRKAIEDLIEGSTTSSSTIHNEAELGDDDVFTTATDSSSNSSQKREQPTRTISSPTSCEHRRIYTLGHLHDSYPTDHYHLDQPMPRPYRQVSFPDDDEEIVRINPREKIWMTGYEDYRHAPVRGKYPDPSEDADSSYVRFAKGEVPKHDYNYPYVDSSDFGLGEDPKGRGGSVIKTQPSRGKSRRRKEDGERSRCVYCRDMFNHEENRRGHCQDAPDSVRTCIRRVSCMWCADSMLYHCMSDPEGDYTDPCSCDTSDEKFCLRWMALIALSFLAPCMCCYLPLRACYHCGVMCRCCGGKHKAAA

SEQ ID NO: 83706 - protein, 432 aa, Homo sapiens
  Payload ID: 16658
  Gene Symbol: SPRED2
  Gene Name: sprouty-related, EVH1 domain containing 2
  ENSP ID: ENSP00000390595
MALCSLISSWASGFRSDDDQERRGDSYIVRVKAVVMTRDDSSGGWFPQEGGGISRVGVCKVMHPEGNGRSGFLIHGERQKDKLVVLECYVRKDLVYTKANPTFHHWKVDNRKFGLTFQSPADARAFDRGVRKAIEDLIEGSTTSSSTIHNEAELGDDDVFTTATDSSSNSSQKREQPTRTISSPTSCEHRRIYTLGHLHDSYPTDHYHLDQPMPRPYRQVSFPDDDEEIVRINPREKIWMTGYEDYRHAPVRGKYPDPSEDADSSYVRFAKGEVPKHDYNYPYVDSSDFGLGEDPKGRGGSVIKTQPSRGKSRRRKEDGERSRCVYCRDMFNHEENRRGHCQDAPDSVRTCIRRVSCMWCADSMLYHCMSDPEGDYTDPCSCDTSDEKFCLRWMALIALSFLAPCMCCYLPLRACYHCGVMCRCCGGKHKAA

SEQ ID NO: 83707 - protein, 47 aa, Homo sapiens
  Payload ID: 16658
  Gene Symbol: SPRED2
  Gene Name: sprouty-related, EVH1 domain containing 2
  ENSP ID: ENSP00000393148
  MOD_RES (1)..(1): Any amino acid
XMHPEGNGRSGFLIHGERQKDKLLQKLEPRSWCQIVKRDCPFQQSLF

SEQ ID NO: 83708 - protein, 415 aa, Homo sapiens
  Payload ID: 16658
  Gene Symbol: SPRED2
  Gene Name: sprouty-related, EVH1 domain containing 2
  Uniprot ID: Q7Z698
  ENSP ID: ENSP00000393697
MASPGSDSYIVRVKAVVMTRDDSSGGWFPQEGGGISRVGVCKVMHPEGNGRSGFLIHGERQKDKLVVLECYVRKDLVYTKANPTFHHWKVDNRKFGLTFQSPADARAFDRGVRKAIEDLIEGSTTSSSTIHNEAELGDDDVFTTATDSSSNSSQKREQPTRTISSPTSCEHRRIYTLGHLHDSYPTDHYHLDQPMPRPYRQVSFPDDDEEIVRINPREKIWMTGYEDYRHAPVRGKYPDPSEDADSSYVRFAKGEVPKHDYNYPYVDSSDFGLGEDPKGRGGSVIKTQPSRGKSRRRKEDGERSRCVYCRDMFNHEENRRGHCQDAPDSVRTCIRRVSCMWCADSMLYHCMSDPEGDYTDPCSCDTSDEKFCLRWMALIALSFLAPCMCCYLPLRACYHCGVMCRCCGGKHKAAA

SEQ ID NO: 83709 - protein, 116 aa, Homo sapiens
  Payload ID: 16658
  Gene Symbol: SPRED2
  Gene Name: sprouty-related, EVH1 domain containing 2
  ENSP ID: ENSP00000406481
MTEETHPDDDSYIVRVKAVVMTRDDSSGGWFPQEGGGISRVGVCKVMHPEGNGRSGFLIHGERQKDKLVVLECYVRKDLVYTKANPTFHHWKVDNRKFGLTFQSPADARAFDRGVR

SEQ ID NO: 83710 - protein, 233 aa, Homo sapiens
  Payload ID: 16658
  Gene Symbol: SPRED2
  Gene Name: sprouty-related, EVH1 domain containing 2
  ENSP ID: ENSP00000407627
VVLECYVRKDLVYTKANPTFHHWKVDNRKFGLTFQSPADARAFDRGVRKAIEDLIEGSTTSSSTIHNEAELGDDDVFTPMPRPYRQVSFPDDDEEIVRINPREKIWMTGYEDYRHAPVRGKYPDPSEDADSSYVRFAKGEVPKHDYNYPYVDSSDFGLGEDPKGRGGSVIKTQPSRGKSRRRKEDGERSRCVYCRDMFNHEENRRGHCQDAPDSVRTCIRRVSCMWCADSMLY

SEQ ID NO: 83711 - protein, 103 aa, Homo sapiens
  Payload ID: 16658
  Gene Symbol: SPRED2
  Gene Name: sprouty-related, EVH1 domain containing 2
  ENSP ID: ENSP00000414551
GVCKVMHPEGNGRSGFLIHGERQKDKLVVLECYVRKDLVYTKANPTFHHWKVDNRKFGLTFQSPADARAFDRGVRKAIEDLIEEVENGFWRAQKAPGLPTVLL

SEQ ID NO: 83712 - protein, 410 aa, Homo sapiens
  Payload ID: 16659
  Gene Symbol: SPRED3
  Gene Name: sprouty-related, EVH1 domain containing 3
  Uniprot ID: Q2MJR0
  ENSP ID: ENSP00000345405
MVRVRAVVMARDDSSGGWLPVGGGGLSQVSVCRVRGARPEGGARQGHYVIHGERLRDQKTTLECTLKPGLVYNKVNPIFHHWSLGDCKFGLTFQSPAEADEFQKSLLAALAALGRGSLTPSSSSSSSSPSQDTAETPCPLTSHVDSDSSSSHSRQETPPSAAAAPIITMESASGFGPTTPPQRRRSSAQSYPPLLPFTGIPEPSEPLAGAGGLGWGGRGYEDYRRSGPPAPLALSTCVVRFAKTGALRGAALGPPAALPAPLTEAAPPAPPARPPPGPGPSSAPAKASPEAEEAARCVHCRALFRRRADGRGGRCAEAPDPGRLLVRRLSCLWCAESLLYHCLSDAEGDFSDPCACEPGHPRPAARWAALAALSLAVPCLCCYAPLRACHWVAARCGCAGCGGRHEEAAR

SEQ ID NO: 83713 - protein, 121 aa, Homo sapiens
  Payload ID: 16659
  Gene Symbol: SPRED3
  Gene Name: sprouty-related, EVH1 domain containing 3
  ENSP ID: ENSP00000465713
MVRVRAVVMARDDSSGGWLPVGGGGLSQTTLECTLKPGLVYNKVNPIFHHWSLGDCKFGLTFQSPAEADEFQKSLLAALAALGRGSLTPSSSSSSSSPSQDTAETPCPLTLSQYFRHMLCP

SEQ ID NO: 83714 - protein, 410 aa, Homo sapiens; identical to SEQ ID NO: 83712
  Payload ID: 16659
  Gene Symbol: SPRED3
  Gene Name: sprouty-related, EVH1 domain containing 3
  Uniprot ID: Q2MJR0
  ENSP ID: ENSP00000466568

SEQ ID NO: 83715 - protein, 181 aa, Homo sapiens
  Payload ID: 16659
  Gene Symbol: SPRED3
  Gene Name: sprouty-related, EVH1 domain containing 3
  ENSP ID: ENSP00000467532
MVRVRAVVMARDDSSGGWLPVGGGGLSQVSVCRVRGARPEGGARQGHYVIHGERLRDQKTTLECTLKPGLVYNKVNPIFHHWSLGDCKFGLTFQSPAEADEFQKSLLAALAALGRGSLTPSSSSSSSSPSQDTAETPCPLTSHVDSDSSSSHSRQETPPSAAAAPIITMESASGFGPTTPP

SEQ ID NO: 83716 - protein, 454 aa, Homo sapiens
  Payload ID: 16659
  Gene Symbol: SPRED3
  Gene Name: sprouty-related, EVH1 domain containing 3
  ENSP ID: ENSP00000467540
MAQMGGKVGDPLWILRKWGLGGCSLELVPGSRTQQASKPASLLPLPQAAPSPPTRLPGSPSLPPRPGSRCPSPAPPEPAREPERKGGGGGRVAAARSPAGASQTTLECTLKPGLVYNKVNPIFHHWSLGDCKFGLTFQSPAEADEFQKSLLAALAALGRGSLTPSSSSSSSSPSQDTAETPCPLTSHVDSDSSSSHSRQETPPSAAAAPIITMESASGFGPTTPPQRRRSSAQSYPPLLPFTGIPEPSEPLAGAGGLGWGGRGYEDYRRSGPPAPLALSTCVVRFAKTGALRGAALGPPAALPAPLTEAAPPAPPARPPPGPGPSSAPAKASPEAEEAARCVHCRALFRRRADGRGGRCAEAPDPGRLLVRRLSCLWCAESLLYHCLSDAEGDFSDPCACEPGHPRPAARWAALAALSLAVPCLCCYAPLRACHWVAARCGCAGCGGRHEEAAR

SEQ ID NO: 83717 - protein, 207 aa, Homo sapiens
  Payload ID: 16660
  Gene Symbol: SPRTN
  Gene Name: SprT-like N-terminal domain
  Uniprot ID: Q9H040
  ENSP ID: ENSP00000008440
MDDDLMLALRLQEEWNLQEAERDHAQESLSLVDASWELVDPTPDLQALFVQFNDQFFWGQLEAVEVKWSVRMTLCAGICSYEGKGGMCSIRLSEPLLKLRPRKDLVEVYHTFHDEVDEYRRHWWRCNGPCQHRPPYYGYVKRATNREPSAHDYWWAEHQKTCGGTYIKIKEPENYSKKGKGKAKLGKEPVLAAENKGTFVYILLIFM

SEQ ID NO: 83718 - protein, 489 aa, Homo sapiens
  Payload ID: 16660
  Gene Symbol: SPRTN
  Gene Name: SprT-like N-terminal domain
  Uniprot ID: Q9H040
  ENSP ID: ENSP00000295050
MDDDLMLALRLQEEWNLQEAERDHAQESLSLVDASWELVDPTPDLQALFVQFNDQFFWGQLEAVEVKWSVRMTLCAGICSYEGKGGMCSIRLSEPLLKLRPRKDLVETLLHEMIHAYLFVTNNDKDREGHGPEFCKHMHRINSLTGANITVYHTFHDEVDEYRRHWWRCNGPCQHRPPYYGYVKRATNREPSAHDYWWAEHQKTCGGTYIKIKEPENYSKKGKGKAKLGKEPVLAAENKDKPNRGEAQLVIPFSGKGYVLGETSNLPSPGKLITSHAINKTQDLLNQNHSANAVRPNSKIKVKFEQNGSSKNSHLVSPAVSNSHQNVLSNYFPRVSFANQKAFRGVNGSPRISVTVGNIPKNSVSSSSQRRVSSSKISLRNSSKVTESASVMPSQDVSGSEDTFPNKRPRLEDKTVFDNFFIKKEQIKSSGNDPKYSTTTAQNSSSSSSQSKMVNCPVCQNEVLESQINEHLDWCLEGDSIKVKSEESL

SEQ ID NO: 83719 - protein, 187 aa, Homo sapiens
  Payload ID: 16660
  Gene Symbol: SPRTN
  Gene Name: SprT-like N-terminal domain
  ENSP ID: ENSP00000355604
MKKTLLHEMIHAYLFVTNNDKDREGHGPEFCKHMHRINSLTGANITVYHTFHDEVDEYRRHWWRCNGPCQHRPPYYGYVKRATNREPSAHDYWWAEHQKTCGGTYIKIKEPENYSKKGKGKAKLGKEPVLAAENKDKPNRGEAQLVIPFSGKGYVLGETSNLPSPGKLITSHAINKTQDLLNQNHSA

SEQ ID NO: 83720 - protein, 250 aa, Homo sapiens
  Payload ID: 16660
  Gene Symbol: SPRTN
  Gene Name: SprT-like N-terminal domain
  Uniprot ID: Q9H040
  ENSP ID: ENSP00000375731
MDDDLMLALRLQEEWNLQEAERDHAQESLSLVDASWELVDPTPDLQALFVQFNDQFFWGQLEAVEVKWSVRMTLCAGICSYEGKGGMCSIRLSEPLLKLRPRKDLVETLLHEMIHAYLFVTNNDKDREGHGPEFCKHMHRINSLTGANITVYHTFHDEVDEYRRHWWRCNGPCQHRPPYYGYVKRATNREPSAHDYWWAEHQKTCGGTYIKIKEPENYSKKGKGKAKLGKEPVLAAENKGTFVYILLIFM

SEQ ID NO: 83721 - protein, 442 aa, Homo sapiens
  Payload ID: 16661
  Gene Symbol: SPRYD3
  Gene Name: SPRY domain containing 3
  Uniprot ID: Q8NCJ5
  ENSP ID: ENSP00000301463
MRRTRRPRFVLMNKMDDLNLHYRFLNWRRRIREIREVRAFRYQERFKHILVDGDTLSYHGNSGEVGCYVASRPLTKDSNYFEVSIVDSGVRGTIAVGLVPQYYSLDHQPGWLPDSVAYHADDGKLYNGRAKGRQFGSKCNSGDRIGCGIEPVSFDVQTAQIFFTKNGKRVGSTIMPMSPDGLFPAVGMHSLGEEVRLHLNAELGREDDSVMMVDSYEDEWGRLHDVRVCGTLLEYLGKGKSIVDVGLAQARHPLSTRSHYFEVEIVDPGEKCYIALGLARKDYPKNRHPGWSRGSVAYHADDGKIFHGSGVGDPFGPRCYKGDIMGCGIMFPRDYILDSEGDSDDSCDTVILSPTARAVRNVRNVMYLHQEGEEEEEEEEEEEDGEEIEPEHEGRKVVVFFTRNGKIIGKKDAVVPSGGFFPTIGMLSCGEKVKVDLHPLSG

SEQ ID NO: 83722 - protein, 165 aa, Homo sapiens
  Payload ID: 16661
  Gene Symbol: SPRYD3
  Gene Name: SPRY domain containing 3
  ENSP ID: ENSP00000446156
MRRTRRPRFVLMNKMDDLNLHYRFLNWRRRIREIREVRAFRYQERFKHILVDGDTLSYHGNSGEVGCYVASRPLTKDSNYFEVSIVDSGVRGTIAVGLVPQYYSLDHQPGWLPDSVAYHADDGKWALPSCPCPQMDCSQQWACTPWVRRCGCTSTLSWAVRTTAS

SEQ ID NO: 83723 - protein, 60 aa, Homo sapiens
  Payload ID: 16661
  Gene Symbol: SPRYD3
  Gene Name: SPRY domain containing 3
  ENSP ID: ENSP00000448845
  MOD_RES (1)..(1): Any amino acid
XDGEEIEPEHEGRKVVVFFTRNGKIIGKKDAVVPSGGFFPTIGMLSCGEKVKVDLHPLSG

SEQ ID NO: 83724 - protein, 479 aa, Homo sapiens
  Payload ID: 16661
  Gene Symbol: SPRYD3
  Gene Name: SPRY domain containing 3
  ENSP ID: ENSP00000449452
MRRTRRPRVLLCQPGWNVVAQSELTAALTCQTQAIFSLLSSWDYRFVLMNKMDDLNLHYRFLNWRRRIREIREVRAFRYQERFKHILVDGDTLSYHGNSGEVGCYVASRPLTKDSNYFEVSIVDSGVRGTIAVGLVPQYYSLDHQPGWLPDSVAYHADDGKLYNGRAKGRQFGSKCNSGDRIGCGIEPVSFDVQTAQIFFTKNGKRVGSTIMPMSPDGLFPAVGMHSLGEEVRLHLNAELGREDDSVMMVDSYEDEWGRLHDVRVCGTLLEYLGKGKSIVDVGLAQARHPLSTRSHYFEVEIVDPGEKCYIALGLARKDYPKNRHPGWSRGSVAYHADDGKIFHGSGVGDPFGPRCYKGDIMGCGIMFPRDYILDSEGDSDDSCDTVILSPTARAVRNVRNVMYLHQEGEEEEEEEEEEEDGEEIEPEHEGRKVVVFFTRNGKIIGKKDAVVPSGGFFPTIGMLSCGEKVKVDLHPLSG

SEQ ID NO: 83725 - protein, 207 aa, Homo sapiens
  Payload ID: 16662
  Gene Symbol: SPRYD4
  Gene Name: SPRY domain containing 4
  Uniprot ID: Q8WW59
  ENSP ID: ENSP00000338034
MALLFARSLRLCRWGAKRLGVASTEAQRGVSFKLEEKTAHSSLALFRDDTGVKYGLVGLEPTKVALNVERFREWAVVLADTAVTSGRHYWEVTVKRSQQFRIGVADVDMSRDSCIGVDDRSWVFTYAQRKWYTMLANEKAPVEGIGQPEKVGLLLEYEAQKLSLVDVSQVSVVHTLQTDFRGPVVPAFALWDGELLTHSGLEVPEGL

SEQ ID NO: 83726 - protein, 125 aa, Homo sapiens
  Payload ID: 16662
  Gene Symbol: SPRYD4
  Gene Name: SPRY domain containing 4
  ENSP ID: ENSP00000487087
MGVSSLTCFLQSLCLPLPRPFSDCIPSWGLIIQLCLNLLHHDTSPSLCPHVTCSWGSTRWLKSKSFLPLAEGVVQSMTWPFFYSTFRVWALAPSVSALLTQCVKMKTEPSFPSSSVPQTFSPTQL

SEQ ID NO: 83727 - protein, 196 aa, Homo sapiens
  Payload ID: 16663
  Gene Symbol: SPRYD7
  Gene Name: SPRY domain containing 7
  Uniprot ID: Q5W111
  ENSP ID: ENSP00000354774
MATSVLCCLRCCRDGGTGHIPLKEMPAVQLDTQHMGTDVVIVKNGRRICGTGGCLASAPLHQNKSYFEFKIQSTGIWGIGVATQKVNLNQIPLGRDMHSLVMRNDGALYHNNEEKNRLPANSLPQEGDVVGITYDHVELNVYLNGKNMHCPASGIRGTVYPVVYVDDSAILDCQFSEFYHTPPPGFEKILFEQQIF

SEQ ID NO: 83728 - protein, 157 aa, Homo sapiens
  Payload ID: 16663
  Gene Symbol: SPRYD7
  Gene Name: SPRY domain containing 7
  Uniprot ID: Q5W111
  ENSP ID: ENSP00000367437
MATSVLCCLRCCRDGGTGHIPLKEMPAVQLDTQHMGIWGIGVATQKVNLNQIPLGRDMHSLVMRNDGALYHNNEEKNRLPANSLPQEGDVVGITYDHVELNVYLNGKNMHCPASGIRGTVYPVVYVDDSAILDCQFSEFYHTPPPGFEKILFEQQIF

SEQ ID NO: 83729 - protein, 157 aa, Homo sapiens; identical to SEQ ID NO: 83728
  Payload ID: 16663
  Gene Symbol: SPRYD7
  Gene Name: SPRY domain containing 7
  Uniprot ID: Q5W111
  ENSP ID: ENSP00000484495

SEQ ID NO: 83730 - protein, 1047 aa, Homo sapiens
  Payload ID: 16664
  Gene Symbol: SUPT16H
  Gene Name: SPT16 homolog, facilitates chromatin remodeling subunit
  Uniprot ID: Q9Y5B9
  ENSP ID: ENSP00000216297
MAVTLDKDAYYRRVKRLYSNWRKGEDEYANVDAIVVSVGVDEEIVYAKSTALQTWLFGYELTDTIMVFCDDKIIFMASKKKVEFLKQIANTKGNENANGAPAITLLIREKNESNKSSFDKMIEAIKESKNGKKIGVFSKDKFPGEFMKSWNDCLNKEGFDKIDISAVVAYTIAVKEDGELNLMKKAASITSEVFNKFFKERVMEIVDADEKVRHSKLAESVEKAIEEKKYLAGADPSTVEMCYPPIIQSGGNYNLKFSVVSDKNHMHFGAITCAMGIRFKSYCSNLVRTLMVDPSQEVQENYNFLLQLQEELLKELRHGVKICDVYNAVMDVVKKQKPELLNKITKNLGFGMGIEFREGSLVINSKNQYKLKKGMVFSINLGFSDLTNKEGKKPEEKTYALFIGDTVLVDEDGPATVLTSVKKKVKNVGIFLKNEDEEEEEEEKDEAEDLLGRGSRAALLTERTRNEMTAEEKRRAHQKELAAQLNEEAKRRLTEQKGEQQIQKARKSNVSYKNPSLMPKEPHIREMKIYIDKKYETVIMPVFGIATPFHIATIKNISMSVEGDYTYLRINFYCPGSALGRNEGNIFPNPEATFVKEITYRASNIKAPGEQTVPALNLQNAFRIIKEVQKRYKTREAEEKEKEGIVKQDSLVINLNRSNPKLKDLYIRPNIAQKRMQGSLEAHVNGFRFTSVRGDKVDILYNNIKHALFQPCDGEMIIVLHFHLKNAIMFGKKRHTDVQFYTEVGEITTDLGKHQHMHDRDDLYAEQMEREMRHKLKTAFKNFIEKVEALTKEELEFEVPFRDLGFNGAPYRSTCLLQPTSSALVNATEWPPFVVTLDEVELIHFERVQFHLKNFDMVIVYKDYSKKVTMINAIPVASLDPIKEWLNSCDLKYTEGVQSLNWTKIMKTIVDDPEGFFEQGGWSFLEPEGEGSDAEEGDSESEIEDETFNPSEDDYEEEEEDSDEDYSSEAEESDYSKESLGSEEESGKDWDELEEEARKADRESRYEEEEEQSRSMSRKRKASVHSSGRGSNRGSRHSSAPPKKKRK

SEQ ID NO: 83731 - protein, 83 aa, Homo sapiens
  Payload ID: 16664
  Gene Symbol: SUPT16H
  Gene Name: SPT16 homolog, facilitates chromatin remodeling subunit
  ENSP ID: ENSP00000450910
MAVTLDKDAYYRRVKRLYSNWREFPGSVPHPFRCSRIIHRRRPRTLPLNRESPAFTLSCGHHHLPRVPALVMHSSTSRSLFPP

SEQ ID NO: 83732 - protein, 81 aa, Homo sapiens
  Payload ID: 16664
  Gene Symbol: SUPT16H
  Gene Name: SPT16 homolog, facilitates chromatin remodeling subunit
  ENSP ID: ENSP00000451517
MAVTLDKDAYYRRVKRLYSNWRKGEDEYANVDAIVVSVGVDEEIVYAKSTALQSSGTQAFSSSLFCHPKNIALLHVVQNGF

SEQ ID NO: 83733 - protein, 66 aa, Homo sapiens
  Payload ID: 16664
  Gene Symbol: SUPT16H
  Gene Name: SPT16 homolog, facilitates chromatin remodeling subunit
  ENSP ID: ENSP00000452259
MAVTLDKDAYYRRVKRLYSNWRKGEDEYANVDAIVVSVGVDEEIVYAKSTALQQEKSGVLETDCQH

SEQ ID NO: 83734 - protein, 685 aa, Homo sapiens
  Payload ID: 16665
  Gene Symbol: SPTY2D1
  Gene Name: SPT2 chromatin protein domain containing 1
  Uniprot ID: Q68D10
  ENSP ID: ENSP00000337991
MDFREILMIASKGQGVNNVPKRYSLAVGPPKKDPKVKGVQSAAVQAFLKRKEEELRRKALEEKRRKEELVKKRIELKHDKKARAMAKRTKDNFHGYNGIPIEEKSKKRQATESHTSQGTDREYEMEEENEFLEYNHAESEQEYEEEQEPPKVESKPKVPLKSAPPPMNFTDLLRLAEKKQFEPVEIKVVKKSEERPMTAEELREREFLERKHRRKKLETDGKLPPTVSKKAPSQKESVGTKLSKGSGDRHPSSKGMPLPHAEKKSRPSMANEKHLALSSSKSMPGERIKAGSGNSSQPSLREGHDKPVFNGAGKPHSSTSSPSVPKTSASRTQKSAVEHKAKKSLSHPSHSRPGPMVTPHNKAKSPGVRQPGSSSSSAPGQPSTGVARPTVSSGPVPRRQNGSSSSGPERSISGSKKPTNDSNPSRRTVSGTCGPGQPASSSGGPGRPISGSVSSARPLGSSRGPGRPVSSPHELRRPVSGLGPPGRSVSGPGRSISGSIPAGRTVSNSVPGRPVSSLGPGQTVSSSGPTIKPKCTVVSETISSKNIISRSSNGQMNGMKPPLSGYRAAQGPQRLPFPTGYKRQREYEEEDDDDDEYDSEMEDFIEDEGEPQEEISKHIREIFGYDRKKYKDESDYALRYMESSWKEQQKEEAKSLRLGMQEDLEEMRREEEEMQRRRAKKLKRR

SEQ ID NO: 83735 - protein, 779 aa, Homo sapiens
  Payload ID: 16666
  Gene Symbol: SUPT20H
  Gene Name: SPT20 homolog, SAGA complex component
  Uniprot ID: Q8NEM7
  ENSP ID: ENSP00000218894
MQQALELALDRAEYVIESARQRPPKRKYLSSGRKSVFQKLYDLYIEECEKEPEVKKLRRNVNLLEKLVMQETLSCLVVNLYPGNEGYSLMLRGKNGSDSETIRLPYEEGELLEYLDAEELPPILVDLLEKSQVNIFHCGCVIAEIRDYRQSSNMKSPGYQSRHILLRPTMQTLICDVHSITSDNHKWTQEDKLLLESQLILATAEPLCLDPSIAVTCTANRLLYNKQKMNTRPMKRCFKRYSRSSLNRQQDLSHCPPPPQLRLLDFLQKRKERKAGQHYDLKISKAGNCVDMWKRSPCNLAIPSEVDVEKYAKVEKSIKSDDSQPTVWPAHDVKDDYVFECEAGTQYQKTKLTILQSLGDPLYYGKIQPCKADEESDSQMSPSHSSTDDHSNWFIIGSKTDAERVVNQYQELVQNEAKCPVKMSHSSSGSASLSQVSPGKETDQTETVSVQSSVLGKGVKHRPPPIKLPSSSGNSSSGNYFTPQQTSSFLKSPTPPPSSKPSSIPRKSSVDLNQVSMLSPAALSPASSSQRTTATQVMANSAGLNFINVVGSVCGAQALMSGSNPMLGCNTGAITPAGINLSGLLPSGGLLPNALPSAMQAASQAGVPFGLKNTSSLRPLNLLQLPGGSLIFNTLQQQQQQLSQFTPQQPQQPTTCSPQQPGEQGSEQGSTSQEQALSAQQAAVINLTGVGSFMQSQAAVLSQLGSAENRPEQSLPQQRFQLSSAFQQQQQQIQQLRFLQHQMAMAAAAAQTAQLHHHRHTGSQSKSKMKRGTPTTPKF

SEQ ID NO: 83736 - protein, 733 aa, Homo sapiens
  Payload ID: 16666
  Gene Symbol: SUPT20H
  Gene Name: SPT20 homolog, SAGA complex component
  Uniprot ID: Q8NEM7
  ENSP ID: ENSP00000348512
MQQALELALDRAEYVIESARQRPPKRKYLSSGRKSVFQKLYDLYIEECEKEPEVKQKLRRNVNLLEKLVMQETLSCLVVNLYPGNEGYSLMLRGKNGSDSETIRLPYEEGELLEYLDAEELPPILVDLLEKSQVNIFHCGCVIAEIRDYRQSSNMKSPGYQSRHILLRPTMQTLICDVHSITSDNHKWTQEDKLLLESQLILATAEPLCLDPSIAVTCTANRLLYNKQKMNTRPMKRCFKRYSRSSLNRQQDLSHCPPPPQLRLLDFLQKRKERKAGQHYDLKISKAGNCVDMWKRSPCNLAIPSEVDVEKYAKVEKSIKSDDSQPTVWPAHDVKDDYVFECEAGTQYQKTKLTILQSLGDPLYYGKIQPCKADEESDSQMSPSHSSTDDHSNWFIIGSKTDAERVVNQYQELVQNEAKCPVKMSHSSSGSASLSQVSPGKETDQTETVSVQSSVLGKGVKHRPPPIKLPSSSGNSSSGNYFTPQQTSSFLKSPTPPPSSKPSSIPRKSSVDLNQVSMLSPAALSPASSSQRTTATQVMANSAGLNFINVVGSVCGAQALMSGSNPMLGCNTGAITPAGINLSGLLPSGGLLPNALPSAMQAASQAGVPFGLKNTSSLRPLNLLQLPGGSLIFNTLQQQQQQLSQFTPQQPQQPTTCSPQQPGEQGSEQGSTSQEQALSAQQAAVINLTGVGSFMQSQAAAVAILAASNGYGSSSSTNSSATSSSAYRQPVKK

SEQ ID NO: 83737 - protein, 733 aa, Homo sapiens; identical to SEQ ID NO: 83736
  Payload ID: 16666
  Gene Symbol: SUPT20H
  Gene Name: SPT20 homolog, SAGA complex component
  Uniprot ID: Q8NEM7
  ENSP ID: ENSP00000353388

SEQ ID NO: 83738 - protein, 811 aa, Homo sapiens
  Payload ID: 16666
  Gene Symbol: SUPT20H
  Gene Name: SPT20 homolog, SAGA complex component
  Uniprot ID: Q8NEM7
  ENSP ID: ENSP00000417510
MQQALELALDRAEYVIESARQRPPKRKYLSSGRKSVFQKLYDLYIEECEKEPEVKKLRRNVNLLEKLVMQETLSCLVVNLYPGNEGYSLMLRGKNGSDSETIRLPYEEGELLEYLDAEELPPILVDLLEKSQVNIFHCGCVIAEIRDYRQSSNMKSPGYQSRHILLRPTMQTLICDVHSITSDNHKWTQEDKLLLESQLILATAEPLCLDPSIAVTCTANRLLYNKQKMNTRPMKRCFKRYSRSSLNRQQDLSHCPPPPQLRLLDFLQKRKERKAGQHYDLKISKAGNCVDMWKRSPCNLAIPSEVDVEKYAKVEKSIKSDDSQPTVWPAHDVKDDYVFECEAGTQYQKTKLTILQSLGDPLYYGKIQPCKADEESDSQMSPSHSSTDDHSNWFIIGSKTDAERVVNQYQELVQNEAKCPVKMSHSSSGSASLSQVSPGKETDQTETVSVQSSVLGKGVKHRPPPIKLPSSSGNSSSGNYFTPQQTSSFLKSPTPPPSSKPSSIPRKSSVDLNQVSMLSPAALSPASSSQRSGTPKPSTPTPTPSSTPHPPDAQSSTPSTPSATPTPQDSGFTPQPTLLTQFAQQQRSLSQAMPVTTIPLSTMVTSITPGTTATQVMANSAGLNFINVVGSVCGAQALMSGSNPMLGCNTGAITPAGINLSGLLPSGGLLPNALPSAMQAASQAGVPFGLKNTSSLRPLNLLQLPGGSLIFNTLQQQQQQLSQFTPQQPQQPTTCSPQQPGEQGSEQGSTSQEQALSAQQAAVINLTGVGSFMQSQAAAVAILAASNGYGSSSSTNSSATSSSAYRQPVKK

SEQ ID NO: 83739 - protein, 733 aa, Homo sapiens; identical to SEQ ID NO: 83736
  Payload ID: 16666
  Gene Symbol: SUPT20H
  Gene Name: SPT20 homolog, SAGA complex component
  Uniprot ID: Q8NEM7
  ENSP ID: ENSP00000419754

SEQ ID NO: 83740 - protein, 378 aa, Homo sapiens
  Payload ID: 16666
  Gene Symbol: SUPT20H
  Gene Name: SPT20 homolog, SAGA complex component
  ENSP ID: ENSP00000419787
  MOD_RES (1)..(1): Any amino acid
XSNWFIIGSKTDAERVVNQYQELVQNEAKCPVKMSHSSSGSASLSQVSPGKETDQTETVSVQSSVLGKGVKHRPPPIKLPSSSGNSSSGNYFTPQQTSSFLKSPTPPPSSKPSSIPRKSSVDLNQVSMLSPAALSPASSSQRTTATQVMANSAGLNFINVVGSVCGAQALMSGSNPMLGCNTGAITPAGINLSGLLPSGGLLPNALPSAMQAASQAGVPFGLKNTSSLRPLNLLQQQQQQLSQFTPQQPQQPTTCSPQQPGEQGSEQGSTSQEQALSAQQAAVINLTGVGSFMQSQAAVLSQLGSAENRPEQSLPQQRFQLSSAFQQQQQQIQQLRFLQHQMAMAAAAAQTAQLHHHRHTGSQSKSKMKRGTPTTPKF

SEQ ID NO: 83741 - protein, 190 aa, Homo sapiens
  Payload ID: 16666
  Gene Symbol: SUPT20H
  Gene Name: SPT20 homolog, SAGA complex component
  ENSP ID: ENSP00000420170
MQQALELALDRAEYVIESARQRPPKRKYLSSGRKSVFQKLYDLYIEECEKEPEVKQKLRRNVNLLEKLVMQETLSCLVVNLYPGNEGYSLMLRGKNGSDSETIRLPYEEGELLEYLDAEELPPILVDLLEKSQVNIFHCGCVIAEIRDYRQSSNMKSPGYQSRHILLRPTMQTLICDVHSITSDNHKWTQ

SEQ ID NO: 83742 - protein, 736 aa, Homo sapiens [sequence omitted]

SEQ ID NO: 83743 - protein, 498 aa, Homo sapiens
  Payload ID: 16666
  Gene Symbol: SUPT20H
  Gene Name: SPT20 homolog, SAGA complex component
  ENSP ID: ENSP00000473416
MYVIESARQRPPKRKYLSSGRKSVFQKLYDLYIEECEKEPEVKKLRRNVNLLEKLVMQETLSCLVVNLYPGNEGYSLMLRGKNGSDSETIRLPYEEGELLEYLDAEELPPILVDLLEKSQVNIFHCGCVIAEIRDYRQSSNMKSPGYQSRHILLRPTMQTLICDVHSITSDNHKWTQEDKLLLESQLILATAEPLCLDPSIAVTCTANRLLYNKQKMNTRPMKRCFKRYSRSSLNRQQDLSHCPPPPQLRLLDFLQKRKERKAGQHYDLKISKAGNCVDMWKRSPCNLAIPSEVDDVKDDYVFECEAGTQYQKTKLTILQSLGDPLYYGKIQPCKADEESDSQMSPSHSSTDDHSNWFIIGSKTDAERVVNQYQELVQNEAKCPVKMSHSSSGSASLSQVSPGKETDQTETVSVQSSVLGKGVKHRPPPIKLPSSSGNSSSGNYFTPQQTSSFLKSPTPPPSSKPSSIPRKSSVDLNQVSMLSPAALSPASSSQRHES

SEQ ID NO: 83744 - protein, 522 aa, Homo sapiens
  Payload ID: 16666
  Gene Symbol: SUPT20H
  Gene Name: SPT20 homolog, SAGA complex component
  ENSP ID: ENSP00000473592
MYVIESARQRPPKRKYLSSGRKSVFQKLYDLYIEECEKEPEVKKLRRNVNLLEKLVMQETLSCLVVNLYPGNEGYSLMLRGKNGSDSETIRLPYEEGELLEYLDAEELPPILVDLLEKSQVNIFHCGCVIAEIRDYRQSSNMKSPGYQSRHILLRPTMQTLICDVHSITSDNHKWTQEDKLLLESQLILATAEPLCLDPSIAVTCTANRLLYNKQKMNTRPMKRCFKRYSRSSLNRQQDLSHCPPPPQLRLLDFLQKRKERKAGQHYDLKISKAGNCVDMWKRSPCNLAIPSEVDVEKYAKVEKSIKSDDSQPTVWPAHDVKDDYVFECEAGTQYQKTKLTILQSLGDPLYYGKIQPCKADEESDSQMSPSHSSTDDHSNWFIIGSKTDAERVVNQYQELVQNEAKCPVKMSHSSSGSASLSQVSPGKETDQTETVSVQSSVLGKGVKHRPPPIKLPSSSGNSSSGNYFTPQQTSSFLKSPTPPPSSKPSSIPRKSSVDLNQVSMLSPAALSPASSSQRHES

SEQ ID NO: 83745 - protein, 165 aa, Homo sapiens
  Payload ID: 16667
  Gene Symbol: SUPT3H
  Gene Name: SPT3 homolog, SAGA and STAGA complex component
  ENSP ID: ENSP00000306718
MFEDDEIDEVKQERMERAERQTRIMDSAQYAEFCESRQLSFSKKASKFRDWLDCSSMEIKPNVVAMEILAYLAYETVAQLVDLALLVRQDMVTKAGDPFSHAISATFIQYHNSAESTAACGVEAHSDAIQPCHIREAIRRYSHRIGPLSPFTNAYRRNGMAFLAC

SEQ ID NO: 83746 - protein, 108 aa, Homo sapiens
  Payload ID: 16667
  Gene Symbol: SUPT3H
  Gene Name: SPT3 homolog, SAGA and STAGA complex component
  ENSP ID: ENSP00000360513
MEILAYLAYETVAQLVDLALLVRQDMVTKAGDPFSHAISATFIQYHNSAESTAACGVEAHSDAIQPCHIREAIRRYSHRIGPLSPFTISFSLTECLPQEWDGFSSLLM

SEQ ID NO: 83747 - protein, 317 aa, Homo sapiens
  Payload ID: 16667
  Gene Symbol: SUPT3H
  Gene Name: SPT3 homolog, SAGA and STAGA complex component
  Uniprot ID: O75486
  ENSP ID: ENSP00000360514
MNNTAASPMSTATSSSGRSTGKSISFATELQSMMYSLGDARRPLHETAVLVEDVVHTQLINLLQQAAEVSQLRGARVITPEDLLFLMRKDKKKLRRLLKYMFIRDYKSKIVKGIDEDDLLEDKLSGSNNANKRQKIAQDFLNSIDQTGELLAMFEDDEIDEVKQERMERAERQTRIMDSAQYAEFCESRQLSFSKKASKFRDWLDCSSMEIKPNVVAMEILAYLAYETVAQLVDLALLVRQDMVTKAGDPFSHAISATFIQYHNSAESTAACGVEAHSDAIQPCHIREAIRRYSHRIGPLSPFTNAYRRNGMAFLAC

SEQ ID NO: 83748 - protein, 328 aa, Homo sapiens
  Payload ID: 16667
  Gene Symbol: SUPT3H
  Gene Name: SPT3 homolog, SAGA and STAGA complex component
  Uniprot ID: O75486
  ENSP ID: ENSP00000360515
MVVFGTTFFNFDSFIGKTDSIEIIGKSVFPYCYHNILPLLNDSGRYSLGDARRPLHETAVLVEDVVHTQLINLLQQAAEVSQLRGARVITPEDLLFLMRKDKKKLRRLLKYMFIRDYKSKIVKGIDEDDLLEDKLSGSNNANKRQKIAQDFLNSIDQTGELLAMFEDDEIDEVKQERMERAERQTRIMDSAQYAEFCESRQLSFSKKASKFRDWLDCSSMEIKPNVVAMEILAYLAYETVAQLVDLALLVRQDMVTKAGDPFSHAISATFIQYHNSAESTAACGVEAHSDAIQPCHIREAIRRYSHRIGPLSPFTNAYRRNGMAFLAC

SEQ ID NO: 83749 - protein, 317 aa, Homo sapiens; identical to SEQ ID NO: 83747
  Payload ID: 16667
  Gene Symbol: SUPT3H
  Gene Name: SPT3 homolog, SAGA and STAGA complex component
  Uniprot ID: O75486
  ENSP ID: ENSP00000436411

SEQ ID NO: 83750 - protein, 117 aa, Homo sapiens
  Payload ID: 16668
  Gene Symbol: SUPT4H1
  Gene Name: SPT4 homolog, DSIF elongation factor subunit
  Uniprot ID: P63272
  ENSP ID: ENSP00000225504
MALETVPKDLRHLRACLLCSLVKTIDQFEYDGCDNCDAYLQMKGNREMVYDCTSSSFDGIIAMMSPEDSWVSKWQRVSNFKPGVYAVSVTGRLPQGIVRELKSRGVAYKSRDTAIKT

SEQ ID NO: 83751 - protein, 76 aa, Homo sapiens
  Payload ID: 16668
  Gene Symbol: SUPT4H1
  Gene Name: SPT4 homolog, DSIF elongation factor subunit
  ENSP ID: ENSP00000462100
MKGNREMVYDCTSSSFDGIIAMMSPEDSWVSKWQRVSNFKPGVYAVSVTGRLPQGIVRELKSRGVAYKSRDTAIKT

SEQ ID NO: 83752 - protein, 42 aa, Homo sapiens
  Payload ID: 16668
  Gene Symbol: SUPT4H1
  Gene Name: SPT4 homolog, DSIF elongation factor subunit
  ENSP ID: ENSP00000462602
MALETVPKDLRHLRACLLCSLVKVSVGDLVVGPMGDQDYRPV

SEQ ID NO: 83753 - protein, 117 aa, Homo sapiens; identical to SEQ ID NO: 83750
  Payload ID: 16668
  Gene Symbol: SUPT4H1
  Gene Name: SPT4 homolog, DSIF elongation factor subunit
  Uniprot ID: P63272
  ENSP ID: ENSP00000462670

SEQ ID NO: 83754 - protein, 59 aa, Homo sapiens
  Payload ID: 16668
  Gene Symbol: SUPT4H1
  Gene Name: SPT4 homolog, DSIF elongation factor subunit
  ENSP ID: ENSP00000463979
MALETVPKDLRHLRACLLCSLVKTIDQFEYDGCDNCDAYLQMKGNREMVYDCTSSSFDG

SEQ ID NO: 83755 - protein, 108 aa, Homo sapiens
  Payload ID: 16668
  Gene Symbol: SUPT4H1
  Gene Name: SPT4 homolog, DSIF elongation factor subunit
  ENSP ID: ENSP00000464618
MLISPFPLFFFHSQTIDQFEYDGCDNCDAYLQMKGNREMVYDCTSSSFDGIIAMMSPEDSWVSKWQRVSNFKPGVYAVSVTGRLPQGIVRELKSRGVAYKSRDTAIKT

SEQ ID NO: 83756 - protein, 1083 aa, Homo sapiens
  Payload ID: 16669
  Gene Symbol: SUPT5H
  Gene Name: SPT5 homolog, DSIF elongation factor subunit
  Uniprot ID: O00267
  ENSP ID: ENSP00000352117
MSDSEDSNFSEEEDSERSSDGEEAEVDEERRSAAGSEKEEEPEDEEEEEEEEEYDEEEEEEDDDRPPKKPRHGGFILDEADVDDEYEDEDQWEDGAEDILEKASNIDNVVLDEDRSGARRLQNLWRDQREEELGEYYMKKYAKSSVGETVYGGSDELSDDITQQQLLPGVKDPNLWTVKCKIGEERATAISLMRKFIAYQFTDTPLQIKSVVAPEHVKGYIYVEAYKQTHVKQAIEGVGNLRLGYWNQQMVPIKEMTDVLKVVKEVANLKPKSWVRLKRGIYKDDIAQVDYVEPSQNTISLKMIPRIDYDRIKARMSLKDWFAKRKKFKRPPQRLFDAEKIRSLGGDVASDGDFLIFEGNRYSRKGFLFKSFAMSAVITEGVKPTLSELEKFEDQPEGIDLEVVTESTGKEREHNFQPGDNVEVCEGELINLQGKILSVDGNKITIMPKHEDLKDMLEFPAQELRKYFKMGDHVKVIAGRFEGDTGLIVRVEENFVILFSDLTMHELKVLPRDLQLCSETASGVDVGGQHEWGELVQLDPQTVGVIVRLERETFQVLNMYGKVVTVRHQAVTRKKDNRFAVALDSEQNNIHVKDIVKVIDGPHSGREGEIRHLFRSFAFLHCKKLVENGGMFVCKTRHLVLAGGSKPRDVTNFTVGGFAPMSPRISSPMHPSAGGQRGGFGSPGGGSGGMSRGRGRRDNELIGQTVRISQGPYKGYIGVVKDATESTARVELHSTCQTISVDRQRLTTVGSRRPGGMTSTYGRTPMYGSQTPMYGSGSRTPMYGSQTPLQDGSRTPHYGSQTPLHDGSRTPAQSGAWDPNNPNTPSRAEEEYEYAFDDEPTPSPQAYGGTPNPQTPGYPDPSSPQVNPQYNPQTPGTPAMYNTDQFSPYAAPSPQGSYQPSPSPQSYHQVAPSPAGYQNTHSPASYHPTPSPMAYQASPSPSPVGYSPMTPGAPSPGGYNPHTPGSGIEQNSSDWVTTDIQVKVRDTYLDTQVVGQTGVIRSVTGGMCSVYLKDSEKVVSISSEHLEPITPTKNNKVKVILGEDREATGVLLSIDGEDGIVRMDLDEQLKILNLRFLGKLLEA

SEQ ID NO: 83757 - protein, 1083 aa, Homo sapiens; identical to SEQ ID NO: 83756
  Payload ID: 16669
  Gene Symbol: SUPT5H
  Gene Name: SPT5 homolog, DSIF elongation factor subunit
  Uniprot ID: O00267
  ENSP ID: ENSP00000384505

SEQ ID NO: 83758 - protein, 1087 aa, Homo sapiens
  Payload ID: 16669
  Gene Symbol: SUPT5H
  Gene Name: SPT5 homolog, DSIF elongation factor subunit
  Uniprot ID: O00267
  ENSP ID: ENSP00000404029
MSDSEDSNFSEEEDSERSSDGEEAEVDEERRSAAGSEKEEEPEDEEEEEEEEEYDEEEEEEDDDRPPKKPRHGGFILDEADVDDEYEDEDQWEDGAEDILEKEEIEASNIDNVVLDEDRSGARRLQNLWRDQREEELGEYYMKKYAKSSVGETVYGGSDELSDDITQQQLLPGVKDPNLWTVKCKIGEERATAISLMRKFIAYQFTDTPLQIKSVVAPEHVKGYIYVEAYKQTHVKQAIEGVGNLRLGYWNQQMVPIKEMTDVLKVVKEVANLKPKSWVRLKRGIYKDDIAQVDYVEPSQNTISLKMIPRIDYDRIKARMSLKDWFAKRKKFKRPPQRLFDAEKIRSLGGDVASDGDFLIFEGNRYSRKGFLFKSFAMSAVITEGVKPTLSELEKFEDQPEGIDLEVVTESTGKEREHNFQPGDNVEVCEGELINLQGKILSVDGNKITIMPKHEDLKDMLEFPAQELRKYFKMGDHVKVIAGRFEGDTGLIVRVEENFVILFSDLTMHELKVLPRDLQLCSETASGVDVGGQHEWGELVQLDPQTVGVIVRLERETFQVLNMYGKVVTVRHQAVTRKKDNRFAVALDSEQNNIHVKDIVKVIDGPHSGREGEIRHLFRSFAFLHCKKLVENGGMFVCKTRHLVLAGGSKPRDVTNFTVGGFAPMSPRISSPMHPSAGGQRGGFGSPGGGSGGMSRGRGRRDNELIGQTVRISQGPYKGYIGVVKDATESTARVELHSTCQTISVDRQRLTTVGSRRPGGMTSTYGRTPMYGSQTPMYGSGSRTPMYGSQTPLQDGSRTPHYGSQTPLHDGSRTPAQSGAWDPNNPNTPSRAEEEYEYAFDDEPTPSPQAYGGTPNPQTPGYPDPSSPQVNPQYNPQTPGTPAMYNTDQFSPYAAPSPQGSYQPSPSPQSYHQVAPSPAGYQNTHSPASYHPTPSPMAYQASPSPSPVGYSPMTPGAPSPGGYNPHTPGSGIEQNSSDWVTTDIQVKVRDTYLDTQVVGQTGVIRSVTGGMCSVYLKDSEKVVSISSEHLEPITPTKNNKVKVILGEDREATGVLLSIDGEDGIVRMDLDEQLKILNLRFLGKLLEA

SEQ ID NO: 83759 - protein, 1087 aa, Homo sapiens; identical to SEQ ID NO: 83758
  Payload ID: 16669
  Gene Symbol: SUPT5H
  Gene Name: SPT5 homolog, DSIF elongation factor subunit
  Uniprot ID: O00267
  ENSP ID: ENSP00000469090

SEQ ID NO: 83760 - protein, 164 aa, Homo sapiens
  Payload ID: 16669
  Gene Symbol: SUPT5H
  Gene Name: SPT5 homolog, DSIF elongation factor subunit
  ENSP ID: ENSP00000469915
DQWEDGAEDILEKEEIEASNIDNVVLDEDRSGARRLQNLWRDQREEELGEYYMKKYAKSSVGETVYGGSDELSDDITQQQLLPGVKDPNLWTVKCKIGEERATAISLMRKFIAYQFTDTVDYVEPSQNTISLKMIPRIDYDRIKARMSLKDWFAKRKKFKRPPQ

SEQ ID NO: 83761 - protein, 1087 aa, Homo sapiens; identical to SEQ ID NO: 83758
  Payload ID: 16669
  Gene Symbol: SUPT5H
  Gene Name: SPT5 homolog, DSIF elongation factor subunit
  Uniprot ID: O00267
  ENSP ID: ENSP00000470252

SEQ ID NO: 83762 - protein, 102 aa, Homo sapiens
  Payload ID: 16669
  Gene Symbol: SUPT5H
  Gene Name: SPT5 homolog, DSIF elongation factor subunit
  ENSP ID: ENSP00000470595
MSDSEDSNFSEEEDSERSSDGEEAEVDEERRSAAGSEKEEEPEDEEEEEEEEEYDEEEEEEDDDRPPKKPRHGGFILDEADVDDEYEDEDQWEDGAEDILEK

SEQ ID NO: 83763 - protein, 54 aa, Homo sapiens
  Payload ID: 16669
  Gene Symbol: SUPT5H
  Gene Name: SPT5 homolog, DSIF elongation factor subunit
  ENSP ID: ENSP00000471561
MSDSEDSNFSEEEDSERSSDGEEAEVDEERRSAAGSEKEEEPEDEEEEEEEEEY

SEQ ID NO: 83764 - protein, 102 aa, Homo sapiens; identical to SEQ ID NO: 83762
  Payload ID: 16669
  Gene Symbol: SUPT5H
  Gene Name: SPT5 homolog, DSIF elongation factor subunit
  ENSP ID: ENSP00000472675

SEQ ID NO: 83765 - protein, 1726 aa, Homo sapiens
  Payload ID: 16670
  Gene Symbol: SUPT6H
  Gene Name: SPT6 homolog, histone chaperone
  Uniprot ID: Q7KZ85
  ENSP ID: ENSP00000319104
MSDFVESEAEESEEEYNDEGEVVPRVTKKFVEEEDDDEEEEEENLDDQDEQGNLKGFINDDDDEDEGEEDEGSDSGDSEDDVGHKKRKRTSFDDRLEDDDFDLIEENLGVKVKRGQKYRRVKKMSDDEDDDEEEYGKEEHEKEAIAEEIFQDGEGEEGQEAMEAPMAPPEEEEEDDEESDIDDFIVDDDGQPLKKPKWRKKLPGYTDAALQEAQEIFGVDFDYDEFEKYNEYDEELEEEYEYEDDEAEGEIRVRPKKTTKKRVSRRSIFEMYEPSELESSHLTDQDNEIRATDLPERFQLRSIPVKGAEDDELEEEADWIYRNAFATPTISLQESCDYLDRGQPASSFSRKGPSTIQKIKEALGFMRNQHFEVPFIAFYRKEYVEPELHINDLWRVWQWDEKWTQLRIRKENLTRLFEKMQAYQYEQISADPDKPLADGIRALDTTDMERLKDVQSMDELKDVYNHFLLYYGRDIPKMQNAAKASRKKLKRVREEGDEEGEGDEAEDEEQRGPELKQASRRDMYTICQSAGLDGLAKKFGLTPEQFGENLRDSYQRHETEQFPAEPLELAKDYVCSQFPTPEAVLEGARYMVALQIAREPLVRQVLRQTFQERAKLNITPTKKGRKDVDEAHYAYSFKYLKNKPVKELRDDQFLKICLAEDEGLLTTDISIDLKGVEGYGNDQTYFEEIKQFYYRDEFSHQVQEWNRQRTMAIERALQQFLYVQMAKELKNKLLAEAKEYVIKACSRKLYNWLRVAPYRPDQQVEEDDDFMDENQGKGIRVLGIAFSSARDHPVFCALVNGEGEVTDFLRLPHFTKRRTAWREEEREKKAQDIETLKKFLLNKKPHVVTVAGENRDAQMLIEDVKRIVHELDQGQQLSSIGVELVDNELAILYMNSKKSEAEFRDYPPVLRQAVSLARRIQDPLIEFAQVCSSDEDILCLKFHPLQEHVVKEELLNALYCEFINRVNEVGVDVNRAIAHPYSQALIQYVCGLGPRKGTHLLKILKQNNTRLESRTQLVTMCHMGPKVFMNCAGFLKIDTASLGDSTDSYIEVLDGSRVHPETYEWARKMAVDALEYDESAEDANPAGALEEILENPERLKDLDLDAFAEELERQGYGDKHITLYDIRAELSCRYKDLRTAYRSPNTEEIFNMLTKETPETFYIGKLIICNVTGIAHRRPQGESYDQAIRNDETGLWQCPFCQQDNFPELSEVWNHFDSGSCPGQAIGVKTRLDNGVTGFIPTKFLSDKVVKRPEERVKVGMTVHCRIMKIDIEKFSADLTCRTSDLMDRNNEWKLPKDTYYDFDAEAADHKQEEDMKRKQQRTTYIKRVIAHPSFHNINFKQAEKMMETMDQGDVIIRPSSKGENHLTVTWKVSDGIYQHVDVREEGKENAFSLGATLWINSEEFEDLDEIVARYVQPMASFARDLLNHKYYQDCSGGDRKKLEELLIKTKKEKPTFIPYFICACKELPGKFLLGYQPRGKPRIEYVTVTPEGFRYRGQIFPTVNGLFRWFKDHYQDPVPGITPSSSSRTRTPASINATPANINLADLTRAVNALPQNMTSQMFSAIAAVTGQGQNPNATPAQWASSQYGYGGSGGGSSAYHVFPTPAQQPVATPLMTPSYSYTTPSQPITTPQYHQLQASTTPQSAQAQPQPSSSSRQRQQQPKSNSHAAIDWGKMAEQWLQEKEAERRKQKQRLTPRPSPSPMIESTPMSIAGDATPLLDEMDR

SEQ ID NO: 83766 - protein, 1726 aa, Homo sapiens; identical to SEQ ID NO: 83765
  Payload ID: 16670
  Gene Symbol: SUPT6H
  Gene Name: SPT6 homolog, histone chaperone
  Uniprot ID: Q7KZ85
  ENSP ID: ENSP00000338143

SEQ ID NO: 83767 - protein, 50 aa, Homo sapiens
  Payload ID: 16670
  Gene Symbol: SUPT6H
  Gene Name: SPT6 homolog, histone chaperone
  ENSP ID: ENSP00000464545
MSDFVESEAEESEEEYNDEGEVVPRVTKKFVEEEDDDEEEEEENLDDQDE

SEQ ID NO: 83768 - protein, 53 aa, Homo sapiens
  Payload ID: 16670
  Gene Symbol: SUPT6H
  Gene Name: SPT6 homolog, histone chaperone
  ENSP ID: ENSP00000465508
MSDFVESEAEESEEEYNDEGEVVPRVTKKFVEEEDDGEEAPASSFSPLLLSFG

SEQ ID NO: 83769 - protein, 414 aa, Homo sapiens
  Payload ID: 16671
  Gene Symbol: SUPT7L
  Gene Name: SPT7-like STAGA complex gamma subunit
  Uniprot ID: O94864
  ENSP ID: ENSP00000336750
MNLQRYWGEIPISSSQTNRSSFDLLPREFRLVEVHDPPLHQPSANKPKPPTMLDIPSEPCSLTIHTIQLIQHNRRLRNLIATAQAQNQQQTEGVKTEESEPLPSCPGSPPLPDDLLPLDCKNPNAPFQIRHSDPESDFYRGKGEPVTELSWHSCRQLLYQAVATILAHAGFDCANESVLETLTDVAHEYCLKFTKLLRFAVDREARLGQTPFPDVMEQVFHEVGIGSVLSLQKFWQHRIKDYHSYMLQISKQLSEEYERIVNPEKATEDAKPVKIKEEPVSDITFPVSEELEADLASGDQSLPMGVLGAQSERFPSNLEVEASPQASSAEVNASPLWNLAHVKMEPQESEEGNVSGHGVLGSDVFEEPMSGMSEAGIPQSPDDSDSSYGSHSTDSLMGSSPVFNQRCKKRMRKI

SEQ ID NO: 83770 - protein, 412 aa, Homo sapiens
  Payload ID: 16671
  Gene Symbol: SUPT7L
  Gene Name: SPT7-like STAGA complex gamma subunit
  Uniprot ID: O94864
  ENSP ID: ENSP00000384469
MLRYWGEIPISSSQTNRSSFDLLPREFRLVEVHDPPLHQPSANKPKPPTMLDIPSEPCSLTIHTIQLIQHNRRLRNLIATAQAQNQQQTEGVKTEESEPLPSCPGSPPLPDDLLPLDCKNPNAPFQIRHSDPESDFYRGKGEPVTELSWHSCRQLLYQAVATILAHAGFDCANESVLETLTDVAHEYCLKFTKLLRFAVDREARLGQTPFPDVMEQVFHEVGIGSVLSLQKFWQHRIKDYHSYMLQISKQLSEEYERIVNPEKATEDAKPVKIKEEPVSDITFPVSEELEADLASGDQSLPMGVLGAQSERFPSNLEVEASPQASSAEVNASPLWNLAHVKMEPQESEEGNVSGHGVLGSDVFEEPMSGMSEAGIPQSPDDSDSSYGSHSTDSLMGSSPVFNQRCKKRMRKI

SEQ ID NO: 83771 - protein, 279 aa, Homo sapiens
  Payload ID: 16671
  Gene Symbol: SUPT7L
  Gene Name: SPT7-like STAGA complex gamma subunit
  Uniprot ID: O94864
  ENSP ID: ENSP00000385218
MNLQSGKGEPVTELSWHSCRQLLYQAVATILAHAGFDCANESVLETLTDVAHEYCLKFTKLLRFAVDREARLGQTPFPDVMEQVFHEVGIGSVLSLQKFWQHRIKDYHSYMLQISKQLSEEYERIVNPEKATEDAKPVKIKEEPVSDITFPVSEELEADLASGDQSLPMGVLGAQSERFPSNLEVEASPQASSAEVNASPLWNLAHVKMEPQESEEGNVSGHGVLGSDVFEEPMSGMSEAGIPQSPDDSDSSYGSHSTDSLMGSSPVFNQRCKKRMRKI

SEQ ID NO: 83772 - protein, 412 aa, Homo sapiens; identical to SEQ ID NO: 83770
  Payload ID: 16671
  Gene Symbol: SUPT7L
  Gene Name: SPT7-like STAGA complex gamma subunit
  Uniprot ID: O94864
  ENSP ID: ENSP00000385436

SEQ ID NO: 83773 - protein, 412 aa, Homo sapiens; identical to SEQ ID NO: 83770
  Payload ID: 16671
  Gene Symbol: SUPT7L
  Gene Name: SPT7-like STAGA complex gamma subunit
  Uniprot ID: O94864
  ENSP ID: ENSP00000441110

SEQ ID NO: 83774 - protein, 59 aa, Homo sapiens
  Payload ID: 16672
  Gene Symbol: SPTY2D1-AS1
  Gene Name: SPTY2D1 antisense RNA 1
  ENSP ID: ENSP00000489079
MIVLGWMFFVGLVCYMGTFPELMPPTLKWQERWPVQESKTQLRRRALGEDLLQNHVEGI

SEQ ID NO: 83775 - protein, 56 aa, Homo sapiens
  Payload ID: 16672
  Gene Symbol: SPTY2D1-AS1
  Gene Name: SPTY2D1 antisense RNA 1
  ENSP ID: ENSP00000489122
MIVLGWMFFVGLVCYMGTFPELMPPTLKWQERWPVQESKTQLRRRALGLALPPRLE

SEQ ID NO: 83776 - protein, 40 aa, Homo sapiens
  Payload ID: 16672
  Gene Symbol: SPTY2D1-AS1
  Gene Name: SPTY2D1 antisense RNA 1
  ENSP ID: ENSP00000489253
MIVVLWMLLIAGTMWKGYKYPPGGTPVEVSKDDPGEVMQL

SEQ ID NO: 83777 - protein, 76 aa, Homo sapiens
  Payload ID: 16672
  Gene Symbol: SPTY2D1-AS1
  Gene Name: SPTY2D1 antisense RNA 1
  ENSP ID: ENSP00000489337
MIVLGWMFFVGLVCYMGTFPELMPPTLKWQERWPVQESKTQLRRRALGTMWKGYKYPPGGTPVEVSKDDPGEVMQL

SEQ ID NO: 83778 - protein, 59 aa, Homo sapiens; identical to SEQ ID NO: 83774
  Payload ID: 16672
  Gene Symbol: SPTY2D1-AS1
  Gene Name: SPTY2D1 antisense RNA 1
  ENSP ID: ENSP00000489616

SEQ ID NO: 83779 - protein, 574 aa, Homo sapiens
  Payload ID: 16673
  Gene Symbol: SQLE
  Gene Name: squalene epoxidase
  Uniprot ID: Q14534
  ENSP ID: ENSP00000265896
MWTFLGIATFTYFYKKFGDFITLANREVLLCVLVFLSLGLVLSYRCRHRNGGLLGRQQSGSQFALFSDILSGLPFIGFFWAKSPPESENKEQLEARRRRKGTNISETSLIGTAACTSTSSQNDPEVIIVGAGVLGSALAAVLSRDGRKVTVIERDLKEPDRIVGEFLQPGGYHVLKDLGLGDTVEGLDAQVVNGYMIHDQESKSEVQIPYPLSENNQVQSGRAFHHGRFIMSLRKAAMAEPNAKFIEGVVLQLLEEDDVVMGVQYKDKETGDIKELHAPLTVVADGLFSKFRKSLVSNKVSVSSHFVGFLMKNAPQFKANHAELILANPSPVLIYQISSSETRVLVDIRGEMPRNLREYMVEKIYPQIPDHLKEPFLEATDNSHLRSMPASFLPPSSVKKRGVLLLGDAYNMRHPLTGGGMTVAFKDIKLWRKLLKGIPDLYDDAAIFEAKKSFYWARKTSHSFVVNILAQALYELFSATDDSLHQLRKACFLYFKLGGECVAGPVGLLSVLSPNPLVLIGHFFAVAIYAVYFCFKSEPWITKPRALLSSGAVLYKACSVIFPLIYSEMKYMVH

SEQ ID NO: 83780 - protein, 184 aa, Homo sapiens
  Payload ID: 16673
  Gene Symbol: SQLE
  Gene Name: squalene epoxidase
  ENSP ID: ENSP00000428239
MLEFHFEGEEQPLSMMKKFLKSSWVRIGFVPEEERNVLRRRKGTNISETSLIGTAACTSTSSQNDPEVIIVGAGVLGSALAAVLSRDGRKVTVIERDLKEPDRIVGEFLQPGGYHVLKDLGLGDTVEGLDAQVVNGYMIHDQESKSEVQIPYPLSENNQVQSGRAFHHGRFIMSLRKAAMAEPK

SEQ ID NO: 83781 - protein, 163 aa, Homo sapiens
  Payload ID: 16673
  Gene Symbol: SQLE
  Gene Name: squalene epoxidase
  ENSP ID: ENSP00000429916
RGEMPRNLREYMVEKIYPQIPDHLKEPFLEATDNSHLRSMPASFLPPSSVKKRGVLLLGDAYNMRHPLTGGGMTVAFKDIKLWRKLLKGIPDLYDDAAIFEAKKSFYWARKTSHSFVVNILAQALYELFSATDDSLHQLRKACFLYFKLGGECVAGPVGLLSV

SEQ ID NO: 83782 - protein, 479 aa, Homo sapiens
  Payload ID: 16673
  Gene Symbol: SQLE
  Gene Name: squalene epoxidase
  ENSP ID: ENSP00000430331
MLRRKGTNISETSLIGTAACTSTSSQNDPEVIIVGAGVLGSALAAVLSRDGRKVTVIERDLKEPDRIVGEFLQPGGYHVLKDLGLGDTVEGLDAQVVNGYMIHDQESKSEVQIPYPLSENNQVQSGRAFHHGRFIMSLRKAAMAEPNAKFIEGVVLQLLEEDDVVMGVQYKDKETGDIKELHAPLTVVADGLFSKFRKSLVSNKVSVSSHFVGFLMKNAPQFKANHAELILANPSPVLIYQISSSETRVLVDIRGEMPRNLREYMVEKIYPQIPDHLKEPFLEATDNSHLRSMPASFLPPSSVKKRGVLLLGDAYNMRHPLTGGGMTVAFKDIKLWRKLLKGIPDLYDDAAIFEAKKSFYWARKTSHSFVVNILAQALYELFSATDDSLHQLRKACFLYFKLGGECVAGPVGLLSVLSPNPLVLIGHFFAVAIYAVYFCFKSEPWITKPRALLSSGAVLYKACSVIFPLIYSEMKYMVH

SEQ ID NO: 83783 - protein, 800 aa, Homo sapiens
  Payload ID: 16674
  Gene Symbol: SART1
  Gene Name: squamous cell carcinoma antigen recognized by T cells 1
  Uniprot ID: O43290
  ENSP ID: ENSP00000310448
MGSSKKHRGEKEAAGTTAAAGTGGATEQPPRHREHKKHKHRSGGSGGSGGERRKRSRERGGERGSGRRGAEAEARSSTHGRERSQAEPSERRVKREKRDDGYEAAASSKTSSGDASSLSIEETNKLRAKLGLKPLEVNAIKKEAGTKEEPVTADVINPMALRQREELREKLAAAKEKRLLNQKLGKIKTLGEDDPWLDDTAAWIERSRQLQKEKDLAEKRAKLLEEMDQEFGVSTLVEEEFGQRRQDLYSARDLQGLTVEHAIDSFREGETMILTLKDKGVLQEEEDVLVNVNLVDKERAEKNVELRKKKPDYLPYAEDESVDDLAQQKPRSILSKYDEELEGERPHSFRLEQGGTADGLRERELEEIRAKLRLQAQSLSTVGPRLASEYLTPEEMVTFKKTKRRVKKIRKKEKEVVVRADDLLPLGDQTQDGDFGSRLRGRGRRRVSEVEEEKEPVPQPLPSDDTRVENMDISDEEEGGAPPPGSPQVLEEDEAELELQKQLEKGRRLRQLQQLQQLRDSGEKVVEIVKKLESRQRGWEEDEDPERKGAIVFNATSEFCRTLGEIPTYGLAGNREEQEELMDFERDEERSANGGSESDGEENIGWSTVNLDEEKQQQDFSASSTTILDEEPIVNRGLAAALLLCQNKGLLETTVQKVARVKAPNKSLPSAVYCIEDKMAIDDKYSRREEYRGFTQDFKEKDGYKPDVKIEYVDETGRKLTPKEAFRQLSHRFHGKGSGKMKTERRMKKLDEEALLKKMSSSDTPLGTVALLQEKQKAQKTPYIVLSGSGKSMNANTITK

SEQ ID NO: 83784 - protein, 164 aa, Homo sapiens
  Payload ID: 16674
  Gene Symbol: SART1
  Gene Name: squamous cell carcinoma antigen recognized by T cells 1
  ENSP ID: ENSP00000436218
MGSSKKHRGEKEAAGTTAAAGTGGATEQPPRHREHKKHKHRSGGSGGSGGERRKRSRERGGERGSGRRGAEAEARSSTHGRERSQAEPSERRVKREKRDDGYEAAASSKTSSGDASSLSIEETNKLRAKLGLKPLEVNAIKKAMGGHSLTSGPPFQRRAPRRSP

SEQ ID NO: 83785 - protein, 963 aa, Homo sapiens
  Payload ID: 16675
  Gene Symbol: SART3
  Gene Name: squamous cell carcinoma antigen recognized by T cells 3
  Uniprot ID: Q15020
  ENSP ID: ENSP00000228284
MATAAETSASEPEAESKAGPKADGEEDEVKAARTRRKVLSRAVAAATYKTMGPAWDQQEEGVSESDGDEYAMASSAESSPGEYEWEYDEEEEKNQLEIERLEEQLSINVYDYNCHVDLIRLLRLEGELTKVRMARQKMSEIFPLTEELWLEWLHDEISMAQDGLDREHVYDLFEKAVKDYICPNIWLEYGQYSVGGIGQKGGLEKVRSVFERALSSVGLHMTKGLALWEAYREFESAIVEAARLEKVHSLFRRQLAIPLYDMEATFAEYEEWSEDPIPESVIQNYNKALQQLEKYKPYEEALLQAEAPRLAEYQAYIDFEMKIGDPARIQLIFERALVENCLVPDLWIRYSQYLDRQLKVKDLVLSVHNRAIRNCPWTVALWSRYLLAMERHGVDHQVISVTFEKALNAGFIQATDYVEIWQAYLDYLRRRVDFKQDSSKELEELRAAFTRALEYLKQEVEERFNESGDPSCVIMQNWARIEARLCNNMQKARELWDSIMTRGNAKYANMWLEYYNLERAHGDTQHCRKALHRAVQCTSDYPEHVCEVLLTMERTEGSLEDWDIAVQKTETRLARVNEQRMKAAEKEAALVQQEEEKAEQRKRARAEKKALKKKKKIRGPEKRGADEDDEKEWGDDEEEQPSKRRRVENSIPAAGETQNVEVAAGPAGKCAAVDVEPPSKQKEKAASLKRDMPKVLHDSSKDSITVFVSNLPYSMQEPDTKLRPLFEACGEVVQIRPIFSNRGDFRGYCYVEFKEEKSALQALEMDRKSVEGRPMFVSPCVDKSKNPDFKVFRYSTSLEKHKLFISGLPFSCTKEELEEICKAHGTVKDLRLVTNRAGKPKGLAYVEYENESQASQAVMKMDGMTIKENIIKVAISNPPQRKVPEKPETRKAPGGPMLLPQTYGARGKGRTQLSLLPRALQRPSAAAPQAENGPAAAPAVAAPAATEAPKMSNADFAKLFLRK

SEQ ID NO: 83786 - protein, 927 aa, Homo sapiens
  Payload ID: 16675
  Gene Symbol: SART3
  Gene Name: squamous cell carcinoma antigen recognized by T cells 3
  Uniprot ID: Q15020
  ENSP ID: ENSP00000414453
MATAAETSASEPEAESKAGPKADGEEDEVKAARTRRKVLSRAVAAATYKTMGPAWDQQEEGVSESDGDEYAMASSAESSPGEYEWEYDEEEEKNQLEIERLEEQLSINVYDYNCHVDLIRLLRLEGELTKVRMARQKMSEIFPLTEELWLEWLHDEISMAQDGLDREHVYDLFEKAVKDYICPNIWLEYGQYSVGGIGQKGGLEKVRSVFERALSSVGLHMTKGLALWEAYREFESAIVEAARLEKVHSLFRRQLAIPLYDMEATFAEYEEWSEDPIPESVIQNYNKALQQLEKYKPYEEALLQAEAPRLAEYQAYIDFEMKIGDPARIQLIFERALVENCLVPDLWIRYSQYLDRQLKVKDLVLSVHNRAIRNCPWTVALWSRYLLAMERHGVDHQVISDSSKELEELRAAFTRALEYLKQEVEERFNESGDPSCVIMQNWARIEARLCNNMQKARELWDSIMTRGNAKYANMWLEYYNLERAHGDTQHCRKALHRAVQCTSDYPEHVCEVLLTMERTEGSLEDWDIAVQKTETRLARVNEQRMKAAEKEAALVQQEEEKAEQRKRARAEKKALKKKKKIRGPEKRGADEDDEKEWGDDEEEQPSKRRRVENSIPAAGETQNVEVAAGPAGKCAAVDVEPPSKQKEKAASLKRDMPKVLHDSSKDSITVFVSNLPYSMQEPDTKLRPLFEACGEVVQIRPIFSNRGDFRGYCYVEFKEEKSALQALEMDRKSVEGRPMFVSPCVDKSKNPDFKVFRYSTSLEKHKLFISGLPFSCTKEELEEICKAHGTVKDLRLVTNRAGKPKGLAYVEYENESQASQAVMKMDGMTIKENIIKVAISNPPQRKVPEKPETRKAPGGPMLLPQTYGARGKGRTQLSLLPRALQRPSAAAPQAENGPAAAPAVAAPAATEAPKMSNADFAKLFLRK

SEQ ID NO: 83787 - protein, 305 aa, Homo sapiens
  Payload ID: 16675
  Gene Symbol: SART3
  Gene Name: squamous cell carcinoma antigen recognized by T cells 3
  ENSP ID: ENSP00000446577
MATAAETSASEPEAESKAGPKADGEEDEVKAARTRRKVLSRAVAAATYKTMGPAWDQQEEGVSESDGDEYAMASSAESSPGEYEWEYDEEEEKNQLEIERLEEQLSINVYDYNCHVDLIRLLRLEGELTKVRMARQKMSEIFPLTEELWLEWLHDEISMAQDGLDREHVYDLFEKAVKDYICPNIWLEYGQYSVGGIGQKGGLEKVRSVFERALSSVGLHMTKGLALWEAYREFESAIVEAARLEKVHSLFRRQLAIPLYDMEATFAEYEEWSEDPIPESVIQNYNKALQQLEKYKPYEEALVKK

SEQ ID NO: 83788 - protein, 156 aa, Homo sapiens
  Payload ID: 16675
  Gene Symbol: SART3
  Gene Name: squamous cell carcinoma antigen recognized by T cells 3
  ENSP ID: ENSP00000447324
MARQKMSEIFPLTEELWLEWLHDEISMAQDGLDREHVYDLFEKAVKDYICPNIWLEYGQYSVGGIGQKGGLEKVRSVFERALSSVGLHMTKGLALWEAYREFESAIVEAARLEKVHSLFRRQLAIPLYDMEATFAEYEEWSEDPIPESVIQNYNKA

SEQ ID NO: 83789 - protein, 144 aa, Homo sapiens
  Payload ID: 16675
  Gene Symbol: SART3
  Gene Name: squamous cell carcinoma antigen recognized by T cells 3
  ENSP ID: ENSP00000447875
ALEMDRKSVEGRPMFVSPCVDKSKNPDFKVFRYSTSLEKHKLFISGLPFSCTKEELEEICKAHGTVKDLRLVTNRAGKPKGLAYVEYENESQASQAVMKMDGMTIKENIIKVAISNPPQRKVPEKPETRKAPGGPMLLPQTYGA

SEQ ID NO: 83790 - protein, 129 aa, Homo sapiens
  Payload ID: 16675
  Gene Symbol: SART3
  Gene Name: squamous cell carcinoma antigen recognized by T cells 3
  Uniprot ID: Q15020
  ENSP ID: ENSP00000448554
MATAAETSASEPEAESKAGPKADGEEDEVKAARTRRKVLSRAVAAATYKTMGPAWDQQEEGVSESDGDEYAMASSAESSPGEYEWEYDEEEEKNQLEIERLEEQVGPGVGSGHLPVFQVLGSPCPGPPP

SEQ ID NO: 83791 - protein, 771 aa, Homo sapiens
  Payload ID: 16675
  Gene Symbol: SART3
  Gene Name: squamous cell carcinoma antigen recognized by T cells 3
  ENSP ID: ENSP00000449386
MATAAETSASEPEAESKAGPKADGEEDEVKAARTRRKVLSRAVAAATYKTMGPAWDQQEEGVSESDGDEYAMASSAESSPGEYEWEYDEEEEKNQLEIERLEEQLSINVYDYNCHVDLIRLLRLEGELTKVRMARQKMSEIFPLTEELWLEWLHDEISMAQDGLDREHVYDLFEKAVKDYICPNIWLEYGQYSVGGIGQKGGLEKVRSVFERALSSVGLHMTKGLALWEAYREFESAIVEAARPVAGFLSPFDREQTFDSQLEKVHSLFRRQLAIPLYDMEATFAEYEEWSEDPIPESVIQNYNKALQQLEKYKPYEEALLQAEAPRLAEYQAYIDFEMKIGDPARIQLIFERALVENCLVPDLWIRYSQYLDRQLKVKDLVLSVHNRAIRNCPWTVALWSRYLLAMERHGVDHQVISVTFEKALNAGFIQATDYVEIWQAYLDYLRRRVDFKQDSSKELEELRAAFTRALEYLKQEVEERFNESGDPSCVIMQNWARIEARLCNNMQKARELWDSIMTRGNAKYANMWLEYYNLERAHGDTQHCRKALHRAVQCTSDYPEHVCEVLLTMERTEGSLEDWDIAVQKTETRLARVNEQRMKAAEKEAALVQQEEEKAEQRKRARAEKKALKKKKKIRGPEKRGADEDDEKEWGDDEEEQPSKRRRVENSIPAAGETQNVEVAAGPAGKCAAVDVEPPSKQKEKAASLKRDMPKVLHDSSKDSITVFVSNLPYSMQEPDTKLRPLFEACGEVVQIRPIFSNRGDFRGYCYVEF

SEQ ID NO: 83792 - protein, 111 aa, Homo sapiens
  Payload ID: 16675
  Gene Symbol: SART3
  Gene Name: squamous cell carcinoma antigen recognized by T cells 3
  ENSP ID: ENSP00000449602
MARQKMSEIFPLTEELWLEWLHDEISMAQDGLDREHVYDLFEKAVKDYICPNIWLEYGQYSVGGIGQKGGLEKVRSVFERALSSVGLHMTKGLALWEAYREFESAIVEAAR

SEQ ID NO: 83793 - protein, 364 aa, Homo sapiens
  Payload ID: 16675
  Gene Symbol: SART3
  Gene Name: squamous cell carcinoma antigen recognized by T cells 3
  Uniprot ID: Q15020
  ENSP ID: ENSP00000449743
MATAAETSASEPEAESKAGPKADGEEDEVKAARTRRKVLSRAVAAATYKTMGPAWDQQEEGVSESDGDEYAMASSAESSPGEYEWEYDEEEEKNQLEIERLEEQLSINVYDYNCHVDLIRLLRLEGELTKVRMARQKMSEIFPLTEELWLEWLHDEISMAQDGLDREHVYDLFEKAVKDYICPNIWLEYGQYSVGGIGQKGGLEKVRSVFERALSSVGLHMTKGLALWEAYREFESAIVEAARLEKVHSLFRRQLAIPLYDMEATFAEYEEWSEDPIPESVIQNYNKALQQLEKYKPYEEALLQAEAPRLAEYQAYIDFEMKIGDPARIQLIFERALVENCLVPDLWIRYRSTTESKGFGFICT

SEQ ID NO: 83794 - protein, 107 aa, Homo sapiens
  Payload ID: 16676
  Gene Symbol: SLIRP
  Gene Name: SRA stem-loop interacting RNA binding protein
  Uniprot ID: Q9GZT3
  ENSP ID: ENSP00000238688
MAASAARGAAALRRSINQPVAFVRRIPWTAASSQLKEHFAQFGHVRRCILPFDKETGFHRGLGWVQFSSEEGLRNALQQENHIIDGVKVHTRRPKLPQTSDDEKKDF

SEQ ID NO: 83795 - protein, 56 aa, Homo sapiens
  Payload ID: 16676
  Gene Symbol: SLIRP
  Gene Name: SRA stem-loop interacting RNA binding protein
  ENSP ID: ENSP00000450587
VRRIPWTAASSQLKEHFAQFGHVRRTRRLAFTEVWVGFSFLQKKDFGMHYNRKIIL

SEQ ID NO: 83796 - protein, 96 aa, Homo sapiens
  Payload ID: 16676
  Gene Symbol: SLIRP
  Gene Name: SRA stem-loop interacting RNA binding protein
  ENSP ID: ENSP00000450770
  MOD_RES (1)..(1): Any amino acid
XSAARGAAALRRSINQPVAFVRRIPWTAASSQLKEHFAQFGHVRRCILPFDKETGFHRGLGWVQFSSEEGLRNALQQENHIIDGVKVNLFLCQIHT

SEQ ID NO: 83797 - protein, 124 aa, Homo sapiens
  Payload ID: 16676
  Gene Symbol: SLIRP
  Gene Name: SRA stem-loop interacting RNA binding protein
  ENSP ID: ENSP00000450849
MAASAARGAAALRRSINQPVAFVRRIPWTAASSQLKEHFAQFGHVRRCILPFDKETGFHRGLGWVQFSSEEGLRNALQQENHIIDGVKESLFRDTQWTAKGERPPQANGRKAAQSQPARFTPPK

SEQ ID NO: 83798 - protein, 109 aa, Homo sapiens
  Payload ID: 16676
  Gene Symbol: SLIRP
  Gene Name: SRA stem-loop interacting RNA binding protein
  Uniprot ID: Q9GZT3
  ENSP ID: ENSP00000450909
MAASAARGAAALRRSINQPVAFVRRIPWTAASSQLKEHFAQFGHVRRCILPFDKETGFHRGLGWVQFSSEEGLRNALQQENHIIDGVKVQVHTRRPKLPQTSDDEKKDF

SEQ ID NO: 83799 - protein, 40 aa, Homo sapiens
  Payload ID: 16676
  Gene Symbol: SLIRP
  Gene Name: SRA stem-loop interacting RNA binding protein
  ENSP ID: ENSP00000451606
  MOD_RES (1)..(1): Any amino acid
XAASAARGAAALRRSINQPVAFVRRIPWTAASRIIVHIAQ

SEQ ID NO: 83800 - protein, 98 aa, Homo sapiens
  Payload ID: 16676
  Gene Symbol: SLIRP
  Gene Name: SRA stem-loop interacting RNA binding protein
  ENSP ID: ENSP00000452057
MAASAARGAAALRRSINQPVAFVRRIPWTAASSQLKEHFAQFGHVRRCILPFDKETGFHRGLGWVQFSSEEGLRNALQQENHIIDGVKCLKSQPTIRS

SEQ ID NO: 83801 - protein, 72 aa, Homo sapiens
  Payload ID: 16676
  Gene Symbol: SLIRP
  Gene Name: SRA stem-loop interacting RNA binding protein
  ENSP ID: ENSP00000452162
NQPVAFVRRIPWTAASSQLKEHFAQFGHVRRCILPFESLFRDTQWTAKGERPPQANGRKAAQSQPARFTPPK

SEQ ID NO: 83802 - protein, 76 aa, Homo sapiens
  Payload ID: 16676
  Gene Symbol: SLIRP
  Gene Name: SRA stem-loop interacting RNA binding protein
  ENSP ID: ENSP00000452329
NQPVAFVRRIPWTAASSQLKEHFAQFGHVRRCILPFDKETGFHRGLGWVQFSSEEGLRNALQQENHIIDGVKSMVS

SEQ ID NO: 83803 - protein, 92 aa, Homo sapiens
  Payload ID: 16676
  Gene Symbol: SLIRP
  Gene Name: SRA stem-loop interacting RNA binding protein
  ENSP ID: ENSP00000478794
MAASAARGAAALRRSINQPVAFVRRIPWTAASSQLKEHFAQFGHVRRCILPFDKETGFHRGLGWVQFSSEEGLRNALQQENHIIDGVKCLFF

SEQ ID NO: 83804 - protein, 509 aa, Homo sapiens
  Payload ID: 16677
  Gene Symbol: SHB
  Gene Name: Src homology 2 domain containing adaptor protein B
  Uniprot ID: Q15464
  ENSP ID: ENSP00000366936
MAKWLNKYFSLGNSKTKSPPQPPRPDYREQRRRGERPSQPPQAVPQASSAASASCGPATASCFSASSGSLPDDSGSTSDLIRAYRAQKERDFEDPYNGPGSSLRKLRAMCRLDYCGGSGEPGGVQRAFSASSASGAAGCCCASSGAGAAASSSSSSGSPHLYRSSSERRPATPAEVRYISPKHRLIKVESAAGGGAGDPLGGACAGGRTWSPTACGGKKLLNKCAASAAEESGAGKKDKVTIADDYSDPFDAKNDLKSKAGKGESAGYMEPYEAQRIMTEFQRQESVRSQHKGIQLYDTPYEPEGQSVDSDSESTVSPRLRESKLPQDDDRPADEYDQPWEWNRVTIPALAAQFNGNEKRQSSPSPSRDRRRQLRAPGGGFKPIKHGSPEFCGILGERVDPAVPLEKQIWYHGAISRGDAENLLRLCKECSYLVRNSQTSKHDYSLSLRSNQGFMHMKLAKTKEKYVLGQNSPPFDSVPEVIHYYTTRKLPIKGAEHLSLLYPVAVRTL

SEQ ID NO: 83805 - protein, 495 aa, Homo sapiens
  Payload ID: 16678
  Gene Symbol: SHE
  Gene Name: Src homology 2 domain containing E
  Uniprot ID: Q5VZ18
  ENSP ID: ENSP00000307369
MQWSPTPGASACLGWASSLACSTAPTLLGRAGRGPLMAAKWFKEFPLNLKTVSERAKPGGGGGKLRKNSEAGGAGPGPGKGRKNSAAELGSGRAGVGPKDSRLSRDSLQGLIQAAAGKGRKNSRATEEEPHRGATKSSGCSTYINRLIKVDTQEKNGKSNYPSSSSSSSSSSSSASSSPSSLGPELDKGKIIKQQETVIILEDYADPYDAKRTKGQRDAERVGENDGYMEPYDAQQMITEIRRRGSKDPLVKALQLLDSPCEPADGGLKSETLAKRRSSKDLLGKPPQLYDTPYEPAEGGPRAEGKARPPDSRLPENDERPAAEYEQPWEWKKEQIVRALSVQFEGAERPSFREETVRQHHRQKSWTQKILKPALSDHSEGEKVDPGLPLEKQPWYHGAISRAEAESRLQPCKEAGYLVRNSESGNSRYSIALKTSQGCVHIIVAQTKDNKYTLNQTSAVFDSIPEVVHYYSNEKLPFKGAEHMTLLYPVHSKLH

SEQ ID NO: 83806 - protein, 132 aa, Homo sapiens
  Payload ID: 16678
  Gene Symbol: SHE
  Gene Name: Src homology 2 domain containing E
  ENSP ID: ENSP00000451961
  MOD_RES (1)..(1): Any amino acid
XEGKARPPDSRLPENDERPAAEYEQPWEWKKEQIVRALSVQFEGAERPSFREETVRQHHRQKSWTQKILKPALSDHSEGEKVDPGLPLEKQPWYHGAISRAEAESRLQPCKEAGYLVRNSESGNSRYSIALK

SEQ ID NO: 83807 - protein, 41 aa, Homo sapiens
  Payload ID: 16678
  Gene Symbol: SHE
  Gene Name: Src homology 2 domain containing E
  ENSP ID: ENSP00000452008
  MOD_RES (1)..(1): Any amino acid
XSRAEAESRLQPCKEAGYLVRNSESGNSRYSIALKNHHLLS

SEQ ID NO: 83808 - protein, 423 aa, Homo sapiens
  Payload ID: 16679
  Gene Symbol: SHF
  Gene Name: Src homology 2 domain containing F
  Uniprot ID: Q7M4L6
  ENSP ID: ENSP00000290894
MQQEGGPVRSAPCRTGTLEGSRQGSPGHRKRASPKGSLSSAQPHSWMLTPSPLNSHCAHREPISSSPQPVANGPKQKKKSNWRSTTRLRIIRLRDRLEPRPLAILEDYADPFDVQETGEGSAGASGAPEKVPENDGYMEPYEAQKMMAEIRGSKETATQPLPLYDTPYEPEEDGATAEGEGAPWPRESRLPEDDERPPEEYDQPWEWKKERISKAFAVDIKVIKDLPWPPPVGQLDSSPSLPDGDRDISGPASPLPEPSLEDSSAQFEGPEKSCLSPGREEKGRLPPRLSAGNPKSAKPLSMEPSSPLGEWTDPALPLENQVWYHGAISRTDAENLLRLCKEASYLVRNSETSKNDFSLSLKSSQGFMHMKLSRTKEHKYVLGQNSPPFSSVPEIVHHYASRKLPIKGAEHMSLLYPVAIRTL

SEQ ID NO: 83809 - protein, 239 aa, Homo sapiens
  Payload ID: 16679
  Gene Symbol: SHF
  Gene Name: Src homology 2 domain containing F
  ENSP ID: ENSP00000411530
MEPYEAQKMMAEIRGSKETATQPLPLYDTPYEPEEDGATAEGEGAPWPRESRLPEDDERPPEEYDQPWEWKKERISKAFAAQFEGPEKSCLSPGREEKGRLPPRLSAGNPKSAKPLSMEPSSPLGEWTDPALPLENQVWYHGAISRTDAENLLRLCKEASYLVRNSETSKNDFSLSLKSSQGFMHMKLSRTKEHKYVLGQNSPPFSSVPEIVHHYASRKLPIKGAEHMSLLYPVAIRTL

SEQ ID NO: 83810 - protein, 199 aa, Homo sapiens
  Payload ID: 16679
  Gene Symbol: SHF
  Gene Name: Src homology 2 domain containing F
  ENSP ID: ENSP00000452726
  MOD_RES (1)..(1): Any amino acid
XGEGSAGASGAPEKVPENDGYMEPYEAQKMMAEIRGSKETATQPLPLYDTPYEPEEDGATAEGEGAPWPRESRLPEDDERPPEEYDQPWEWKKERISKAFAAQFEGPEKSCLSPGREEKGRLPPRLSAGNPKSAKPLSMEPSSPLGEWTDPALPLENQVWYHGAISRTDAENLLRLCKEASYLVRNSETSKNDFSLSLK

SEQ ID NO: 83811 - protein, 290 aa, Homo sapiens
  Payload ID: 16679
  Gene Symbol: SHF
  Gene Name: Src homology 2 domain containing F
  ENSP ID: ENSP00000453168
MLLSGAPPAGSRPGPRTQGSAGGGPGGSRRGAGGAGAGPGGGGSGGVAKWLREHLGFRGGGGGGGGSKPAPPEPDYRPPAPSPAAPPAPPPDILAAYRLQRERDFEDPYSGGSSGSAALATPVAPGPTPPPRHGSPPHRLIRVETPGPPAPPADERISGPPASSDRLAILEDYADPFDVQETGEGSAGASGAPEKVPENDGYMEPYEAQKMMAEIRGSKETATQPLPLYDTPYEPEEDGATAEGEGAPWPRESRLPEDDERPPEEYDQPWEWKKERISKAFAGAARDSCT

SEQ ID NO: 83812 - protein, 414 aa, Homo sapiens
  Payload ID: 16679
  Gene Symbol: SHF
  Gene Name: Src homology 2 domain containing F
  ENSP ID: ENSP00000453260
MLLSGAPPAGSRPGPRTQGSAGGGPGGSRRGAGGAGAGPGGGGSGGVAKWLREHLGFRGGGGGGGGSKPAPPEPDYRPPAPSPAAPPAPPPDILAAYRLQRERDFEDPYSGGSSGSAALATPVAPGPTPPPRHGSPPHRLIRVETPGPPAPPADERISGPPASSDRLAILEDYADPFDVQETGEGSAGASGAPEKVPENDGYMEPYEAQKMMAEIRGSKETATQPLPLYDTPYEPEEDGATAEGEGAPWPRESRLPEDDERPPEEYDQPWEWKKERISKAFAVDIKVIKDLPWPPPVGQLDSSPSLPDGDRDISGPASPLPEPSLEDSSAQFEGPEKSCLSPGREEKGRLPPRLSAGNPKSAKPLSMEPSSPLGEWTDPALPLENQLVSRGHQPNRRREPAPAVQRGQLPGAQQ

SEQ ID NO: 83813 - protein, 367 aa, Homo sapiens
  Payload ID: 16679
  Gene Symbol: SHF
  Gene Name: Src homology 2 domain containing F
  ENSP ID: ENSP00000453370
MLLSGAPPAGSRPGPRTQGSAGGGPGGSRRGAGGAGAGPGGGGSGGVAKWLREHLGFRGGGGGGGGSKPAPPEPDYRPPAPSPAAPPAPPPDILAAYRLQRERDFEDPYSGGSSGSAALATPVAPGPTPPPRHGSPPHRLIRVETPGPPAPPADERISGPPASSDRLAILEDYADPFDVQETGEGSAGASGAPEKVPENDGYMEPYEAQKMMAEIRGSKETATQPLPLYDTPYEPEEDGATAEGEGAPWPRESRLPEDDERPPEEYDQPWEWKKERISKAFAAQFEGPEKSCLSPGREEKGRLPPRLSAGNPKSAKPLSMEPSSPLGEWTDPALPLENQLVSRGHQPNRRREPAPAVQRGQLPGAQQ

SEQ ID NO: 83814 - protein, 161 aa, Homo sapiens
  Payload ID: 16679
  Gene Symbol: SHF
  Gene Name: Src homology 2 domain containing F
  ENSP ID: ENSP00000453676
  MOD_RES (1)..(1): Any amino acid
XSPSLPDGDRDISGPASPLPEPSLEDSSAQFEGPEKSCLSPGREEKGRLPPRLSAGNPKSAKPLSMEPSSPLGEWTDPALPLENQVWYHGAISRTDAENLLRLCKEASYLLSYSRSLNCKIKEAFPRKVFVKNLIYITSEMCIALKIIKFMEHTKQPVYHF

SEQ ID NO: 83815 - protein, 146 aa, Homo sapiens
  Payload ID: 16679
  Gene Symbol: SHF
  Gene Name: Src homology 2 domain containing F
  ENSP ID: ENSP00000453827
  MOD_RES (1)..(1): Any amino acid
XDQPWEWKKERISKAFAVDIKVIKDLPWPPPVGQLDSSPSLPDGDRDISGPASPLPEPSLEDSSAQFEGPEKSCLSPGREEKGRLPPRLSAGNPKSAKPLSMEPSSPLGEWTDPALPLENQVGHPQWVGLDSEGPSRDAPLPLSHP

SEQ ID NO: 83816 - protein, 26 aa, Homo sapiens
  Payload ID: 16679
  Gene Symbol: SHF
  Gene Name: Src homology 2 domain containing F
  ENSP ID: ENSP00000453986
MEPYEAQKMMAEIRGSKETATQPLPL

SEQ ID NO: 83817 - protein, 163 aa, Homo sapiens
  Payload ID: 16679
  Gene Symbol: SHF
  Gene Name: Src homology 2 domain containing F
  ENSP ID: ENSP00000454034
  MOD_RES (1)..(1): Any amino acid
XPWPRESRLPEDDERPPEEYDQPWEWKKERISKAFAGDTHNGWAWTARDPAEMPPFLSLILSWYHGAISRTDAENLLRLCKEASYLVRNSETSKNDFSLSLKSSQGFMHMKLSRTKEHKYVLGQNSPPFSSVPEIVHHYASRKLPIKGAEHMSLLYPVAIRTL

SEQ ID NO: 83818 - protein, 340 aa, Homo sapiens
  Payload ID: 16680
  Gene Symbol: SHD
  Gene Name: Src homology 2 domain containing transforming protein D
  Uniprot ID: Q96IW2
  ENSP ID: ENSP00000446058
MAKWLRDYLSFGGRRPPPQPPTPDYTESDILRAYRAQKNLDFEDPYEDAESRLEPDPAGPGDSKNPGDAKYGSPKHRLIKVEAADMARAKALLGGPGEELEADTEYLDPFDAQPHPAPPDDGYMEPYDAQWVMSELPGRGVQLYDTPYEEQDPETADGPPSGQKPRQSRMPQEDERPADEYDQPWEWKKDHISRAFAVQFDSPEWERTPGSAKELRRPPPRSPQPAERVDPALPLEKQPWFHGPLNRADAESLLSLCKEGSYLVRLSETNPQDCSLSLRSSQGFLHLKFARTRENQVVLGQHSGPFPSVPELVLHYSSRPLPVQGAEHLALLYPVVTQTP

SEQ ID NO: 83819 - protein, 300 aa, Homo sapiens
  Payload ID: 16680
  Gene Symbol: SHD
  Gene Name: Src homology 2 domain containing transforming protein D
  ENSP ID: ENSP00000470181
MAKWLRDYLSFGGRRPPPQPPTPDYTESDILRAYRAQKNLDFEDPYEDAESRLEPDPAGPGDSKNPGDAKYGSPKHRLIKVEAADMARAKALLGGPGEELEADTEYLDPFDAQPHPAPPDDGYMEPYDAQWVMSELPGRGVQLYDTPYEEQDPETADGPPSGQKPRQSRMPQEDERPADEYDQPWEWKKDHISRAFAVQFDSPEWERTPGSAKELRRPPPRSPQPAERVDPALPLEKQPSSQGFLHLKFARTRENQVVLGQHSGPFPSVPELVLHYSSRPLPVQGAEHLALLYPVVTQTP

SEQ ID NO: 83820 - protein, 38 aa, Homo sapiens
  Payload ID: 16680
  Gene Symbol: SHD
  Gene Name: Src homology 2 domain containing transforming protein D
  ENSP ID: ENSP00000472139
DTPYEEQDPETADGPPSGQKPRQSRMPQEDERPADDAV

SEQ ID NO: 83821 - protein, 359 aa, Homo sapiens
  Payload ID: 16681
  Gene Symbol: SKAP1
  Gene Name: src kinase associated phosphoprotein 1
  Uniprot ID: Q86WV1
  ENSP ID: ENSP00000338171
MQAAALPEEIRWLLEDAEEFLAEGLRNENLSAVARDHRDHILRGFQQIKARYYWDFQPQGGDIGQDSSDDNHSGTLGLSLTSDAPFLSDYQDEGMEDIVKGAQELDNVIKQGYLEKKSKDHSFFGSEWQKRWCVVSRGLFYYYANEKSKQPKGTFLIKGYGVRMAPHLRRDSKKESCFELTSQDRRSYEFTATSPAEARDWVDQISFLLKDLSSLTIPYEEDEEEEEKEETYDDIDGFDSPSCGSQCRPTILPGSVGIKEPTEEKEEEDIYEVLPDEEHDLEEDESGTRRKGVDYASYYQGLWDCHGDQPDELSFQRGDLIRILSKEYNMYGWWVGELNSLVGIVPKEYLTTAFEVEER

SEQ ID NO: 83822 - protein, 92 aa, Homo sapiens
  Payload ID: 16681
  Gene Symbol: SKAP1
  Gene Name: src kinase associated phosphoprotein 1
  ENSP ID: ENSP00000462360
  MOD_RES (1)..(1): Any amino acid
XGDIGQDSSDDNHSGTLGLSLTSDAPFLSDYQDEGMEDIVKGAQELDNVIKQGYLEKKSKDHSFFGSEWQKRWCVVSRGLFYYYANEKIYSY

SEQ ID NO: 83823 - protein, 38 aa, Homo sapiens
  Payload ID: 16681
  Gene Symbol: SKAP1
  Gene Name: src kinase associated phosphoprotein 1
  ENSP ID: ENSP00000462437
GTLGLSLTSDAPFLSDYQDEVETGFHRVSQDGLDLLTS

SEQ ID NO: 83824 - protein, 103 aa, Homo sapiens
  Payload ID: 16681
  Gene Symbol: SKAP1
  Gene Name: src kinase associated phosphoprotein 1
  ENSP ID: ENSP00000463284
MQAAALPEEIRWLLEDAEEFLAEGLRNENLSAVARDHRDHILRGFQQIKARYYWDFQPQGGDIGQDSSDDNHSGTLGLSLTSDAPFLSDYQDEGILRRMNRRV

SEQ ID NO: 83825 - protein, 99 aa, Homo sapiens
  Payload ID: 16681
  Gene Symbol: SKAP1
  Gene Name: src kinase associated phosphoprotein 1
  ENSP ID: ENSP00000464198
MAPHLRRDSKKESCFELTSQDRRSYEFTATSPAEARDWVDQISFLLKDLSSLTIPYEEDEEEEEKEETYDDIDGFDSPSCGSQCRPTILPGSVGIKEPT

SEQ ID NO: 83826 - protein, 359 aa, Homo sapiens; identical to SEQ ID NO: 83821
  Payload ID: 16681
  Gene Symbol: SKAP1
  Gene Name: src kinase associated phosphoprotein 1
  Uniprot ID: Q86WV1
  ENSP ID: ENSP00000464311

SEQ ID NO: 83827 - protein, 32 aa, Homo sapiens
  Payload ID: 16681
  Gene Symbol: SKAP1
  Gene Name: src kinase associated phosphoprotein 1
  ENSP ID: ENSP00000464509
YNMYGWWVGELNSLVGIVPKEYLTTAFEVEER

SEQ ID NO: 83828 - protein, 359 aa, Homo sapiens
  Payload ID: 16682
  Gene Symbol: SKAP2
  Gene Name: src kinase associated phosphoprotein 2
  Uniprot ID: O75563
  ENSP ID: ENSP00000005587
MPNPSSTSSPYPLPEEIRNLLADVETFVADILKGENLSKKAKEKRESLIKKIKDVKSIYLQEFQDKGDAEDGEEYDDPFAGPPDTISLASERYDKDDEAPSDGAQFPPIAAQDLPFVLKAGYLEKRRKDHSFLGFEWQKRWCALSKTVFYYYGSDKDKQQKGEFAIDGYSVRMNNTLRKDGKKDCCFEISAPDKRIYQFTAASPKDAEEWVQQLKFVLQDMESDIIPEDYDERGELYDDVDHPLPISNPLTSSQPIDDEIYEELPEEEEDSAPVKVEEQRKMSQDSVHHTSGDKSTDYANFYQGLWDCTGAFSDELSFKRGDVIYILSKEYNRYGWWVGEMKGAIGLVPKAYIMEMYDI

SEQ ID NO: 83829 - protein, 126 aa, Homo sapiens
  Payload ID: 16682
  Gene Symbol: SKAP2
  Gene Name: src kinase associated phosphoprotein 2
  ENSP ID: ENSP00000408163
MTTRSVLDVETFVADILKGENLSKKAKEKRESLIKKIKDVKSIYLQEFQDKGDAEDGEEYDDPFAGPPDTISLASERYDKDDEAPSDGAQFPPIAAQDLPFVLKAGYLEKRRKDHSFLGFEWQKRW

SEQ ID NO: 83830 - protein, 306 aa, Homo sapiens
  Payload ID: 16683
  Gene Symbol: SRCIN1
  Gene Name: SRC kinase signaling inhibitor 1
  ENSP ID: ENSP00000477811
  MOD_RES (1)..(1): Any amino acid
XSEELEVQKPQVKLRRAVSEVARPASTPPIMASAIKDEDDEDRIIAELEVFERSSVSSLPPTPRRQLIPTLLSPQDLGPPGGSAPGPTRKAAPGPRAFCVPRIILTECAPNPPSPPEARLEELGPRTAPTPRPQTLADSTRGWDGPQSPPGVVGETSGPRSSFMPRKEGAALKRLGGGGSSLEDGGARVQCPQGPAQDGTPETSTADTYPEEILKDSGHDAQTCSREHQGQAAANSGRTTWGATAQQMDSLEETLRELEATLSNMGTGPAMGSPGSPPPLPLRPQVAARFSSSSAAFLLHFQSQTE

SEQ ID NO: 83831 - protein, 473 aa, Homo sapiens
  Payload ID: 16683
  Gene Symbol: SRCIN1
  Gene Name: SRC kinase signaling inhibitor 1
  ENSP ID: ENSP00000478342
MQPWQCLRRFALAWWERTAEGRARSPREEAGPRDPGGRGEPDPERSSPPMLSADDAEYPREYRTLGGGGGGGSGGRRFSNVGLVHTSERRHTVIAAQSLEALSGLQKADADRKRDAFMDHLKSKYPQHALALRGQQDRMREQVGGWTVDPVCLLSSLCSHLHGDSAPSGAGQPAQTRSSRHTQGAQPGLADQAAKLSYASAESLETMSEAELPLGFSRMNRFRQSLPLSRSASQTKLRSPGVLFLQFGEETRRVHITHEVSSLDTLHALIAHMFPQKLTMGMLKSPNTAILIKDEARNVFYELEDVRDIQDRSIIKIYRKEPLYAAFPGSHLTNGDLRREMVYASRESSPTRRLNNLSPAPHLASGSPPPGLPSGLPSGLQSGSPSRSRLSYAGGRPPSYAGSPVHHAAERLGGAPAAQGVSPSPSAILERRDVKPDEDLASKAGGMVLVKGEGLYADPYGLLHEGRLSLAAA

SEQ ID NO: 83832 - protein, 928 aa, Homo sapiens
  Payload ID: 16683
  Gene Symbol: SRCIN1
  Gene Name: SRC kinase signaling inhibitor 1
  ENSP ID: ENSP00000479718
  MOD_RES (1)..(1): Any amino acid
XFPQKLTMGMLKSPNTAILIKDEARNVFYELEDVRDIQDRSIIKIYRKEPLYAAFPGSHLTNGDLRREMVYASRESSPTRRLNNLSPAPHLASGSPPPGLPSGLPSGLQSGSPSRSRLSYAGGRPPSYAGSPVHHAAERLGGAPAAQGVSPSPSAILERRDVKPDEDLASKAGGMVLVKGEGLYADPYGLLHEGRLSLAAAAGDPFAYPGAGGLYKRGSVRSLSTYSAAALQSDLEDSLYKAAGGGGPLYGDGYGFRLPPSSPQKLADVAAPPGGPPPPHSPYSGPPSRGSPVRQSFRKDSGSSSVFAESPGGKTRSAGSASTAGAPPSELFPGPGERSLVGFGPPVPAKDTETRERMEAMEKQIASLTGLVQSALLRGSEPETPSEKIEGSNGAATPSAPCGSGGRSSGATPVSGPPPPSASSTPAGQPTAVSRLQMQLHLRGLQNSASDLRGQLQQLRKLQLQNQESVRALLKRTEAELSMRVSEAARRQEDPLQRQRTLVEEERLRYLNDEELITQQLNDLEKSVEKIQRDVSHNHRLVPGPELEEKALVLKQLGETLTELKAHFPGLQSKMRVVLRVEVEAVKFLKEEPQRLDGLLKRCRGVTDTLAQIRRQVDEGVWPPPNNLLSQSPKKVTAETDFNKSVDFEMPPPSPPLNLHELSGPAEGASLTPKGGNPTKGLDTPGKRSVDKAVSVEAAERDWEEKRAALTQYSAKDINRLLEETQAELLKAIPDLDCASKAHPGPAPTPDHKPPKAPHGQKAAPRTEPSGRRGSDELTVPRYRTEKPSKSPPPPPPRRSFPSSHGLTTTRTGEVVVTSKKDSAFIKKAESEELEVQKPQVKLRRAVSEVARPASTPPIMASAIKDEDDEDRIIAELESGGGSVPPMKVVTPGASRLKAAQGQAGSPDKSKHGKQRAEYMRIQAQQQV

SEQ ID NO: 83833 - protein, 1183 aa, Homo sapiens
  Payload ID: 16683
  Gene Symbol: SRCIN1
  Gene Name: SRC kinase signaling inhibitor 1
  Uniprot ID: Q9C0H9
  ENSP ID: ENSP00000480869
MGNAPSQDPERSSPPMLSADDAEYPREYRTLGGGGGGGSGGRRFSNVGLVHTSERRHTVIAAQSLEALSGLQKADADRKRDAFMDHLKSKYPQHALALRGQQDRMREQPNYWSFKTRSSRHTQGAQPGLADQAAKLSYASAESLETMSEAELPLGFSRMNRFRQSLPLSRSASQTKLRSPGVLFLQFGEETRRVHITHEVSSLDTLHALIAHMFPQKLTMGMLKSPNTAILIKDEARNVFYELEDVRDIQDRSIIKIYRKEPLYAAFPGSHLTNGDLRREMVYASRESSPTRRLNNLSPAPHLASGSPPPGLPSGLPSGLQSGSPSRSRLSYAGGRPPSYAGSPVHHAAERLGGAPAAQGVSPSPSAILERRDVKPDEDLASKAGGMVLVKGEGLYADPYGLLHEGRLSLAAAAGDPFAYPGAGGLYKRGSVRSLSTYSAAALQSDLEDSLYKAAGGGGPLYGDGYGFRLPPSSPQKLADVAAPPGGPPPPHSPYSGPPSRGSPVRQSFRKDSGSSSVFAESPGGKTRSAGSASTAGAPPSELFPGPGERSLVGFGPPVPAKDTETRERMEAMEKQIASLTGLVQSALLRGSEPETPSEKIEGSNGAATPSAPCGSGGRSSGATPVSGPPPPSASSTPAGQPTAVSRLQMQLHLRGLQNSASDLRGQLQQLRKLQLQNQESVRALLKRTEAELSMRVSEAARRQEDPLQRQRTLVEEERLRYLNDEELITQQLNDLEKSVEKIQRDVSHNHRLVPGPELEEKALVLKQLGETLTELKAHFPGLQSKMRVVLRVEVEAVKFLKEEPQRLDGLLKRCRGVTDTLAQIRRQVDEGVWPPPNNLLSQSPKKVTAETDFNKSVDFEMPPPSPPLNLHELSGPAEGASLTPKGGNPTKGLDTPGKRSVDKAVSVEAAERDWEEKRAALTQYSAKDINRLLEETQAELLKAIPDLDCASKAHPGPAPTPDHKPPKAPHGQKAAPRTEPSGRRGSDELTVPRYRTEKPSKSPPPPPPRRSFPSSHGLTTTRTGEVVVTSKKDSAFIKKAESEELEVQKPQVKLRRAVSEVARPASTPPIMASAIKDEDDEDRIIAELESGGGSVPPMKVVTPGASRLKAAQGQAGSPDKSKHGKQRAEYMRIQAQQQATKPSKEMSGSNETSSPVSEKPSASRTSIPVLTSFGARNSSISF

SEQ ID NO: 83834 - protein, 1217 aa, Homo sapiens
  Payload ID: 16683
  Gene Symbol: SRCIN1
  Gene Name: SRC kinase signaling inhibitor 1
  ENSP ID: ENSP00000483931
MGNAPSQDPERSSPPMLSADDAEYPREYRTLGGGGGGGSGGRRFSNVGLVHTSERRHTVIAAQSLEALSGLQKADADRKRDAFMDHLKSKYPQHALALRGQQDRMREQVGGWTVDPVCLLSSLCSHLHGDSAPSGAGQPAQQPNYWSFKTRSSRHTQGAQPGLADQAAKLSYASAESLETMSEAELPLGFSRMNRFRQSLPLSRSASQTKLRSPGVLFLQFGEETRRVHITHEVSSLDTLHALIAHMFPQKLTMGMLKSPNTAILIKDEARNVFYELEDVRDIQDRSIIKIYRKEPLYAAFPGSHLTNGDLRREMVYASRESSPTRRLNNLSPAPHLASGSPPPGLPSGLPSGLQSGSPSRSRLSYAGGRPPSYAGSPVHHAAERLGGAPAAQGVSPSPSAILERRDVKPDEDLASKAGGMVLVKGEGLYADPYGLLHEGRLSLAAAAGDPFAYPGAGGLYKRGSVRSLSTYSAAALQSDLEDSLYKAAGGGGPLYGDGYGFRLPPSSPQKLADVAAPPGGPPPPHSPYSGPPSRGSPVRQSFRKDSGSSSVFAESPGGKTRSAGSASTAGAPPSELFPGPGERSLVGFGPPVPAKDTETRERMEAMEKQIASLTGLVQSALLRGSEPETPSEKIEGSNGAATPSAPCGSGGRSSGATPVSGPPPPSASSTPAGQPTAVSRLQMQLHLRGLQNSASDLRGQLQQLRKLQLQNQESVRALLKRTEAELSMRVSEAARRQEDPLQRQRTLVEEERLRYLNDEELITQQLNDLEKSVEKIQRDVSHNHRLVPGPELEEKALVLKQLGETLTELKAHFPGLQSKMRVVLRVEVEAVKFLKEEPQRLDGLLKRCRGVTDTLAQIRRQVDEGVWPPPNNLLSQSPKKVTAETDFNKSVDFEMPPPSPPLNLHELSGPAEGASLTPKGGNPTKGLDTPGKRSVDKAVSVEAAERDWEEKRAALTQYSAKDINRLLEETQAELLKAIPDLDCASKAHPGPAPTPDHKPPKAPHGQKAAPRTEPSGRRGSDELTVPRYRTEKPSKSPPPPPPRRSFPSSHGLTTTRTGEVVVTSKKDSAFIKKAESEELEVQKPQVKLRRAVSEVARPASTPPIMASAIKDEDDEDRIIAELESGGGSVPPMKVVTPGASRLKAAQGQAGSPDKSKHGKQRAEYMRIQAQQQATKPSKEMSGSNETSSPVSEKPSASRTSIPVLTSFGARNSSISF

SEQ ID NO: 83835 - protein, 1183 aa, Homo sapiens; identical to SEQ ID NO: 83833
  Payload ID: 16683
  Gene Symbol: SRCIN1
  Gene Name: SRC kinase signaling inhibitor 1
  Uniprot ID: Q9C0H9
  ENSP ID: ENSP00000484715

SEQ ID NO: 83836 - protein, 473 aa, Homo sapiens; identical to SEQ ID NO: 83831
  Payload ID: 16683
  Gene Symbol: SRCIN1
  Gene Name: SRC kinase signaling inhibitor 1
  ENSP ID: ENSP00000487679

SEQ ID NO: 83837 - protein, 1217 aa, Homo sapiens; identical to SEQ ID NO: 83834
  Payload ID: 16683
  Gene Symbol: SRCIN1
  Gene Name: SRC kinase signaling inhibitor 1
  ENSP ID: ENSP00000488014

SEQ ID NO: 83838 - protein, 306 aa, Homo sapiens; identical to SEQ ID NO: 83830
  Payload ID: 16683
  Gene Symbol: SRCIN1
  Gene Name: SRC kinase signaling inhibitor 1
  ENSP ID: ENSP00000488254
  MOD_RES (1)..(1): Any amino acid

SEQ ID NO: 83839 - protein, 928 aa, Homo sapiens; identical to SEQ ID NO: 83832
  Payload ID: 16683
  Gene Symbol: SRCIN1
  Gene Name: SRC kinase signaling inhibitor 1
  ENSP ID: ENSP00000488440
  MOD_RES (1)..(1): Any amino acid

SEQ ID NO: 83840 - protein, 536 aa, Homo sapiens
  Payload ID: 16684
  Gene Symbol: SRC
  Gene Name: SRC proto-oncogene, non-receptor tyrosine kinase
  Uniprot ID: P12931
  ENSP ID: ENSP00000350941
MGSNKSKPKDASQRRRSLEPAENVHGAGGGAFPASQTPSKPASADGHRGPSAAFAPAAAEPKLFGGFNSSDTVTSPQRAGPLAGGVTTFVALYDYESRTETDLSFKKGERLQIVNNTEGDWWLAHSLSTGQTGYIPSNYVAPSDSIQAEEWYFGKITRRESERLLLNAENPRGTFLVRESETTKGAYCLSVSDFDNAKGLNVKHYKIRKLDSGGFYITSRTQFNSLQQLVAYYSKHADGLCHRLTTVCPTSKPQTQGLAKDAWEIPRESLRLEVKLGQGCFGEVWMGTWNGTTRVAIKTLKPGTMSPEAFLQEAQVMKKLRHEKLVQLYAVVSEEPIYIVTEYMSKGSLLDFLKGETGKYLRLPQLVDMAAQIASGMAYVERMNYVHRDLRAANILVGENLVCKVADFGLARLIEDNEYTARQGAKFPIKWTAPEAALYGRFTIKSDVWSFGILLTELTTKGRVPYPGMVNREVLDQVERGYRMPCPPECPESLHDLMCQCWRKEPEERPTFEYLQAFLEDYFTSTEPQYQPGENL

SEQ ID NO: 83841 - protein, 542 aa, Homo sapiens
  Payload ID: 16684
  Gene Symbol: SRC
  Gene Name: SRC proto-oncogene, non-receptor tyrosine kinase
  Uniprot ID: P12931
  ENSP ID: ENSP00000362659
MGSNKSKPKDASQRRRSLEPAENVHGAGGGAFPASQTPSKPASADGHRGPSAAFAPAAAEPKLFGGFNSSDTVTSPQRAGPLAGGVTTFVALYDYESRTETDLSFKKGERLQIVNNTRKVDVREGDWWLAHSLSTGQTGYIPSNYVAPSDSIQAEEWYFGKITRRESERLLLNAENPRGTFLVRESETTKGAYCLSVSDFDNAKGLNVKHYKIRKLDSGGFYITSRTQFNSLQQLVAYYSKHADGLCHRLTTVCPTSKPQTQGLAKDAWEIPRESLRLEVKLGQGCFGEVWMGTWNGTTRVAIKTLKPGTMSPEAFLQEAQVMKKLRHEKLVQLYAVVSEEPIYIVTEYMSKGSLLDFLKGETGKYLRLPQLVDMAAQIASGMAYVERMNYVHRDLRAANILVGENLVCKVADFGLARLIEDNEYTARQGAKFPIKWTAPEAALYGRFTIKSDVWSFGILLTELTTKGRVPYPGMVNREVLDQVERGYRMPCPPECPESLHDLMCQCWRKEPEERPTFEYLQAFLEDYFTSTEPQYQPGENL

SEQ ID NO: 83842 - protein, 536 aa, Homo sapiens; identical to SEQ ID NO: 83840
  Payload ID: 16684
  Gene Symbol: SRC
  Gene Name: SRC proto-oncogene, non-receptor tyrosine kinase
  Uniprot ID: P12931
  ENSP ID: ENSP00000362668

SEQ ID NO: 83843 - protein, 536 aa, Homo sapiens; identical to SEQ ID NO: 83840
  Payload ID: 16684
  Gene Symbol: SRC
  Gene Name: SRC proto-oncogene, non-receptor tyrosine kinase
  Uniprot ID: P12931
  ENSP ID: ENSP00000362680

SEQ ID NO: 83844 - protein, 276 aa, Homo sapiens
  Payload ID: 16685
  Gene Symbol: SLA
  Gene Name: Src-like-adaptor
  Uniprot ID: Q13239
  ENSP ID: ENSP00000337548
MGNSMKSTPAPAERPLPNPEGLDSDFLAVLSDYPSPDISPPIFRRGEKLRVISDEGGWWKAISLSTGRESYIPGICVARVYHGWLFEGLGRDKAEELLQLPDTKVGSFMIRESETKKGFYSLSVRHRQVKHYRIFRLPNNWYYISPRLTFQCLEDLVNHYSEVADGLCCVLTTPCLTQSTAAPAVRASSSPVTLRQKTVDWRRVSRLQEDPEGTENPLGVDESLFSYGLRESIASYLSLTSEDNTSFDRKKKSISLMYGGSKRKSSFFSSPPYFED

SEQ ID NO: 83845 - protein, 293 aa, Homo sapiens
  Payload ID: 16685
  Gene Symbol: SLA
  Gene Name: Src-like-adaptor
  Uniprot ID: Q13239
  ENSP ID: ENSP00000378759
MLHRLWASPAAPGKKKEMGNSMKSTPAPAERPLPNPEGLDSDFLAVLSDYPSPDISPPIFRRGEKLRVISDEGGWWKAISLSTGRESYIPGICVARVYHGWLFEGLGRDKAEELLQLPDTKVGSFMIRESETKKGFYSLSVRHRQVKHYRIFRLPNNWYYISPRLTFQCLEDLVNHYSEVADGLCCVLTTPCLTQSTAAPAVRASSSPVTLRQKTVDWRRVSRLQEDPEGTENPLGVDESLFSYGLRESIASYLSLTSEDNTSFDRKKKSISLMYGGSKRKSSFFSSPPYFED

SEQ ID NO: 83846 - protein, 316 aa, Homo sapiens
  Payload ID: 16685
  Gene Symbol: SLA
  Gene Name: Src-like-adaptor
  Uniprot ID: Q13239
  ENSP ID: ENSP00000394049
MLSKLGHSPLGGLRARLTFPVCLLYHRLWASPAAPGKKKEMGNSMKSTPAPAERPLPNPEGLDSDFLAVLSDYPSPDISPPIFRRGEKLRVISDEGGWWKAISLSTGRESYIPGICVARVYHGWLFEGLGRDKAEELLQLPDTKVGSFMIRESETKKGFYSLSVRHRQVKHYRIFRLPNNWYYISPRLTFQCLEDLVNHYSEVADGLCCVLTTPCLTQSTAAPAVRASSSPVTLRQKTVDWRRVSRLQEDPEGTENPLGVDESLFSYGLRESIASYLSLTSEDNTSFDRKKKSISLMYGGSKRKSSFFSSPPYFED

SEQ ID NO: 83847 - protein, 168 aa, Homo sapiens
  Payload ID: 16685
  Gene Symbol: SLA
  Gene Name: Src-like-adaptor
  Uniprot ID: Q13239
  ENSP ID: ENSP00000427928
MIRESETKKGFYSLSVRHRQVKHYRIFRLPNNWYYISPRLTFQCLEDLVNHYSEVADGLCCVLTTPCLTQSTAAPAVRASSSPVTLRQKTVDWRRVSRLQEDPEGTENPLGVDESLFSYGLRESIASYLSLTSEDNTSFDRKKKSISLMYGGSKRKSSFFSSPPYFED

SEQ ID NO: 83848 - protein, 40 aa, Homo sapiens
  Payload ID: 16685
  Gene Symbol: SLA
  Gene Name: Src-like-adaptor
  ENSP ID: ENSP00000428087
MGNSMKSTPAPAERPLPNPEGLDSDFLAVLSDYPSPDISP

SEQ ID NO: 83849 - protein, 249 aa, Homo sapiens
  Payload ID: 16685
  Gene Symbol: SLA
  Gene Name: Src-like-adaptor
  Uniprot ID: Q13239
  ENSP ID: ENSP00000428559
MLHRLWASPAAPGKKKEMGNSMKSTPAPAERPLPNPEGLDSDFLAVLSDYPSPDISPPIFRRGEKLRVISDEGGWWKAISLSTGRESYIPGICVARVYHGWLFEGLGRDKAEELLQLPDTKVGSFMIRESETKKEVADGLCCVLTTPCLTQSTAAPAVRASSSPVTLRQKTVDWRRVSRLQEDPEGTENPLGVDESLFSYGLRESIASYLSLTSEDNTSFDRKKKSISLMYGGSKRKSSFFSSPPYFED

SEQ ID NO: 83850 - protein, 28 aa, Homo sapiens
  Payload ID: 16685
  Gene Symbol: SLA
  Gene Name: Src-like-adaptor
  ENSP ID: ENSP00000428971
MGNSMKSTPAPAERPLPNPEGLDSDFLA

SEQ ID NO: 83851 - protein, 14 aa, Homo sapiens
  Payload ID: 16685
  Gene Symbol: SLA
  Gene Name: Src-like-adaptor
  ENSP ID: ENSP00000429143
MGNSMKSTPAPAER

SEQ ID NO: 83852 - protein, 91 aa, Homo sapiens
  Payload ID: 16685
  Gene Symbol: SLA
  Gene Name: Src-like-adaptor
  ENSP ID: ENSP00000429681
MGNSMKSTPAPAERPLPNPEGLDSDFLAVLSDYPSPDISPPIFRRGEKLRVISDEGGWWKAISLSTGRESYIPGICVARVYHGWLFEGLGR

SEQ ID NO: 83853 - protein, 55 aa, Homo sapiens
  Payload ID: 16685
  Gene Symbol: SLA
  Gene Name: Src-like-adaptor
  ENSP ID: ENSP00000429844
MGNSMKSTPAPAERPLPNPEGVTTHGSQQPLQHRPGRSSLAQMAALSAEPDREVD

SEQ ID NO: 83854 - protein, 48 aa, Homo sapiens
  Payload ID: 16685
  Gene Symbol: SLA
  Gene Name: Src-like-adaptor
  ENSP ID: ENSP00000430184
MGNSMKSTPAPAERPLPNPEGLDSDFLAVLSDYPSPDISPPIFRRGEK

SEQ ID NO: 83855 - protein, 158 aa, Homo sapiens
  Payload ID: 16685
  Gene Symbol: SLA
  Gene Name: Src-like-adaptor
  ENSP ID: ENSP00000430596
MGNSMKSTPAPAERPLPNPEGLDSDFLAVLSDYPSPDISPPIFRRGEKLRVISDEGGWWKAISLSTGRESYIPGICVARVYHGWLFEGLGRDKAEELLQLPDTKVGSFMIRESETKKGFYSLSVRHRQVKHYRIFRLPNNWYYISPRLTFQCLEDLVN

SEQ ID NO: 83856 - protein, 261 aa, Homo sapiens
  Payload ID: 16686
  Gene Symbol: SLA2
  Gene Name: Src-like-adaptor 2
  Uniprot ID: Q9H6Q3
  ENSP ID: ENSP00000262866
MGSLPSRRKSLPSPSLSSSVQGQGPVTMEAERSKATAVALGSFPAGGPAELSLRLGEPLTIVSEDGDWWTVLSEVSGREYNIPSVHVAKVSHGWLYEGLSREKAEELLLLPGNPGGAFLIRESQTRRGSYSLSVRLSRPASWDRIRHYRIHCLDNGWLYISPRLTFPSLQALVDHYSELADDICCLLKEPCVLQRAGPLPGKDIPLPVTVQRTPLNWKELDSSLLFSEAATGEESLLSEGLRESLSFYISLNDEAVSLDDA

SEQ ID NO: 83857 - protein, 210 aa, Homo sapiens
  Payload ID: 16686
  Gene Symbol: SLA2
  Gene Name: Src-like-adaptor 2
  Uniprot ID: Q9H6Q3
  ENSP ID: ENSP00000353890
MGSLPSRRKSLPSPSLSSSVQGQGPVTMEAERSKATAVALGSFPAGGPAELSLRLGEPLTIVSEDGDWWTVLSEVSGREYNIPSVHVAKVSHGWLYEGLSREKAEELLLLPGNPGGAFLIRESQTRRGSYSLSVRLSRPASWDRIRHYRIHCLDNGWLYISPRLTFPSLQALVDHYSEGWPAPWQGYTPTCDCAEDTTQLERAGQLPPVF

SEQ ID NO: 83858 - protein, 488 aa, Homo sapiens
  Payload ID: 16687
  Gene Symbol: SRMS
  Gene Name: src-related kinase lacking C-terminal regulatory tyrosine and N-terminal myristylation sites
  Uniprot ID: Q9H3Y6
  ENSP ID: ENSP00000217188
MEPFLRRRLAFLSFFWDKIWPAGGEPDHGTPGSLDPNTDPVPTLPAEPCSPFPQLFLALYDFTARCGGELSVRRGDRLCALEEGGGYIFARRLSGQPSAGLVPITHVAKASPETLSDQPWYFSGVSRTQAQQLLLSPPNEPGAFLIRPSESSLGGYSLSVRAQAKVCHYRVSMAADGSLYLQKGRLFPGLEELLTYYKANWKLIQNPLLQPCMPQKAPRQDVWERPHSEFALGRKLGEGYFGEVWEGLWLGSLPVAIKVIKSANMKLTDLAKEIQTLKGLRHERLIRLHAVCSGGEPVYIVTELMRKGNLQAFLGTPEGRALRLPPLLGFACQVAEGMSYLEEQRVVHRDLAARNVLVDDGLACKVADFGLARLLKDDIYSPSSSSKIPVKWTAPEAANYRVFSQKSDVWSFGVLLHEVFTYGQCPYEGMTNHETLQQIMRGYRLPRPAACPAEVYVLMLECWRSSPEERPSFATLREKLHAIHRCHP

SEQ ID NO: 83859 - protein, 1279 aa, Homo sapiens
  Payload ID: 16688
  Gene Symbol: SCAP
  Gene Name: SREBF chaperone
  Uniprot ID: Q12770
  ENSP ID: ENSP00000265565
MTLTERLREKISRAFYNHGLLCASYPIPIILFTGFCILACCYPLLKLPLPGTGPVEFTTPVKDYSPPPVDSDRKQGEPTEQPEWYVGAPVAYVQQIFVKSSVFPWHKNLLAVDVFRSPLSRAFQLVEEIRNHVLRDSSGIRSLEELCLQVTDLLPGLRKLRNLLPEHGCLLLSPGNFWQNDWERFHADPDIIGTIHQHEPKTLQTSATLKDLLFGVPGKYSGVSLYTRKRMVSYTITLVFQHYHAKFLGSLRARLMLLHPSPNCSLRAESLVHVHFKEEIGVAELIPLVTTYIILFAYIYFSTRKIDMVKSKWGLALAAVVTVLSSLLMSVGLCTLFGLTPTLNGGEIFPYLVVVIGLENVLVLTKSVVSTPVDLEVKLRIAQGLSSESWSIMKNMATELGIILIGYFTLVPAIQEFCLFAVVGLVSDFFLQMLFFTTVLSIDIRRMELADLNKRLPPEACLPSAKPVGQPTRYERQLAVRPSTPHTITLQPSSFRNLRLPKRLRVVYFLARTRLAQRLIMAGTVVWIGILVYTDPAGLRNYLAAQVTEQSPLGEGALAPMPVPSGMLPPSHPDPAFSIFPPDAPKLPENQTSPGESPERGGPAEVVHDSPVPEVTWGPEDEELWRKLSFRHWPTLFSYYNITLAKRYISLLPVIPVTLRLNPREALEGRHPQDGRSAWPPPGPIPAGHWEAGPKGPGGVQAHGDVTLYKVAALGLATGIVLVLLLLCLYRVLCPRNYGQLGGGPGRRRRGELPCDDYGYAPPETEIVPLVLRGHLMDIECLASDGMLLVSCCLAGHVCVWDAQTGDCLTRIPRPGRQRRDSGVGSGLEAQESWERLSDGGKAGPEEPGDSPPLRHRPRGPPPPSLFGDQPDLTCLIDTNFSAQPRSSQPTQPEPRHRAVCGRSRDSPGYDFSCLVQRVYQEEGLAAVCTPALRPPSPGPVLSQAPEDEGGSPEKGSPSLAWAPSAEGSIWSLELQGNLIVVGRSSGRLEVWDAIEGVLCCSSEEVSSGITALVFLDKRIVAARLNGSLDFFSLETHTALSPLQFRGTPGRGSSPASPVYSSSDTVACHLTHTVPCAHQKPITALKAAAGRLVTGSQDHTLRVFRLEDSCCLFTLQGHSGAITTVYIDQTMVLASGGQDGAICLWDVLTGSRVSHVFAHRGDVTSLTCTTSCVISSGLDDLISIWDRSTGIKFYSIQQDLGCGASLGVISDNLLVTGGQGCVSFWDLNYGDLLQTVYLGKNSEAQPARQILVLDNAAIVCNFGSELSLVYVPSVLEKLD

SEQ ID NO: 83860 - protein, 165 aa, Homo sapiens
  Payload ID: 16688
  Gene Symbol: SCAP
  Gene Name: SREBF chaperone
  ENSP ID: ENSP00000324296
MTLTERLREKISRAFYNHGLLCASYPIPIILFTGFCILACCYPLLKLPLPGTGPVEFTTPVKDYSPPPVDSDRKQGEPTEQPEWRDFPLPCGGYWVRECVGAHQVCGLNPGRPGGEAADRPRPKQRELVHHEEHGHGAGHHPHRLLHPSARHPGVLSLCCRGAGV

SEQ ID NO: 83861 - protein, 352 aa, Homo sapiens
  Payload ID: 16688
  Gene Symbol: SCAP
  Gene Name: SREBF chaperone
  ENSP ID: ENSP00000401819
MVKSKWGLALAAVVTVLSSLLMSVGLCTLFGLTPTLNGGEIFPYLVVVIGLENVLVLTKSVVSTPVDLEVKLRIAQGLSSESWSIMKNMATELGIILIGYFTLVPAIQEFCLFAVVGLVSDFFLQMLFFTTVLSIDIRRMELADLNKRLPPEACLPSAKPVGQPTRYERQLAVRPSTPHTITLQPSSFRNLRLPKRLRVVYFLAPTGAHTCWALGSRTQGPRWGAGPWRRHAVQGGGAGPGHRHRLGAAAALPLPRAMPAQLRAAGWWARAAEARGAALRRLRLCATRDGDRAACAARPPHGHRVPGQRRHAAGELLPGRPRLRVGRADRGLPNAHSAPRQAAPGQWRGQRA

SEQ ID NO: 83862 - protein, 136 aa, Homo sapiens
  Payload ID: 16688
  Gene Symbol: SCAP
  Gene Name: SREBF chaperone
  ENSP ID: ENSP00000408102
MTLTERLREKISRAFYNHGLLCASYPIPIILFTGFCILACCYPLLKLPLPGTGPVEFTTPVKDYSPPPVDSDRKQGEPTEQPEWYVGAPVAYVQQIFVKSSVFPWHKNLLAVDVFRSPLSRAFQLVEEIRNHVLRD

SEQ ID NO: 83863 - protein, 85 aa, Homo sapiens
  Payload ID: 16688
  Gene Symbol: SCAP
  Gene Name: SREBF chaperone
  ENSP ID: ENSP00000409183
MTLTERLREKISRAFYNHGLLCASYPIPIILFTGFCILACCYPLLKLPLPGTGPVEFTTPVKDYSPPPVDSDRKQGEPTEQPEWA

SEQ ID NO: 83864 - protein, 88 aa, Homo sapiens
  Payload ID: 16688
  Gene Symbol: SCAP
  Gene Name: SREBF chaperone
  ENSP ID: ENSP00000415195
MTLTERLREKISRAFYNHGLLCASYPIPIILFTGFCILACCYPLLKLPLPGTGPVEFTTPVKDYSPPPVDSDRKQGEPTEQPEWVGTR

SEQ ID NO: 83865 - protein, 121 aa, Homo sapiens
  Payload ID: 16688
  Gene Symbol: SCAP
  Gene Name: SREBF chaperone
  ENSP ID: ENSP00000416847
MTLTERLREKISRAFYNHGLLCASYPIPIILFTGFCILACCYPLLKLPLPGTGPVEFTTPVKDYSPPPVDSDRKQGEPTEQPEWVPGQPACPPDASAPQPQLQPSGGEPGPRALQGGDWCR

SEQ ID NO: 83866 - protein, 132 aa, Homo sapiens
  Payload ID: 16688
  Gene Symbol: SCAP
  Gene Name: SREBF chaperone
  ENSP ID: ENSP00000423419
MTLTERLREKISRAFYNHGLLCASYPIPIILFTGFCILACCYPLLKLPLPGTGPVEFTTPVKDYSPPPVDSDRKQGEPTEQPEWYVGAPVAYVQQIFVKSSVFPWHKNLLAVDVFRSPLSRAFQLVEEIRNH

SEQ ID NO: 83867 - protein, 905 aa, Homo sapiens
  Payload ID: 16688
  Gene Symbol: SCAP
  Gene Name: SREBF chaperone
  ENSP ID: ENSP00000438956
MTLTERLREKISRAFYNHGLLCASYPIPIILFGYFTLVPAIQEFCLFAVVGLVSDFFLQMLFFTTVLSIDIRRMELADLNKRLPPEACLPSAKPVGQPTRYERQLAVRPSTPHTITLQPSSFRNLRLPKRLRVVYFLARTRLAQRLIMAGTVVWIGILVYTDPAGLRNYLAAQVTEQSPLGEGALAPMPVPSGMLPPSHPDPAFSIFPPDAPKLPENQTSPGESPERGGPAEVVHDSPVPEVTWGPEDEELWRKLSFRHWPTLFSYYNITLAKRYISLLPVIPVTLRLNPREALEGRHPQDGRSAWPPPGPIPAGHWEAGPKGPGGVQAHGDVTLYKVAALGLATGIVLVLLLLCLYRVLCPRNYGQLGGGPGRRRRGELPCDDYGYAPPETEIVPLVLRGHLMDIECLASDGMLLVSCCLAGHVCVWDAQTGDCLTRIPRPGQRRDSGVGSGLEAQESWERLSDGGKAGPEEPGDSPPLRHRPRGPPPPSLFGDQPDLTCLIDTNFSAQPRSSQPTQPEPRHRAVCGRSRDSPGYDFSCLVQRVYQEEGLAAVCTPALRPPSPGPVLSQAPEDEGGSPEKGSPSLAWAPSAEGSIWSLELQGNLIVVGRSSGRLEVWDAIEGVLCCSSEEVSSGITALVFLDKRIVAARLNGSLDFFSLETHTALSPLQFRGTPGRGSSPASPVYSSSDTVACHLTHTVPCAHQKPITALKAAAGRLVTGSQDHTLRVFRLEDSCCLFTLQGHSGAITTVYIDQTMVLASGGQDGAICLWDVLTGSRVSHVFAHRGDVTSLTCTTSCVISSGLDDLISIWDRSTGIKFYSIQQDLGCGASLGVISDNLLVTGGQGCVSFWDLNYGDLLQTVYLGKNSEAQPARQILVLDNAAIVCNFGSELSLVYVPSVLEKLD

SEQ ID NO: 83868 - protein, 155 aa, Homo sapiens
  Payload ID: 16689
  Gene Symbol: SREK1IP1
  Gene Name: SREK1-interacting protein 1
  Uniprot ID: Q8N9Q2
  ENSP ID: ENSP00000427401
MAVPGCNKDSVRAGCKKCGYPGHLTFECRNFLRVDPKRDIVLDVSSTSSEDSDEENEELNKLQALQEKRINEEEEKKKEKSKEKIKLKKKRKRSYSSSSTEEDTSKQKKQKYQKKEKKKEKKSKSKKGKHHKKEKKKRKKEKHSSTPNSSEFSRK

SEQ ID NO: 83869 - protein, 98 aa, Homo sapiens
  Payload ID: 16689
  Gene Symbol: SREK1IP1
  Gene Name: SREK1-interacting protein 1
  ENSP ID: ENSP00000481414
MAVPGCNKDSVRAGCKKCGYPGHLTFECRNFLRVDPKRDIVLDVSSTSSEDSDEENEELNKLQALQEKRINEEEEKKKKQRKNQIEKKKEKVLLIQFH

SEQ ID NO: 83870 - protein, 339 aa, Homo sapiens
  Payload ID: 16690
  Gene Symbol: SRRD
  Gene Name: SRR1 domain containing
  Uniprot ID: Q9UH36
  ENSP ID: ENSP00000215917
MAAAAAAALESWQAAAPRKRRSAARRPRRREAAPRGREAAPRGREAAPRGPEAEFESDSGVVLRRIWEAEKDLFISDFWSSALETINRCLTKHLEQLKAPVGTLSDIFGNLHLDSLPEESDVATDSIPREILVTGTCHLKCVCYGIGNFATCIVARNQLTFLLLLLEKCQIPRSHCWVYDPLFSQLEIEVLNTLGVTVLSENEEGKRSIRGEPTIFYMLHCGTALYNNLLWSNWSVDALSKMVIIGNSFKGLEERLLARILQKNYPYIAKILKGLEELEFPQTSQYMDIFNDTSVHWFPVQKLEQLSIDIWEFREEPDYQDCEDLEIIRNKREDPSATD

SEQ ID NO: 83871 - protein, 335 aa, Homo sapiens
  Payload ID: 16690
  Gene Symbol: SRRD
  Gene Name: SRR1 domain containing
  ENSP ID: ENSP00000482019
MAAAAAAALESWQAAAPRKRRGSTAAARRPRGREAAPRGREAAPRGPEAEFESDSGVVLRRIWEAEKDLFISDFWSSALETINRCLTKHLEQLKAPVGTLSDIFGNLHLDSLPEESDVATDSIPREILVTGTCHLKCVCYGIGNFATCIVARNQLTFLLLLLEKCQIPRSHCWVYDPLFSQLEIEVLNTLGVTVLSENEEGKRSIRGEPTIFYMLHCGTALYNNLLWSNWSVDALSKMVIIGNSFKGLEERLLARILQKNYPYIAKILKGLEELEFPQTSQYMDIFNDTSVHWFPVQKLEQLSIDIWEFREEPDYQDCEDLEIIRNKREDPSATD

SEQ ID NO: 83872 - protein, 1312 aa, Homo sapiens
  Payload ID: 16691
  Gene Symbol: SCAF1
  Gene Name: SR-related CTD-associated factor 1
  Uniprot ID: Q9H7N4
  ENSP ID: ENSP00000353769
MEEEDESRGKTEESGEDRGDGPPDRDPTLSPSAFILRAIQQAVGSSLQGDLPNDKDGSRCHGLRWRRCRSPRSEPRSQESGGTDTATVLDMATDSFLAGLVSVLDPPDTWVPSRLDLRPGESEDMLELVAEVRIGDRDPIPLPVPSLLPRLRAWRTGKTVSPQSNSSRPTCARHLTLGTGDGGPAPPPAPSSASSSPSPSPSSSSPSPPPPPPPPAPPAPPAPRFDIYDPFHPTDEAYSPPPAPEQKYDPFEPTGSNPSSSAGTPSPEEEEEEEEEEEEEEEDEEEEEGLSQSISRISETLAGIYDDNSLSQDFPGDESPRPDAQPTQPTPAPGTPPQVDSTRADGAMRRRVFVVGTEAEACREGKVSVEVVTAGGAALPPPLLPPGDSEIEEGEIVQPEEEPRLALSLFRPGGRAARPTPAASATPTAQPLPQPPAPRAPEGDDFLSLHAESDGEGALQVDLGEPAPAPPAADSRWGGLDLRRKILTQRRERYRQRSPSPAPAPAPAAAAGPPTRKKSRRERKRSGEAKEAASSSSGTQPAPPAPASPWDSKKHRSRDRKPGSHASSSARRRSRSRSRSRSTRRRSRSTDRRRGGSRRSRSREKRRRRRRSASPPPATSSSSSSRRERHRGKHRDGGGSKKKKKRSRSRGEKRSGDGSEKAPAPAPPPSGSTSCGDRDSRRRGAVPPSIQDLTDHDLFAIKRTITVGRLDKSDPRGPSPAPASSPKREVLYDSEGLSGEERGGKSSQKDRRRSGAASSSSSSREKGSRRKALDGGDRDRDRDRDRDRDRSSKKARPPKESAPSSGPPPKPPVSSGSGSSSSSSSCSSRKVKLQSKVAVLIREGVSSTTPAKDAASAGLGSIGVKFSRDRESRSPFLKPDERAPTEMAKAAPGSTKPKKTKVKAKAGAKKTKGTKGKTKPSKTRKKVRSGGGSGGSGGQVSLKKSKADSCSQAAGTKGAEETSWSGEERAAKVPSTPPPKAAPPPPALTPDSQTVDSSCKTPEVSFLPEEATEEAGVRGGAEEEEEEEEEEEEEEEEEEQQPATTTATSTAAAAPSTAPSAGSTAGDSGAEDGPASRVSQLPTLPPPMPWNLPAGVDCTTSGVLALTALLFKMEEANLASRAKAQELIQATNQILSHRKPPSSLGMTPAPVPTSLGLPPGPSSYLLPGSLPLGGCGSTPPTPTGLAATSDKREGSSSSEGRGDTDKYLKKLHTQERAVEEVKLAIKPYYQKKDITKEEYKDILRKAVHKICHSKSGEINPVKVSNLVRAYVQRYRYFRKHGRKPGDPPGPPRPPKEPGPPDKGGPGLPLPPL

SEQ ID NO: 83873 - protein, 119 aa, Homo sapiens
  Payload ID: 16691
  Gene Symbol: SCAF1
  Gene Name: SR-related CTD-associated factor 1
  ENSP ID: ENSP00000472276
MEEEDESRGKTEESGEDRGDGPPDRDPTLSPSAFILRAIQQAVGSSLQGDLPNDKDGSRCHGLRWRRCRSPRSEPRSQESGGTDTATVSVGHGHGQLPRRAGECPGSPGYLGSQPPGPA

SEQ ID NO: 83874 - protein, 98 aa, Homo sapiens
  Payload ID: 16691
  Gene Symbol: SCAF1
  Gene Name: SR-related CTD-associated factor 1
  ENSP ID: ENSP00000472649
MEEEDESRGKTEESGEDRGDGPPDRDPTLSPSAFILRAIQQAVGSSLQGDLPNDKDGSRCHGLRWRRCRSPRSEPRSQESGGTDTATVLDMATDSFLA

SEQ ID NO: 83875 - protein, 203 aa, Homo sapiens
  Payload ID: 16691
  Gene Symbol: SCAF1
  Gene Name: SR-related CTD-associated factor 1
  ENSP ID: ENSP00000473210
MEEEDESRGKTEESGEDRGDGPPDRDPTLSPSAFILRAIQQAVGSSLQGDLPNDKDGSRCHGLRWRRCRSPRSEPRSQESGGTDTATVLDMATDSFLAGLVSVLDPPDTWVPSRLDLRPGESEDMLELVAEVRIGDRDPIPLPVPSLLPRLRAWRTGKTVSPQSNSSRPTCARHLTLGTGDGGPAPPPAPSSASSSPSPSPSS

SEQ ID NO: 83876 - protein, 117 aa, Homo sapiens
  Payload ID: 16692
  Gene Symbol: SCAF11
  Gene Name: SR-related CTD-associated factor 11
  ENSP ID: ENSP00000266589
MIVSIFSNKETLFQREMKKKTVCTLNMGDKKYEDMEGEENGDNTISTGLLYSEADRCPICLNCLLEKEVGFPESCNHVFCMTCILKWAETLASCPIDRKPFQAVFKFSALEGYVKVQ

SEQ ID NO: 83877 - protein, 1463 aa, Homo sapiens
  Payload ID: 16692
  Gene Symbol: SCAF11
  Gene Name: SR-related CTD-associated factor 11
  Uniprot ID: Q99590
  ENSP ID: ENSP00000358374
MKKKTVCTLNMGDKKYEDMEGEENGDNTISTGLLYSEADRCPICLNCLLEKEVGFPESCNHVFCMTCILKWAETLASCPIDRKPFQAVFKFSALEGYVKVQVKKQLRETKDKKNENSFEKQVSCHENSKSCIRRKAIVREDLLSAKVCDLKWIHRNSLYSETGGKKNAAIKINKPQRSNWSTNQCFRNFFSNMFSSVSHSGESSFTYRAYCTEFIEASEISALIRQKRHELELSWFPDTLPGIGRIGFIPWNVETEVLPLISSVLPRTIFPTSTISFEHFGTSCKGYALAHTQEGEEKKQTSGTSNTRGSRRKPAMTTPTRRSTRNTRAETASQSQRSPISDNSGCDAPGNSNPSLSVPSSAESEKQTRQAPKRKSVRRGRKPPLLKKKLRSSVAAPEKSSSNDSVDEETAESDTSPVLEKEHQPDVDSSNICTVQTHVENQSANCLKSCNEQIEESEKHTANYDTEERVGSSSSESCAQDLPVLVGEEGEVKKLENTGIEANVLCLESEISENILEKGGDPLEKQDQISGLSQSEVKTDVCTVHLPNDFPTCLTSESKVYQPVSCPLSDLSENVESVVNEEKITESSLVEITEHKDFTLKTEELIESPKLESSEGEIIQTVDRQSVKSPEVQLLGHVETEDVEIIATCDTFGNEDFNNIQDSENNLLKNNLLNTKLEKSLEEKNESLTEHPRSTELPKTHIEQIQKHFSEDNNEMIPMECDSFCSDQNESEVEPSVNADLKQMNENSVTHCSENNMPSSDLADEKVETVSQPSESPKDTIDKTKKPRTRRSRFHSPSTTWSPNKDTPQEKKRPQSPSPRRETGKESRKSQSPSPKNESARGRKKSRSQSPKKDIARERRQSQSRSPKRDTTRESRRSESLSPRRETSRENKRSQPRVKDSSPGEKSRSQSRERESDRDGQRRERERRTRKWSRSRSHSRSPSRCRTKSKSSSFGRIDRDSYSPRWKGRWANDGWRCPRGNDRYRKNDPEKQNENTRKEKNDIHLDADDPNSADKHRNDCPNWITEKINSGPDPRTRNPEKLKESHWEENRNENSGNSWNKNFGSGWVSNRGRGRGNRGRGTYRSSFAYKDQNENRWQNRKPLSGNSNSSGSESFKFVEQQSYKRKSEQEFSFDTPADRSGWTSASSWAVRKTLPADVQNYYSRRGRNSSGPQSGWMKQEEETSGQDSSLKDQTNQQVDGSQLPINMMQPQMNVMQQQMNAQHQPMNIFPYPVGVHAPLMNIQRNPFNIHPQLPLHLHTGVPLMQVATPTSVSQGLPPPPPPPPPSQQVNYIASQPDGKQLQGIPSSSHVSNNMSTPVLPAPTAAPGNTGMVQGPSSGNTSSSSHSKASNAAVKLAESKVSVAVEASADSSKTDKKLQIQEKAAQEVKLAIKPFYQNKDITKEEYKEIVRKAVDKVCHSKSGEVNSTKVANLVKAYVDKYKYSRKGSQKKTLEEPVSTEKNIG

SEQ ID NO: 83878 - protein, 77 aa, Homo sapiens
  Payload ID: 16692
  Gene Symbol: SCAF11
  Gene Name: SR-related CTD-associated factor 11
  ENSP ID: ENSP00000378839
MKKKTVCTLNMGDKKYEDMEGEENGDNTISTGLLYSEADRCPICLNCLLEKEVGFPESCNHVFCMTCILKWAEGLFT

SEQ ID NO: 83879 - protein, 77 aa, Homo sapiens
  Payload ID: 16692
  Gene Symbol: SCAF11
  Gene Name: SR-related CTD-associated factor 11
  ENSP ID: ENSP00000378840
MKKKTVCTLNMGDKKYEDMEGEENGDNTISTGLLYSEADRCPICLNCLLEKEVGFPESCNHVFCMTCILKWAERSYL

SEQ ID NO: 83880 - protein, 935 aa, Homo sapiens
  Payload ID: 16692
  Gene Symbol: SCAF11
  Gene Name: SR-related CTD-associated factor 11
  ENSP ID: ENSP00000446746
MGRGKYNLLITFQTLASCPIDRKPFQAVFKFSALEGYVKVQVKKQLRETKDKKNENSFEKQVSCHENSKSCIRRKAIVREDLLSAKVCDLKWIHRNSLYSETGGKKNAAIKINKPQRSNWSTNQCFRNFFSNMFSSVSHSGESSFTYRAYCTEFIEASEISALIRQKRHELELSWFPDTLPGIGRIGFIPWNVETEVLPLISSVLPRTIFPTSTISFEHFGTSCKGYALAHTQEGEEKKQTSGTSNTRGSRRKPAMTTPTRRSTRNTRAETASQSQRSPISDNSGCDAPGNSNPSLSVPSSAESEKQTRQAPKRKSVRRGRKPPLLKKKLRSSVAAPEKSSSNDSVDEETAESDTSPVLEKEHQPDVDSSNICTVQTHVENQSANCLKSCNEQIEESEKHTANYDTEERVGSSSSESCAQDLPVLVGEEGEVKKLENTGIEANVLCLESEISENILEKGGDPLEKQDQISGLSQSEVKTDVCTVHLPNDFPTCLTSESKVYQPVSCPLSDLSENVESVVNEEKITESSLVEITEHKDFTLKTEELIESPKLESSEGEIIQTVDRQSVKSPEVQLLGHVETEDVEIIATCDTFGNEDFNNIQDSENNLLKNNLLNTKLEKSLEEKNESLTEHPRSTELPKTHIEQIQKHFSEDNNEMIPMECDSFCSDQNESEVEPSVNADLKQMNENSVTHCSENNMPSSDLADEKVETVSQPSESPKDTIDKTKKPRTRRSRFHSPSTTWSPNKDTPQEKKRPQSPSPRRETGKESRKSQSPSPKNESARGRKKSRSQSPKKDIARERRQSQSRSPKRDTTRESRRSESLSPRRETSRENKRSQPRVKDSSPGEKSRSQSRERESDRDGQRRERERRTRKWSRSRSHSRSPSRCRTKSKSSSFGRIDRDSYSPRWKGRWANDGWRCPRGNDRYRKNDPEKQNEN

SEQ ID NO: 83881 - protein, 1271 aa, Homo sapiens
  Payload ID: 16692
  Gene Symbol: SCAF11
  Gene Name: SR-related CTD-associated factor 11
  ENSP ID: ENSP00000448864
MFSSVSHSGESSFTYRAYCTEFIEASEISALIRQKRHELELSWFPDTLPGIGRIGFIPWNVETEVLPLISSVLPRTIFPTSTISFEHFGTSCKGYALAHTQEGEEKKQTSGTSNTRGSRRKPAMTTPTRRSTRNTRAETASQSQRSPISDNSGCDAPGNSNPSLSVPSSAESEKQTRQAPKRKSVRRGRKPPLLKKKLRSSVAAPEKSSSNDSVDEETAESDTSPVLEKEHQPDVDSSNICTVQTHVENQSANCLKSCNEQIEESEKHTANYDTEERVGSSSSESCAQDLPVLVGEEGEVKKLENTGIEANVLCLESEISENILEKGGDPLEKQDQISGLSQSEVKTDVCTVHLPNDFPTCLTSESKVYQPVSCPLSDLSENVESVVNEEKITESSLVEITEHKDFTLKTEELIESPKLESSEGEIIQTVDRQSVKSPEVQLLGHVETEDVEIIATCDTFGNEDFNNIQDSENNLLKNNLLNTKLEKSLEEKNESLTEHPRSTELPKTHIEQIQKHFSEDNNEMIPMECDSFCSDQNESEVEPSVNADLKQMNENSVTHCSENNMPSSDLADEKVETVSQPSESPKDTIDKTKKPRTRRSRFHSPSTTWSPNKDTPQEKKRPQSPSPRRETGKESRKSQSPSPKNESARGRKKSRSQSPKKDIARERRQSQSRSPKRDTTRESRRSESLSPRRETSRENKRSQPRVKDSSPGEKSRSQSRERESDRDGQRRERERRTRKWSRSRSHSRSPSRCRTKSKSSSFGRIDRDSYSPRWKGRWANDGWRCPRGNDRYRKNDPEKQNENTRKEKNDIHLDADDPNSADKHRNDCPNWITEKINSGPDPRTRNPEKLKESHWEENRNENSGNSWNKNFGSGWVSNRGRGRGNRGRGTYRSSFAYKDQNENRWQNRKPLSGNSNSSGSESFKFVEQQSYKRKSEQEFSFDTPADRSGWTSASSWAVRKTLPADVQNYYSRRGRNSSGPQSGWMKQEEETSGQDSSLKDQTNQQVDGSQLPINMMQPQMNVMQQQMNAQHQPMNIFPYPVGVHAPLMNIQRNPFNIHPQLPLHLHTGVPLMQVATPTSVSQGLPPPPPPPPPSQQVNYIASQPDGKQLQGIPSSSHVSNNMSTPVLPAPTAAPGNTGMVQGPSSGNTSSSSHSKASNAAVKLAESKVSVAVEASADSSKTDKKLQIQEKAAQEVKLAIKPFYQNKDITKEEYKEIVRKAVDKVCHSKSGEVNSTKVANLVKAYVDKYKYSRKGSQKKTLEEPVSTEKNIG

SEQ ID NO: 83882 - protein, 1148 aa, Homo sapiens
  Payload ID: 16692
  Gene Symbol: SCAF11
  Gene Name: SR-related CTD-associated factor 11
  Uniprot ID: Q99590
  ENSP ID: ENSP00000449812
MTTPTRRSTRNTRAETASQSQRSPISDNSGCDAPGNSNPSLSVPSSAESEKQTRQAPKRKSVRRGRKPPLLKKKLRSSVAAPEKSSSNDSVDEETAESDTSPVLEKEHQPDVDSSNICTVQTHVENQSANCLKSCNEQIEESEKHTANYDTEERVGSSSSESCAQDLPVLVGEEGEVKKLENTGIEANVLCLESEISENILEKGGDPLEKQDQISGLSQSEVKTDVCTVHLPNDFPTCLTSESKVYQPVSCPLSDLSENVESVVNEEKITESSLVEITEHKDFTLKTEELIESPKLESSEGEIIQTVDRQSVKSPEVQLLGHVETEDVEIIATCDTFGNEDFNNIQDSENNLLKNNLLNTKLEKSLEEKNESLTEHPRSTELPKTHIEQIQKHFSEDNNEMIPMECDSFCSDQNESEVEPSVNADLKQMNENSVTHCSENNMPSSDLADEKVETVSQPSESPKDTIDKTKKPRTRRSRFHSPSTTWSPNKDTPQEKKRPQSPSPRRETGKESRKSQSPSPKNESARGRKKSRSQSPKKDIARERRQSQSRSPKRDTTRESRRSESLSPRRETSRENKRSQPRVKDSSPGEKSRSQSRERESDRDGQRRERERRTRKWSRSRSHSRSPSRCRTKSKSSSFGRIDRDSYSPRWKGRWANDGWRCPRGNDRYRKNDPEKQNENTRKEKNDIHLDADDPNSADKHRNDCPNWITEKINSGPDPRTRNPEKLKESHWEENRNENSGNSWNKNFGSGWVSNRGRGRGNRGRGTYRSSFAYKDQNENRWQNRKPLSGNSNSSGSESFKFVEQQSYKRKSEQEFSFDTPADRSGWTSASSWAVRKTLPADVQNYYSRRGRNSSGPQSGWMKQEEETSGQDSSLKDQTNQQVDGSQLPINMMQPQMNVMQQQMNAQHQPMNIFPYPVGVHAPLMNIQRNPFNIHPQLPLHLHTGVPLMQVATPTSVSQGLPPPPPPPPPSQQVNYIASQPDGKQLQGIPSSSHVSNNMSTPVLPAPTAAPGNTGMVQGPSSGNTSSSSHSKASNAAVKLAESKVSVAVEASADSSKTDKKLQIQEKAAQEVKLAIKPFYQNKDITKEEYKEIVRKAVDKVCHSKSGEVNSTKVANLVKAYVDKYKYSRKGSQKKTLEEPVSTEKNIG

SEQ ID NO: 83883 - protein, 152 aa, Homo sapiens
  Payload ID: 16692
  Gene Symbol: SCAF11
  Gene Name: SR-related CTD-associated factor 11
  ENSP ID: ENSP00000477742
  MOD_RES (1)..(1): Any amino acid
XPPPSQQVNYIASQPDGKQLQGIPSSSHVSNNMSTPVLPAPTAAPGNTGMVQGPSSGNTSSSSHSKASNAAVKLAESKVSVAVEASADSSKTDKKLQIQEKAAQEVKLAIKPFYQNKDITKEEYKEIVRKAVDKVSYGFSGVCARCFEPPLF

SEQ ID NO: 83884 - protein, 71 aa, Homo sapiens
  Payload ID: 16692
  Gene Symbol: SCAF11
  Gene Name: SR-related CTD-associated factor 11
  ENSP ID: ENSP00000478596
  MOD_RES (1)..(1): Any amino acid
XKKQLRETKDKKNENSFEKQVSCHENSKSCIRRKAIVREDLLSAKVCDLKWIHSKLLFACGFYLFFCCFLI

SEQ ID NO: 83885 - protein, 1147 aa, Homo sapiens
  Payload ID: 16693
  Gene Symbol: SCAF4
  Gene Name: SR-related CTD-associated factor 4
  Uniprot ID: O95104
  ENSP ID: ENSP00000286835
MDAVNAFNQELFSLMDMKPPISRAKMILITKAAIKAIKLYKHVVQIVEKFIKKCKPEYKVPGLYVIDSIVRQSRHQFGTDKDVFGPRFSKNITATFQYLYLCPSEDKSKIVRVLNLWQKNGVFKIEIIQPLLDMAAGTSNAAPVAENVTNNEGSPPPPVKVSSEPPTQATPNSVPAVPQLPSSDAFAAVAQLFQTTQGQQLQQILQTFQQPPKPQSPALDNAVMAQVQAITAQLKTTPTQPSEQKAAFPPPEQKTAFDKKLLDRFDYDDEPEAVEESKKEDTTAVTTTAPAAAVPPAPTATVPAAAAPAAASPPPPQAPFGFPGDGMQQPAYTQHQNMDQFQPRMMGIQQDPMHHQVPLPPNGQMPGFGLLPTPPFPPMAQPVIPPTPPVQQPFQASFQAQNEPLTQKPHQQEMEVEQPCIQEVKRHMSDNRKSRSRSASRSPKRRRSRSGSRSRRSRHRRSRSRSRDRRRHSPRSRSQERRDREKERERRQKGLPQVKPETASVCSTTLWVGQLDKRTTQQDVASLLEEFGPIESINMIPPRGCAYIVMVHRQDAYRALQKLSRGNYKVNQKSIKIAWALNKGIKADYKQYWDVELGVTYIPWDKVKPEELESFCEGGMLDSDTLNPDWKGIPKKPENEVAQNGGAETSHTEPVSPIPKPLPVPVPPIPVPAPITVPPPQVPPHQPGPPVVGALQPPAFTPPLGIPPPGFGPGVPPPPPPPPFLRPGFNPMHLPPGFLPPGPPPPITPPVSIPPPHTPPISIPNSTIAGINEDTTKDLSIGNPIPTVVSGARGNAESGDSVKMYGSAVPPAAPTNLPTPPVTQPVSLLGTQGVAPGPVIGLQAPSTGLLGARPGLIPLQRPPGMPPPHLQRFPLMPPRPMPPHMMHRGPPPGPGGFAMPPPHGMKGPFPPHGPFVRPGGMPGLGGPGPGPGGPEDRDGRQQPPQQPQQQPQPQAPQQPQQQQQQQPPPSQQPPPTQQQPQQFRNDNRQQFNSGRDQERFGRRSFGNRVENDRERYGNRNDDRDNSNRDRREWGRRSPDRDRHRDLEERNRRSSGHRDRERDSRDRESRREKEEARGKEKPEVTDRAGGNKTVEPPISQVGNVDTASELEKGVSEAAVLKPSEELPAEATSSVEPEKDSGSAAEAPR

SEQ ID NO: 83886 - protein, 1125 aa, Homo sapiens
  Payload ID: 16693
  Gene Symbol: SCAF4
  Gene Name: SR-related CTD-associated factor 4
  Uniprot ID: O95104
  ENSP ID: ENSP00000382703
MDAVNAFNQELFSLMDMKPPISRAKMILITKAAIKAIKLYKHVVQIVEKFIKKCKPEYKVPGLYVIDSIVRQSRHQFGTDKDVFGPRFSKNITATFQYLYLCPSEDKSKIVRVLNLWQKNGVFKIEIIQPLLDMAAGTSNAAPVAENVTNNEGSPPPPVKVSSEPPTQATPNSVPAVPQLPSSDAFAAVAQLFQTTQGQQLQQILQTFQQPPKPQSPALDNAVMAQVQAITAQLKTTPTQPSEQKAAFPPPEQKTAFDKKLLDRFDYDDEPEAVEESKKEDTTAVTTTAPAAAVPPAPTATVPAAAAPAAASPPPPQAPFGFPGDGMQQPAYTQHQNMDQFQPRMMGIQQDPMHHQVPLPPNGQMPGFGLLPTPPFPPMAQPVIPPTPPVQQPFQASFQAQNEPLTQKPHQQEMEVEQPCIQEVKRHMSDNRKSRSRSASRSPKRRRSRSGSRSRRSRHRRSRSRSRDRRRHSPRSRSQERRDREKERERRQKGLPQVKPETASVCSTTLWVGQLDKRTTQQDVASLLEEFGPIESINMIPPRGCAYIVMVHRQDAYRALQKLSRGNYKVNQKSIKIAWALNKGIKADYKQYWDVELGVTYIPWDKVKPEELESFCEGGMLDSDTLNPDWKGIPKKPENEVAQNGGAETSHTEPVSPIPKPLPVPVPPIPVPAPITVPPPQVPPHQPGPPVVGALQPPAFTPPLGIPPPGFGPGVPPPPPPPPFLRPGFNPMHLPPGFLPPGPPPPITPPVSIPPPHTPPISIPNLVSGARGNAESGDSVKMYGSAVPPAAPTNLPTPPVTQPVSLLGTQGVAPGPVIGLQAPSTGLLGARPGLIPLQRPPGMPPPHLQRFPLMPPRPMPPHMMHRGPPPGPGGFAMPPPHGMKGPFPPHGPFVRPGGMPGLGGPGPGPGGPEDRDGRQQPPQQPQQQPQPQAPQQPQQQQQQQPPPSQQPPPTQQQPQQFRNDNRQQFNSGRDQERFGRRSFGNRVENDRERYGNRNDDRDNSNRDRREWGRRSPDRDRHRDLEERNRRSSGHRDRERDSRDRESRREKEEARGKEKPEVTDRAGGNKTVEPPISQVGNVDTASELEKGVSEAAVLKPSEELPAEATSSVEPEKDSGSAAEAPR

SEQ ID NO: 83887 - protein, 1132 aa, Homo sapiens
  Payload ID: 16693
  Gene Symbol: SCAF4
  Gene Name: SR-related CTD-associated factor 4
  Uniprot ID: O95104
  ENSP ID: ENSP00000402377
MDAVNAFNQELFSLMDMKPPISRAKMILITKAAIKAIKCKPEYKVPGLYVIDSIVRQSRHQFGTDKDVFGPRFSKNITATFQYLYLCPSEDKSKIVRVLNLWQKNGVFKIEIIQPLLDMAAGTSNAAPVAENVTNNEGSPPPPVKVSSEPPTQATPNSVPAVPQLPSSDAFAAVAQLFQTTQGQQLQQILQTFQQPPKPQSPALDNAVMAQVQAITAQLKTTPTQPSEQKAAFPPPEQKTAFDKKLLDRFDYDDEPEAVEESKKEDTTAVTTTAPAAAVPPAPTATVPAAAAPAAASPPPPQAPFGFPGDGMQQPAYTQHQNMDQFQPRMMGIQQDPMHHQVPLPPNGQMPGFGLLPTPPFPPMAQPVIPPTPPVQQPFQASFQAQNEPLTQKPHQQEMEVEQPCIQEVKRHMSDNRKSRSRSASRSPKRRRSRSGSRSRRSRHRRSRSRSRDRRRHSPRSRSQERRDREKERERRQKGLPQVKPETASVCSTTLWVGQLDKRTTQQDVASLLEEFGPIESINMIPPRGCAYIVMVHRQDAYRALQKLSRGNYKVNQKSIKIAWALNKGIKADYKQYWDVELGVTYIPWDKVKPEELESFCEGGMLDSDTLNPDWKGIPKKPENEVAQNGGAETSHTEPVSPIPKPLPVPVPPIPVPAPITVPPPQVPPHQPGPPVVGALQPPAFTPPLGIPPPGFGPGVPPPPPPPPFLRPGFNPMHLPPGFLPPGPPPPITPPVSIPPPHTPPISIPNSTIAGINEDTTKDLSIGNPIPTVVSGARGNAESGDSVKMYGSAVPPAAPTNLPTPPVTQPVSLLGTQGVAPGPVIGLQAPSTGLLGARPGLIPLQRPPGMPPPHLQRFPLMPPRPMPPHMMHRGPPPGPGGFAMPPPHGMKGPFPPHGPFVRPGGMPGLGGPGPGPGGPEDRDGRQQPPQQPQQQPQPQAPQQPQQQQQQQPPPSQQPPPTQQQPQQFRNDNRQQFNSGRDQERFGRRSFGNRVENDRERYGNRNDDRDNSNRDRREWGRRSPDRDRHRDLEERNRRSSGHRDRERDSRDRESRREKEEARGKEKPEVTDRAGGNKTVEPPISQVGNVDTASELEKGVSEAAVLKPSEELPAEATSSVEPEKDSGSAAEAPR

SEQ ID NO: 83888 - protein, 1271 aa, Homo sapiens
  Payload ID: 16694
  Gene Symbol: SCAF8
  Gene Name: SR-related CTD-associated factor 8
  Uniprot ID: Q9UPN6
  ENSP ID: ENSP00000356146
MEAVKTFNSELYSLNDYKPPISKAKMTQITKAAIKAIKFYKHVVQSVEKFIQKCKPEYKVPGLYVIDSIVRQSRHQFGQEKDVFAPRFSNNIISTFQNLYRCPGDDKSKIVRVLNLWQKNNVFKSEIIQPLLDMAAGIPPPVVTPVLASTTTAMSNTPGTPVTPVTPANVVQGLPDPWVSQITNTDTLAAVAQILQSPQGQQLQQLIQTLQIQQQKPQPSILQALDAGLVVQLQALTAQLTAAAAAANTLTPLEQGVSFNKKLMDRFDFGEDSEHSEEPKKEIPASQLSHVSESVNNSIFHQIAEQLQQQNLEHLRQQLLEQQQPQKATPQDSQEGTFGSEHSASPSQGSSQQHFLEPEVNLDDSIDIQQQDMDIDEGQDGVEEEVFEQEAKKVAVRSRSRTHSRSRSRSPRKRRSRSRSGSRKRKHRKRSRSRSRERKRKSSRSYSSERRAREREKERQKKGLPPIRSKTLSVCSTTLWVGQVDKKATQQDLTNLFEEFGQIESINMIPPRGCAYVCMVHRQDAFRALQKLSSGSYKIGSKVIKIAWALNKGVKTEYKQFWDVDLGVTYIPWEKVKVDDLEGFAEGGMIDQETVNTEWETVKSSEPVKETVQTTQSPTPVEKETVVTTQAEVFPPPVAMLQIPVAPAVPTVSLVPPAFPVSMPVPPPGFSPIPPPPFLRASFNPSQPPPGFMPPPVPPPVVPPPTIPPVVPTSLVQPSLSMTPETVKDVGFGSLVIPGGSVASNLATSALPAGNVFNAPTKQAEPEEKVPHLIDHQISSGENTRSVIPNDISSNAAILGGQPPNVTSNSGILGVQRPNVSSNSEILGVRPSNVSSSSGIIAAQPPNILNNSGILGIQPPSVSNSSGLLGVLPPNIPNNSGLVGVQPPNVPNTPGLLGTQPPAGPQNLPPLSIPNQRMPTMPMLDIRPGLIPQAPGPRFPLIQPGIPPQRGIPPPSVLDSALHPPPRGPFPPGDIFSQPERPFLAPGRQSVDNVTNPEKRIPLGNDNIQQEGDRDYRFPPIETRESISRPPPVDVRDVVGRPIDPREGPGRPPLDGRDHFGRPPVDIRENLVRPGIDHLGRRDHFGFNPEKPWGHRGDFDEREHRVLPVYGGPKGLHEERGRFRSGNYRFDPRSGPWNRGFGQEVHRDFDDRRRPWERQRDRDDRDFDFCREMNGNRLGRDRIQNTWVPPPHARVFDYFEGATSQRKGDNVPQVNGENTERHAQPPPIPVQNDPELYEKLTSSNEINKEKSDTVADIESEPVVESTETEGT

SEQ ID NO: 83889 - protein, 1337 aa, Homo sapiens
  Payload ID: 16694
  Gene Symbol: SCAF8
  Gene Name: SR-related CTD-associated factor 8
  Uniprot ID: Q9UPN6
  ENSP ID: ENSP00000356154
MPQPLLPALPPLSSPSGAGSCGPSGGECSGRRLFRRRARGLRSDNMEAVKTFNSEDCASTPACTDCFSSSMDTRSILYSLNDYKPPISKAKMTQITKAAIKAIKFYKHVVQSVEKFIQKCKPEYKVPGLYVIDSIVRQSRHQFGQEKDVFAPRFSNNIISTFQNLYRCPGDDKSKIVRVLNLWQKNNVFKSEIIQPLLDMAAGIPPPVVTPVLASTTTAMSNTPGTPVTPVTPANVVQGLPDPWVSQITNTDTLAAVAQILQSPQGQQLQQLIQTLQIQQQKPQPSILQALDAGLVVQLQALTAQLTAAAAAANTLTPLEQGVSFNKKLMDRFDFGEDSEHSEEPKKEIPASQLSHVSESVNNSIFHQIAEQLQQQNLEHLRQQLLEQQQPQKATPQDSQEGTFGSEHSASPSQGSSQQHFLEPEVNLDDSIDIQQQDMDIDEGQDGVEEEVFEQEAKKVAVRSRSRTHSRSRSRSPRKRRSRSRSGSRKRKHRKRSRSRSRERKRKSSRSYSSERRAREREKERQKKGLPPIRSKTLSVCSTTLWVGQVDKKATQQDLTNLFEEFGQIESINMIPPRGCAYVCMVHRQDAFRALQKLSSGSYKIGSKVIKIAWALNKGVKTEYKQFWDVDLGVTYIPWEKVKVDDLEGFAEGGMIDQETVNTEWETVKSSEPVKETVQTTQSPTPVEKETVVTTQAEVFPPPVAMLQIPVAPAVPTVSLVPPAFPVSMPVPPPGFSPIPPPPFLRASFNPSQPPPGFMPPPVPPPVVPPPTIPPVVPTSLVQPSLSMTPETVKDVGFGSLVIPGGSVASNLATSALPAGNVFNAPTKQAEPEEKVPHLIDHQISSGENTRSVIPNDISSNAAILGGQPPNVTSNSGILGVQRPNVSSNSEILGVRPSNVSSSSGIIAAQPPNILNNSGILGIQPPSVSNSSGLLGVLPPNIPNNSGLVGVQPPNVPNTPGLLGTQPPAGPQNLPPLSIPNQRMPTMPMLDIRPGLIPQAPGPRFPLIQPGIPPQRGIPPPSVLDSALHPPPRGPFPPGDIFSQPERPFLAPGRQSVDNVTNPEKRIPLGNDNIQQEGDRDYRFPPIETRESISRPPPVDVRDVVGRPIDPREGPGRPPLDGRDHFGRPPVDIRENLVRPGIDHLGRRDHFGFNPEKPWGHRGDFDEREHRVLPVYGGPKGLHEERGRFRSGNYRFDPRSGPWNRGFGQEVHRDFDDRRRPWERQRDRDDRDFDFCREMNGNRLGRDRIQNTWVPPPHARVFDYFEGATSQRKGDNVPQVNGENTERHAQPPPIPVQNDPELYEKLTSSNEINKEKSDTVADIESEPVVESTETEGT

SEQ ID NO: 83890 - protein, 1349 aa, Homo sapiens
  Payload ID: 16694
  Gene Symbol: SCAF8
  Gene Name: SR-related CTD-associated factor 8
  ENSP ID: ENSP00000413098
MPQPLLPALPPLSSPSGAGSCGPSGGEVKQEPVGGRGRREWRVAPSSRPRSSPRLALPTQCSGRRLFRRRARGLRSDNMEAVKTFNSELYSLNDYKPPISKAKMTQITKAAIKAIKFYKHVVQSVEKFIQKCKPEYKVPGLYVIDSIVRQSRHQFGQEKDVFAPRFSNNIISTFQNLYRCPGDDKSKIVRVLNLWQKNNVFKSEIIQPLLDMAAGIPPPVVTPVLASTTTAMSNTPGTPVTPVTPANVVQGLPDPWVSQITNTDTLAAVAQILQSPQGQQLQQLIQTLQIQQQKPQPSILQALDAGLVVQLQALTAQLTAAAAAANTLTPLEQGVSFNKKLMDRFDFGEDSEHSEEPKKEIPASQLSHVSESVNNSIFHQIAEQLQQQNLEHLRQQLLEQQQPQKATPQDSQEGTFGSEHSASPSQGSSQQHFLEPEVNLDDSIDIQQQDMDIDEGQDGVEEEVFEQEAKKVAVRSRSRTHSRSRSRSPRKRRSRSRSGSRKRKHRKRSRSRSRERKRKSSRSYSSERRAREREKERQKKGLPPIRSKTLSVCSTTLWVGQVDKKATQQDLTNLFEEFGQIESINMIPPRGCAYVCMVHRQDAFRALQKLSSGSYKIGSKVIKIAWALNKGVKTEYKQFWDVDLGVTYIPWEKVKVDDLEGFAEGGMIDQETVNTEWETVKSSEPVKETVQTTQSPTPVEKETVVTTQAEVFPPPVAMLQIPVAPAVPTVSLVPPAFPVSMPVPPPGFSPIPPPPFLRASFNPSQPPPGFMPPPVPPPVVPPPTIPPVVPTSLVQPSLSMTPETVKDVGFGSLVIPGGSVASNLATSALPAGNVFNAPTKQAEPEEKVPHLIDHQISSGENTRSVIPNDISSNAAILGGQPPNVTSNSGILGVQRPNVSSNSEILGVRPSNVSSSSGIIAAQPPNILNNSGILGIQPPSVSNSSGLLGVLPPNIPNNSGLVGVQPPNVPNTPGLLGTQPPAGPQNLPPLSIPNQRMPTMPMLDIRPGLIPQAPGPRFPLIQPGIPPQRGIPPPSVLDSALHPPPRGPFPPGDIFSQPERPFLAPGRQSVDNVTNPEKRIPLGNDNIQQEGDRDYRFPPIETRESISRPPPVDVRDVVGRPIDPREGPGRPPLDGRDHFGRPPVDIRENLVRPGIDHLGRRDHFGFNPEKPWGHRGDFDEREHRVLPVYGGPKGLHEERGRFRSGNYRFDPRSGPWNRGFGQEVHRDFDDRRRPWERQRDRDDRDFDFCREMNGNRLGRDRIQNTWVPPPHARVFDYFEGATSQRKGDNVPQVNGENTERHAQPPPIPVQNDPELYEKLTSSNEINKEKSDTVADIESEPVVESTETEGT

SEQ ID NO: 83891 - protein, 671 aa, Homo sapiens
  Payload ID: 16695
  Gene Symbol: SRPK1
  Gene Name: SRSF protein kinase 1
  ENSP ID: ENSP00000354674
KGERWSGLRHEGQWSPGRGPVLALQARKKRTKAKKDKAQRKSETQHRGSAPHSESDLPEQEEEILGSDDDEQEDPNDYCKGGYHLVKIGDLFNGRYHVIRKLGWGHFSTVWLSWDIQGKKFVAMKVVKSAEHYTETALDEIRLLKSVRNSDPNDPNREMVVQLLDDFKISGVNGTHICMVFEVLGHHLLKWIIKSNYQGLPLPCVKKIIQQVLQGLDYLHTKCRIIHTDIKPENILLSVNEQYIRRLAAEATEWQRSGAPPPSGSAVSTAPQPKPADKMSKNKKKKLKKKQKRQAELLEKRMQEIEEMEKESGPGQKRPNKQEESESPVERPLKENPPNKMTQEKLEESSTIGQDQTLMERDTEGGAAEINCNGVIEVINYTQNSNNETLRHKEDLHNANDCDVQNLNQESSFLSSQNGDSSTSQETDSCTPITSEVSDTMVCQSSSTVGQSFSEQHISQLQESIRAEIPCEDEQEQEHNGPLDNKGKSTAGNFLVNPLEPKNAEKLKVKIADLGNACWVHKHFTEDIQTRQYRSLEVLIGSGYNTPADIWSTACMAFELATGDYLFEPHSGEEYTRDEDHIALIIELLGKVPRKLIVAGKYSKEFFTKKGDLKHITKLKPWGLFEVLVEKYEWSQEEAAGFTDFLLPMLELIPEKRATAAECLRHPWLNS

SEQ ID NO: 83892 - protein, 826 aa, Homo sapiens
  Payload ID: 16695
  Gene Symbol: SRPK1
  Gene Name: SRSF protein kinase 1
  ENSP ID: ENSP00000362928
MERKGERWSGLRHEGQWSPGRGPGQRRELRLTAAVRFPDVRRPSTEVAPPHTPCLWAAGPRPSVRASSGAGRSRPLFPARPARALGPLQGPALGGRRRPPPARPLTRPETPPAHPARALLCAPWAASPTPAASPSPQPPPRQAPQPGLAPLLGLHPHLGRLLSSTFALHPSLSPAVLALQARKKRTKAKKDKAQRKSETQHRGSAPHSESDLPEQEEEILGSDDDEQEDPNDYCKGGYHLVKIGDLFNGRYHVIRKLGWGHFSTVWLSWDIQGKKFVAMKVVKSAEHYTETALDEIRLLKSVRNSDPNDPNREMVVQLLDDFKISGVNGTHICMVFEVLGHHLLKWIIKSNYQGLPLPCVKKIIQQVLQGLDYLHTKCRIIHTDIKPENILLSVNEQYIRRLAAEATEWQRSGAPPPSGSAVSTAPQPKPADKMSKNKKKKLKKKQKRQAELLEKRMQEIEEMEKESGPGQKRPNKQEESESPVERPLKENPPNKMTQEKLEESSTIGQDQTLMERDTEGGAAEINCNGVIEVINYTQNSNNETLRHKEDLHNANDCDVQNLNQESSFLSSQNGDSSTSQETDSCTPITSEVSDTMVCQSSSTVGQSFSEQHISQLQESIRAEIPCEDEQEQEHNGPLDNKGKSTAGNFLVNPLEPKNAEKLKVKIADLGNACWVHKHFTEDIQTRQYRSLEVLIGSGYNTPADIWSTACMAFELATGDYLFEPHSGEEYTRDEDHIALIIELLGKVPRKLIVAGKYSKEFFTKKGDLKHITKLKPWGLFEVLVEKYEWSQEEAAGFTDFLLPMLELIPEKRATAAECLRHPWLNS

SEQ ID NO: 83893 - protein, 655 aa, Homo sapiens
  Payload ID: 16695
  Gene Symbol: SRPK1
  Gene Name: SRSF protein kinase 1
  Uniprot ID: Q96SB4
  ENSP ID: ENSP00000362931
MERKVLALQARKKRTKAKKDKAQRKSETQHRGSAPHSESDLPEQEEEILGSDDDEQEDPNDYCKGGYHLVKIGDLFNGRYHVIRKLGWGHFSTVWLSWDIQGKKFVAMKVVKSAEHYTETALDEIRLLKSVRNSDPNDPNREMVVQLLDDFKISGVNGTHICMVFEVLGHHLLKWIIKSNYQGLPLPCVKKIIQQVLQGLDYLHTKCRIIHTDIKPENILLSVNEQYIRRLAAEATEWQRSGAPPPSGSAVSTAPQPKPADKMSKNKKKKLKKKQKRQAELLEKRMQEIEEMEKESGPGQKRPNKQEESESPVERPLKENPPNKMTQEKLEESSTIGQDQTLMERDTEGGAAEINCNGVIEVINYTQNSNNETLRHKEDLHNANDCDVQNLNQESSFLSSQNGDSSTSQETDSCTPITSEVSDTMVCQSSSTVGQSFSEQHISQLQESIRAEIPCEDEQEQEHNGPLDNKGKSTAGNFLVNPLEPKNAEKLKVKIADLGNACWVHKHFTEDIQTRQYRSLEVLIGSGYNTPADIWSTACMAFELATGDYLFEPHSGEEYTRDEDHIALIIELLGKVPRKLIVAGKYSKEFFTKKGDLKHITKLKPWGLFEVLVEKYEWSQEEAAGFTDFLLPMLELIPEKRATAAECLRHPWLNS

SEQ ID NO: 83894 - protein, 639 aa, Homo sapiens
  Payload ID: 16695
  Gene Symbol: SRPK1
  Gene Name: SRSF protein kinase 1
  Uniprot ID: Q96SB4
  ENSP ID: ENSP00000391069
MGIFVSFLRSETQHRGSAPHSESDLPEQEEEILGSDDDEQEDPNDYCKGGYHLVKIGDLFNGRYHVIRKLGWGHFSTVWLSWDIQGKKFVAMKVVKSAEHYTETALDEIRLLKSVRNSDPNDPNREMVVQLLDDFKISGVNGTHICMVFEVLGHHLLKWIIKSNYQGLPLPCVKKIIQQVLQGLDYLHTKCRIIHTDIKPENILLSVNEQYIRRLAAEATEWQRSGAPPPSGSAVSTAPQPKPADKMSKNKKKKLKKKQKRQAELLEKRMQEIEEMEKESGPGQKRPNKQEESESPVERPLKENPPNKMTQEKLEESSTIGQDQTLMERDTEGGAAEINCNGVIEVINYTQNSNNETLRHKEDLHNANDCDVQNLNQESSFLSSQNGDSSTSQETDSCTPITSEVSDTMVCQSSSTVGQSFSEQHISQLQESIRAEIPCEDEQEQEHNGPLDNKGKSTAGNFLVNPLEPKNAEKLKVKIADLGNACWVHKHFTEDIQTRQYRSLEVLIGSGYNTPADIWSTACMAFELATGDYLFEPHSGEEYTRDEDHIALIIELLGKVPRKLIVAGKYSKEFFTKKGDLKHITKLKPWGLFEVLVEKYEWSQEEAAGFTDFLLPMLELIPEKRATAAECLRHPWLNS

SEQ ID NO: 83895 - protein, 42 aa, Homo sapiens
  Payload ID: 16695
  Gene Symbol: SRPK1
  Gene Name: SRSF protein kinase 1
  ENSP ID: ENSP00000422886
SIRAEIPCEDEQEQEHNGPLDNKVLLMMPVVCRKIHGWKFSC

SEQ ID NO: 83896 - protein, 155 aa, Homo sapiens
  Payload ID: 16695
  Gene Symbol: SRPK1
  Gene Name: SRSF protein kinase 1
  ENSP ID: ENSP00000424068
MESCCTNQAGLELLASRDPLTTLASQITRITGMGIFVSFLRSETQHRGSAPHSESDLPEQEEEILGSDDDEQEDPNDYCKGGYHLVKIGDLFNGRYHVIRKLGWGHFSTVWLSWDIQGKKFVAMKVVKSAEHYTETALDEIRLLKSVRNSDPNDP

SEQ ID NO: 83897 - protein, 146 aa, Homo sapiens
  Payload ID: 16695
  Gene Symbol: SRPK1
  Gene Name: SRSF protein kinase 1
  ENSP ID: ENSP00000424170
MSKNKKKKLKKKQKRQAELLEKRMQEIEEMEKESGPGQKRPNKQEESESPVERPLKENPPNKMTQEKLEESSTIGQDQTLMERDTEGGAAEINCNGVIEVINYTQNSNNETLRHKEDLHNANDCDVQNLNQESSFLSSQNGDSSTS

SEQ ID NO: 83898 - protein, 118 aa, Homo sapiens
  Payload ID: 16695
  Gene Symbol: SRPK1
  Gene Name: SRSF protein kinase 1
  ENSP ID: ENSP00000424323
MASGQLGGSLSSNHVEESCCCSTPGLGLSSPGPAGKGCRRRTRARPVPFLPNSTEEAQTPLAWTSPPELVDHYRSVSELWSLLPAPQRLNLPPTSSRSETQHRGSAPHSESDLPEQEE

SEQ ID NO: 83899 - protein, 76 aa, Homo sapiens
  Payload ID: 16695
  Gene Symbol: SRPK1
  Gene Name: SRSF protein kinase 1
  ENSP ID: ENSP00000425172
MESCCTNQAGLELLASRDPLTTLASQITRITDLKLSTEALLPTLRVIYQSRKRRFWDLMMMSKKILMIIVKEVIIL

SEQ ID NO: 83900 - protein, 688 aa, Homo sapiens
  Payload ID: 16696
  Gene Symbol: SRPK2
  Gene Name: SRSF protein kinase 2
  Uniprot ID: P78362
  ENSP ID: ENSP00000349863
MSVNSEKSSSSERPEPQQKAPLVPPPPPPPPPPPPPLPDPTPPEPEEEILGSDDEEQEDPADYCKGGYHPVKIGDLFNGRYHVIRKLGWGHFSTVWLCWDMQGKRFVAMKVVKSAQHYTETALDEIKLLKCVRESDPSDPNKDMVVQLIDDFKISGMNGIHVCMVFEVLGHHLLKWIIKSNYQGLPVRCVKSIIRQVLQGLDYLHSKCKIIHTDIKPENILMCVDDAYVRRMAAEATEWQKAGAPPPSGSAVSTAPQQKPIGKISKNKKKKLKKKQKRQAELLEKRLQEIEELEREAERKIIEENITSAAPSNDQDGEYCPEVKLKTTGLEEAAEAETAKDNGEAEDQEEKEDAEKENIEKDEDDVDQELANIDPTWIESPKTNGHIENGPFSLEQQLDDEDDDEEDCPNPEEYNLDEPNAESDYTYSSSYEQFNGELPNGRHKIPESQFPEFSTSLFSGSLEPVACGSVLSEGSPLTEQEESSPSHDRSRTVSASSTGDLPKAKTRAADLLVNPLDPRNADKIRVKIADLGNACWVHKHFTEDIQTRQYRSIEVLIGAGYSTPADIWSTACMAFELATGDYLFEPHSGEDYSRDEDHIAHIIELLGSIPRHFALSGKYSREFFNRRGELRHITKLKPWSLFDVLVEKYGWPHEDAAQFTDFLIPMLEMVPEKRASAGECLRHPWLNS

SEQ ID NO: 83901 - protein, 699 aa, Homo sapiens
  Payload ID: 16696
  Gene Symbol: SRPK2
  Gene Name: SRSF protein kinase 2
  Uniprot ID: P78362
  ENSP ID: ENSP00000377262
MSSRKVLAIQARKRRPKREKHPKKPEPQQKAPLVPPPPPPPPPPPPPLPDPTPPEPEEEILGSDDEEQEDPADYCKGGYHPVKIGDLFNGRYHVIRKLGWGHFSTVWLCWDMQGKRFVAMKVVKSAQHYTETALDEIKLLKCVRESDPSDPNKDMVVQLIDDFKISGMNGIHVCMVFEVLGHHLLKWIIKSNYQGLPVRCVKSIIRQVLQGLDYLHSKCKIIHTDIKPENILMCVDDAYVRRMAAEATEWQKAGAPPPSGSAVSTAPQQKPIGKISKNKKKKLKKKQKRQAELLEKRLQEIEELEREAERKIIEENITSAAPSNDQDGEYCPEVKLKTTGLEEAAEAETAKDNGEAEDQEEKEDAEKENIEKDEDDVDQELANIDPTWIESPKTNGHIENGPFSLEQQLDDEDDDEEDCPNPEEYNLDEPNAESDYTYSSSYEQFNGELPNGRHKIPESQFPEFSTSLFSGSLEPVACGSVLSEGSPLTEQEESSPSHDRSRTVSASSTGDLPKAKTRAADLLVNPLDPRNADKIRVKIADLGNACWVHKHFTEDIQTRQYRSIEVLIGAGYSTPADIWSTACMAFELATGDYLFEPHSGEDYSRDEDHIAHIIELLGSIPRHFALSGKYSREFFNRRGELRHITKLKPWSLFDVLVEKYGWPHEDAAQFTDFLIPMLEMVPEKRASAGECLRHPWLNS

SEQ ID NO: 83902 - protein, 160 aa, Homo sapiens [sequence omitted]

SEQ ID NO: 83903 - protein, 68 aa, Homo sapiens
  Payload ID: 16696
  Gene Symbol: SRPK2
  Gene Name: SRSF protein kinase 2
  ENSP ID: ENSP00000417446
MSSRKVLAIQARKRRPKREKHPKKWSTSCCFKGRRLLTAFLHEISKEVLVFFLPGSSIDQEDDSDVVS

SEQ ID NO: 83904 - protein, 147 aa, Homo sapiens
  Payload ID: 16696
  Gene Symbol: SRPK2
  Gene Name: SRSF protein kinase 2
  ENSP ID: ENSP00000417946
MAFELATGDYLFEPHSGEDYSRDEDHIAHIIELLGSIPRHFALSGKYSREFFNRRDHIALIIELLGKVPRKYAMLGKYSKEFFTRKGELRHITKLKPWSLFDVLVEKYGWPHEDAAQFTDFLIPMLEMVPEKRASAGECLRHPWLNS

SEQ ID NO: 83905 - protein, 204 aa, Homo sapiens
  Payload ID: 16696
  Gene Symbol: SRPK2
  Gene Name: SRSF protein kinase 2
  ENSP ID: ENSP00000418786
  MOD_RES (1)..(1): Any amino acid
XDPRNADKIRVKIADLGNACWVHKHFTEDIQTRQYRSIEVLIGAGYSTPADIWSTACMAFELATGDYLFEPHSGEDYSRDEDHIAHIIELLGSIPRHFALSGKYSREFFNRRDHIALIIELLGKVPRKYAMLGKYSKEFFTRKGELRHITKLKPWSLFDVLVEKYGWPHEDAAQFTDFLIPMLEMVPEKRASAGECLRHPWLNS

SEQ ID NO: 83906 - protein, 231 aa, Homo sapiens [sequence omitted]

SEQ ID NO: 83907 - protein, 688 aa, Homo sapiens; identical to SEQ ID NO: 83900
  Payload ID: 16696
  Gene Symbol: SRPK2
  Gene Name: SRSF protein kinase 2
  Uniprot ID: P78362
  ENSP ID: ENSP00000419791

SEQ ID NO: 83908 - protein, 295 aa, Homo sapiens
  Payload ID: 16696
  Gene Symbol: SRPK2
  Gene Name: SRSF protein kinase 2
  ENSP ID: ENSP00000420208
  MOD_RES (1)..(1): Any amino acid
XEQQLDDEDDDEEDCPNPEEYNLDEPNAESDYTYSSSYEQFNGELPNGRHKIPESQFPEFSTSLFSGSLEPVACGSVLSEGSPLTEQEESSPSHDRSRTVSASSTGDLPKAKTRAADLLVNPLDPRNADKIRVKIADLGNACWVHKHFTEDIQTRQYRSIEVLIGAGYSTPADIWSTACMAFELATGDYLFEPHSGEDYSRDEDHIALIIELLGKVPRKYAMLGKYSKEFFTRKGELRHITKLKPWSLFDVLVEKYGWPHEDAAQFTDFLIPMLEMVPEKRASAGECLRHPWLNS

SEQ ID NO: 83909 - protein, 492 aa, Homo sapiens
  Payload ID: 16697
  Gene Symbol: SRPK3
  Gene Name: SRSF protein kinase 3
  ENSP ID: ENSP00000359118
MLQGLLGSDDEEQEDPKDYCKGGYHPVKIGDVFNGRYHVVRKLGWGHFSTVWLCWDIQRKRFVALKVVKSAGHYTETAVDEIKLLKCVRDSDPSDPKRETIVQLIDDFRISGVNGVHVCMVLEVLGHQLLKWIIKSNYQGLPVPCVKSIVRQVLHGLDYLHTKCKIIHTDIKPENILLCVGDAYIRRLAAEATEWQQAGAPPPSRSIVSTAPQEVLTGKLSKNKRKKMRRKRKQQKRLLEERLRDLQRLEAMEAATQAEDSGLRLDGGSGSTSSSGCFSGSLFSPASCSILSGSSNQRETGGLLSPSTPFGASNLLVNPLEPQNADKIKIKIADLGNACWVHKHFTEDIQTRQYRAVEVLIGAEYGPPADIWSTACMAFELATGDYLFEPHSGEDYSRDEDHIAHIVELLGDIPPAFALSGRYSREFFNRRGELRHIHNLKHWGLYEVLMEKYEWPLEQATQFSAFLLPMMEYIPEKRASAADCLQHPWLNP

SEQ ID NO: 83910 - protein, 567 aa, Homo sapiens
  Payload ID: 16697
  Gene Symbol: SRPK3
  Gene Name: SRSF protein kinase 3
  Uniprot ID: Q9UPE1
  ENSP ID: ENSP00000359119
MSASTGGGGDSGGSGGSSSSSQASCGPESSGSELALATPVPQMLQGLLGSDDEEQEDPKDYCKGGYHPVKIGDVFNGRYHVVRKLGWGHFSTVWLCWDIQRKRFVALKVVKSAGHYTETAVDEIKLLKCVRDSDPSDPKRETIVQLIDDFRISGVNGVHVCMVLEVLGHQLLKWIIKSNYQGLPVPCVKSIVRQVLHGLDYLHTKCKIIHTDIKPENILLCVGDAYIRRLAAEATEWQQAGAPPPSRSIVSTAPQEVLQTGKLSKNKRKKMRRKRKQQKRLLEERLRDLQRLEAMEAATQAEDSGLRLDGGSGSTSSSGCHPGGARAGPSPASSSPAPGGGRSLSAGSQTSGFSGSLFSPASCSILSGSSNQRETGGLLSPSTPFGASNLLVNPLEPQNADKIKIKIADLGNACWVHKHFTEDIQTRQYRAVEVLIGAEYGPPADIWSTACMAFELATGDYLFEPHSGEDYSRDEDHIAHIVELLGDIPPAFALSGRYSREFFNRRGELRHIHNLKHWGLYEVLMEKYEWPLEQATQFSAFLLPMMEYIPEKRASAADCLQHPWLNP

SEQ ID NO: 83911 - protein, 566 aa, Homo sapiens
  Payload ID: 16697
  Gene Symbol: SRPK3
  Gene Name: SRSF protein kinase 3
  Uniprot ID: Q9UPE1
  ENSP ID: ENSP00000359122
MSASTGGGGDSGGSGGSSSSSQASCGPESSGSELALATPVPQMLQGLLGSDDEEQEDPKDYCKGGYHPVKIGDVFNGRYHVVRKLGWGHFSTVWLCWDIQRKRFVALKVVKSAGHYTETAVDEIKLLKCVRDSDPSDPKRETIVQLIDDFRISGVNGVHVCMVLEVLGHQLLKWIIKSNYQGLPVPCVKSIVRQVLHGLDYLHTKCKIIHTDIKPENILLCVGDAYIRRLAAEATEWQQAGAPPPSRSIVSTAPQEVLTGKLSKNKRKKMRRKRKQQKRLLEERLRDLQRLEAMEAATQAEDSGLRLDGGSGSTSSSGCHPGGARAGPSPASSSPAPGGGRSLSAGSQTSGFSGSLFSPASCSILSGSSNQRETGGLLSPSTPFGASNLLVNPLEPQNADKIKIKIADLGNACWVHKHFTEDIQTRQYRAVEVLIGAEYGPPADIWSTACMAFELATGDYLFEPHSGEDYSRDEDHIAHIVELLGDIPPAFALSGRYSREFFNRRGELRHIHNLKHWGLYEVLMEKYEWPLEQATQFSAFLLPMMEYIPEKRASAADCLQHPWLNP

SEQ ID NO: 83912 - protein, 534 aa, Homo sapiens
  Payload ID: 16697
  Gene Symbol: SRPK3
  Gene Name: SRSF protein kinase 3
  ENSP ID: ENSP00000359126
MSASTGGGGDSGGSGGSSSSSQASCGPESSGSELALATPVPQMLQGLLGSDDEEQEDPKDYCKGGYHPVKIGDVFNGRYHVVRKLGWGHFSTVWLCWDIQRKRFVALKVVKSAGHYTETAVDEIKLLKCVRDSDPSDPKRETIVQLIDDFRISGVNGVHVCMVLEVLGHQLLKWIIKSNYQGLPVPCVKSIVRQVLHGLDYLHTKCKIIHTDIKPENILLCVGDAYIRRLAAEATEWQQAGAPPPSRSIVSTAPQEVLTGKLSKNKRKKMRRKRKQQKRLLEERLRDLQRLEAMEAATQAEDSGLRLDGGSGSTSSSGCFSGSLFSPASCSILSGSSNQRETGGLLSPSTPFGASNLLVNPLEPQNADKIKIKIADLGNACWVHKHFTEDIQTRQYRAVEVLIGAEYGPPADIWSTACMAFELATGDYLFEPHSGEDYSRDEDHIAHIVELLGDIPPAFALSGRYSREFFNRRGELRHIHNLKHWGLYEVLMEKYEWPLEQATQFSAFLLPMMEYIPEKRASAADCLQHPWLNP

SEQ ID NO: 83913 - protein, 533 aa, Homo sapiens
  Payload ID: 16697
  Gene Symbol: SRPK3
  Gene Name: SRSF protein kinase 3
  Uniprot ID: Q9UPE1
  ENSP ID: ENSP00000377376
MSASTGGGGDSGGSGGSSSSSQASCGPESSGSELALATPVPQMLQGLLGSDDEEQEDPKDYCKGGYHPVKIGDVFNGRYHVVRKLGWGHFSTVWLCWDIQRKRFVALKVVKSAGHYTETAVDEIKLLKCVRDSDPSDPKRETIVQLIDDFRISGVNGVHVCMVLEVLGHQLLKWIIKSNYQGLPVPCVKSIVRQVLHGLDYLHTKCKIIHTDIKPENILLCVGDAYIRRLAAEATEWQQAGAPPPSRSIVSTAPQEVLTGKLSKNKRKKMRRKRKQQKRLLEERLRDLQRLEAMEAATQAEDSGLRLDGGSGSTSSSGFSGSLFSPASCSILSGSSNQRETGGLLSPSTPFGASNLLVNPLEPQNADKIKIKIADLGNACWVHKHFTEDIQTRQYRAVEVLIGAEYGPPADIWSTACMAFELATGDYLFEPHSGEDYSRDEDHIAHIVELLGDIPPAFALSGRYSREFFNRRGELRHIHNLKHWGLYEVLMEKYEWPLEQATQFSAFLLPMMEYIPEKRASAADCLQHPWLNP

SEQ ID NO: 83914 - protein, 205 aa, Homo sapiens
  Payload ID: 16697
  Gene Symbol: SRPK3
  Gene Name: SRSF protein kinase 3
  ENSP ID: ENSP00000402300
  MOD_RES (1)..(1): Any amino acid
XAAAAAAVAAGRARLGHPEPLASLMPTATHPTRSSQASCGPESSGSELALATPVPQMLQGLLGSDDEEQEDPKDYCKGGYHPVKIGDVFNGRYHVVRKLGWGHFSTVWLCWDIQRKRFVALKVVKSAGHYTETAVDEIKLLKCVRDSDPSDPKRETIVQLIDDFRISGVNGVHVCMVLEVLGHQLLKWIIKSNYQGLPVPCVKSI

SEQ ID NO: 83915 - protein, 129 aa, Homo sapiens
  Payload ID: 16697
  Gene Symbol: SRPK3
  Gene Name: SRSF protein kinase 3
  ENSP ID: ENSP00000406166
  MOD_RES (1)..(1): Any amino acid
XTALAPARPQGSPCFQHKHFTEDIQTRQYRAVEVLIGAEYGPPADIWSTACMAFELATGDYLFEPHSGEDYSRDEDHIAHIVELLGDIPPAFALSGRYSREFFNRRGELRHIHNLKHWGLYEVLMEKYE

SEQ ID NO: 83916 - protein, 634 aa, Homo sapiens
  Payload ID: 16697
  Gene Symbol: SRPK3
  Gene Name: SRSF protein kinase 3
  ENSP ID: ENSP00000420058
MMQPLGHRPLSHHRTHGEVAMGLLVPSSEQLPAASLMSGYGAAHDRHLANGGEEEQALGARAPGSVAGAGSGLASSQASPQQACCLCSQASCGPESSGSELALATPVPQMLQGLLGSDDEEQEDPKDYCKGGYHPVKIGDVFNGRYHVVRKLGWGHFSTVWLCWDIQRKRFVALKVVKSAGHYTETAVDEIKLLKCVRDSDPSDPKRETIVQLIDDFRISGVNGVHVCMVLEVLGHQLLKWIIKSNYQGLPVPCVKSIVRQVLHGLDYLHTKCKIIHTDIKPENILLCVGDAYIRRLAAEATEWQQAGAPPPSRSIVSTAPQEVLQTGKLSKNKRKKMRRKRKQQKRLLEERLRDLQRLEAMEAATQAEDSGLRLDGGSGSTSSSGCHPGGARAGPSPASSSPAPGGGRSLSAGSQTSGFSGSLFSPASCSILSGSSNQRETGGLLSPSTPFGASNLLVNPLEPQNADKIKIKIADLGNACWVHKHFTEDIQTRQYRAVEVLIGAEYGPPADIWSTACMAFELATGDYLFEPHSGEDYSRDEDHIAHIVELLGDIPPAFALSGRYSREFFNRRGELRHIHNLKHWGLYEVLMEKYEWPLEQATQFSAFLLPMMEYIPEKRASAADCLQHPWLNP

SEQ ID NO: 83917 - protein, 391 aa, Homo sapiens
  Payload ID: 16698
  Gene Symbol: SOX1
  Gene Name: SRY (sex determining region Y)-box 1
  Uniprot ID: O00570
  ENSP ID: ENSP00000330218
MYSMMMETDLHSPGGAQAPTNLSGPAGAGGGGGGGGGGGGGGGAKANQDRVKRPMNAFMVWSRGQRRKMAQENPKMHNSEISKRLGAEWKVMSEAEKRPFIDEAKRLRALHMKEHPDYKYRPRRKTKTLLKKDKYSLAGGLLAAGAGGGGAAVAMGVGVGVGAAAVGQRLESPGGAAGGGYAHVNGWANGAYPGSVAAAAAAAAMMQEAQLAYGQHPGAGGAHPHAHPAHPHPHHPHAHPHNPQPMHRYDMGALQYSPISNSQGYMSASPSGYGGLPYGAAAAAAAAAGGAHQNSAVAAAAAAAAASSGALGALGSLVKSEPSGSPPAPAHSRAPCPGDLREMISMYLPAGEGGDPAAAAAAAAQSRLHSLPQHYQGAGAGVNGTVPLTHI

SEQ ID NO: 83918 - protein, 466 aa, Homo sapiens
  Payload ID: 16699
  Gene Symbol: SOX10
  Gene Name: SRY (sex determining region Y)-box 10
  Uniprot ID: P56693
  ENSP ID: ENSP00000354130
MAEEQDLSEVELSPVGSEEPRCLSPGSAPSLGPDGGGGGSGLRASPGPGELGKVKKEQQDGEADDDKFPVCIREAVSQVLSGYDWTLVPMPVRVNGASKSKPHVKRPMNAFMVWAQAARRKLADQYPHLHNAELSKTLGKLWRLLNESDKRPFIEEAERLRMQHKKDHPDYKYQPRRRKNGKAAQGEAECPGGEAEQGGTAAIQAHYKSAHLDHRHPGEGSPMSDGNPEHPSGQSHGPPTPPTTPKTELQSGKADPKRDGRSMGEGGKPHIDFGNVDIGEISHEVMSNMETFDVAELDQYLPPNGHPGHVSSYSAAGYGLGSALAVASGHSAWISKPPGVALPTVSPPGVDAKAQVKTETAGPQGPPHYTDQPSTSQIAYTSLSLPHYGSAFPSISRPQFDYSDHQPSGPYYGHSGQASGLYSAFSYMGPSQRPLYTAISDPSPSGPQSHSPTHWEQPVYTTLSRP

SEQ ID NO: 83919 - protein, 466 aa, Homo sapiens; identical to SEQ ID NO: 83918
  Payload ID: 16699
  Gene Symbol: SOX10
  Gene Name: SRY (sex determining region Y)-box 10
  Uniprot ID: P56693
  ENSP ID: ENSP00000380093

SEQ ID NO: 83920 - protein, 179 aa, Homo sapiens
  Payload ID: 16699
  Gene Symbol: SOX10
  Gene Name: SRY (sex determining region Y)-box 10
  ENSP ID: ENSP00000399777
  MOD_RES (1)..(1): Any amino acid
XQYPHLHNAELSKTLGKLWRLLNESDKRPFIEEAERLRMQHKKDHPDYKYQPRRRKNGKAAQGEAECPGGEAEQGGTAAIQAHYKSAHLDHRHPGEGSPMSDGNPEHPSGQSHGPPTPPTTPKTELQSGKADPKRDGRSMGEGGKPHIDFGNVDIGEISHEMGKLKFARLMLRSAGARI

SEQ ID NO: 83921 - protein, 213 aa, Homo sapiens
  Payload ID: 16699
  Gene Symbol: SOX10
  Gene Name: SRY (sex determining region Y)-box 10
  ENSP ID: ENSP00000414853
MAEEQDLSEVELSPVGSEEPRCLSPGSAPSLGPDGGGGGSGLRASPGPGELGKVKKEQQDGEADDDKFPVCIREAVSQVLSGYDWTLVPMPVRVNGASKSKPHVKRPMNAFMVWAQAARRKLADQYPHLHNAELSKTLGKLWRLLNESDKRPFIEEAERLRMQHKKDHPDYKYQPRRRKNGKAAQGEAECPGGEAEQGGTAAIQAHYKSAHLD

SEQ ID NO: 83922 - protein, 441 aa, Homo sapiens
  Payload ID: 16700
  Gene Symbol: SOX11
  Gene Name: SRY (sex determining region Y)-box 11
  Uniprot ID: P35716
  ENSP ID: ENSP00000322568
MVQQAESLEAESNLPREALDTEEGEFMACSPVALDESDPDWCKTASGHIKRPMNAFMVWSKIERRKIMEQSPDMHNAEISKRLGKRWKMLKDSEKIPFIREAERLRLKHMADYPDYKYRPRKKPKMDPSAKPSASQSPEKSAAGGGGGSAGGGAGGAKTSKGSSKKCGKLKAPAAAGAKAGAGKAAQSGDYGGAGDDYVLGSLRVSGSGGGGAGKTVKCVFLDEDDDDDDDDDELQLQIKQEPDEEDEEPPHQQLLQPPGQQPSQLLRRYNVAKVPASPTLSSSAESPEGASLYDEVRAGATSGAGGGSRLYYSFKNITKQHPPPLAQPALSPASSRSVSTSSSSSSGSSSGSSGEDADDLMFDLSLNFSQSAHSASEQQLGGGAAAGNLSLSLVDKDLDSFSEGSLGSHFEFPDYCTPELSEMIAGDWLEANFSDLVFTY

SEQ ID NO: 83923 - protein, 315 aa, Homo sapiens
  Payload ID: 16701
  Gene Symbol: SOX12
  Gene Name: SRY (sex determining region Y)-box 12
  Uniprot ID: O15370
  ENSP ID: ENSP00000347646
MVQQRGARAKRDGGPPPPGPGPAEEGAREPGWCKTPSGHIKRPMNAFMVWSQHERRKIMDQWPDMHNAEISKRLGRRWQLLQDSEKIPFVREAERLRLKHMADYPDYKYRPRKKSKGAPAKARPRPPGGSGGGSRLKPGPQLPGRGGRRAAGGPLGGGAAAPEDDDEDDDEELLEVRLVETPGRELWRMVPAGRAARGQAERAQGPSGEGAAAAAAASPTPSEDEEPEEEEEEAAAAEEGEEETVASGEESLGFLSRLPPGPAGLDCSALDRDPDLQPPSGTSHFEFPDYCTPEVTEMIAGDWRPSSIADLVFTY

SEQ ID NO: 83924 - protein, 622 aa, Homo sapiens
  Payload ID: 16702
  Gene Symbol: SOX13
  Gene Name: SRY (sex determining region Y)-box 13
  Uniprot ID: Q9UN79
  ENSP ID: ENSP00000356172
MSMRSPISAQLALDGVGTMVNCTIKSEEKKEPCHEAPQGSATAAEPQPGDPARASQDSADPQAPAQGNFRGSWDCSSPEGNGSPEPKRPGVSEAASGSQEKLDFNRNLKEVVPAIEKLLSSDWKERFLGRNSMEAKDVKGTQESLAEKELQLLVMIHQLSTLRDQLLTAHSEQKNMAAMLFEKQQQQMELARQQQEQIAKQQQQLIQQQHKINLLQQQIQQVNMPYVMIPAFPPSHQPLPVTPDSQLALPIQPIPCKPVEYPLQLLHSPPAPVVKRPGAMATHHPLQEPSQPLNLTAKPKAPELPNTSSSPSLKMSSCVPRPPSHGGPTRDLQSSPPSLPLGFLGEGDAVTKAIQDARQLLHSHSGALDGSPNTPFRKDLISLDSSPAKERLEDGCVHPLEEAMLSCDMDGSRHFPESRNSSHIKRPMNAFMVWAKDERRKILQAFPDMHNSSISKILGSRWKSMTNQEKQPYYEEQARLSRQHLEKYPDYKYKPRPKRTCIVEGKRLRVGEYKALMRTRRQDARQSYVIPPQAGQVQMSSSDVLYPRAAGMPLAQPLVEHYVPRSLDPNMPVIVNTCSLREEGEGTDDRHSVADGEMYRYSEDEDSEGEEKSDGELVVLTD

SEQ ID NO: 83925 - protein, 57 aa, Homo sapiens
  Payload ID: 16702
  Gene Symbol: SOX13
  Gene Name: SRY (sex determining region Y)-box 13
  ENSP ID: ENSP00000433595
MSMRSPISAQLALDGVGTMVNCTIKSEEKKEPCHEAPQGSATAAEPQPGDPARASQD

SEQ ID NO: 83926 - protein, 128 aa, Homo sapiens
  Payload ID: 16702
  Gene Symbol: SOX13
  Gene Name: SRY (sex determining region Y)-box 13
  ENSP ID: ENSP00000434093
  MOD_RES (1)..(1): Any amino acid
XTQESLAEKELQLLVMIHQLSTLRDQLLTAHSEQKNMAAMLFEKQQQQMELARQQQEQIAKQQQQLIQQQHKINLLQQQIQQVNMPYVMIPAFPPSHQPLPVTPDSQLALPIQPIPCKPGLFSLLPFP

SEQ ID NO: 83927 - protein, 179 aa, Homo sapiens
  Payload ID: 16702
  Gene Symbol: SOX13
  Gene Name: SRY (sex determining region Y)-box 13
  ENSP ID: ENSP00000436297
MSMRSPISAQLALDGVGTMVNCTIKSEEKKEPCHEAPQGSATAAEPQPGDPARASQDSADPQAPAQGNFRGSWDCSSPEGNGSPEPKRPGVSEAASGSQEKLDFNRNLKEVVPAIEKLLSSDWKERFLGRNSMEAKDVKGTQESLAEKELQLLVMIHQLSTLRDQLLTAHSEQKNMAAM

SEQ ID NO: 83928 - protein, 622 aa, Homo sapiens; identical to SEQ ID NO: 83924
  Payload ID: 16702
  Gene Symbol: SOX13
  Gene Name: SRY (sex determining region Y)-box 13
  Uniprot ID: Q9UN79
  ENSP ID: ENSP00000478239

SEQ ID NO: 83929 - protein, 240 aa, Homo sapiens
  Payload ID: 16703
  Gene Symbol: SOX14
  Gene Name: SRY (sex determining region Y)-box 14
  Uniprot ID: O95416
  ENSP ID: ENSP00000305343
MSKPSDHIKRPMNAFMVWSRGQRRKMAQENPKMHNSEISKRLGAEWKLLSEAEKRPYIDEAKRLRAQHMKEHPDYKYRPRRKPKNLLKKDRYVFPLPYLGDTDPLKAAGLPVGASDGLLSAPEKARAFLPPASAPYSLLDPAQFSSSAIQKMGEVPHTLATGALPYASTLGYQNGAFGSLSCPSQHTHTHPSPTNPGYVVPCNCTAWSASTLQPPVAYILFPGMTKTGIDPYSSAHATAM

SEQ ID NO: 83930 - protein, 233 aa, Homo sapiens [sequence omitted]

SEQ ID NO: 83931 - protein, 233 aa, Homo sapiens [sequence omitted]

SEQ ID NO: 83932 - protein, 178 aa, Homo sapiens
  Payload ID: 16704
  Gene Symbol: SOX15
  Gene Name: SRY (sex determining region Y)-box 15
  Uniprot ID: O60248
  ENSP ID: ENSP00000458286
MALPGSSQDQAWSLEPPAATAAASSSSGPQEREGAGSPAAPGTLPLEKVKRPMNAFMVWSSAQRRQMAQQNPKMHNSEISKRLGAQWKLLDEDEKRPFVEEAKRLRARHLRDYPDYKYRPRRKAKSSGAGPSRCGQGRGNLASGGPLWGPGYATTQPSRGFGYRPPSYSTAYLPGSYG

SEQ ID NO: 83933 - protein, 414 aa, Homo sapiens [sequence omitted]

SEQ ID NO: 83934 - protein, 384 aa, Homo sapiens [sequence omitted]

SEQ ID NO: 83935 - protein, 317 aa, Homo sapiens
  Payload ID: 16707
  Gene Symbol: SOX2
  Gene Name: SRY (sex determining region Y)-box 2
  Uniprot ID: P48431
  ENSP ID: ENSP00000323588
MYNMMETELKPPGPQQTSGGGGGNSTAAAAGGNQKNSPDRVKRPMNAFMVWSRGQRRKMAQENPKMHNSEISKRLGAEWKLLSETEKRPFIDEAKRLRALHMKEHPDYKYRPRRKTKTLMKKDKYTLPGGLLAPGGNSMASGVGVGAGLGAGVNQRMDSYAHMNGWSNGSYSMMQDQLGYPQHPGLNAHGAAQMQPMHRYDVSALQYNSMTSSQTYMNGSPTYSMSYSQQGTPGMALGSMGSVVKSEASSSPPVVTSSSHSRAPCQAGDLRDMISMYLPGAEVPEPAAPSRLHMSQHYQSGPVPGTAINGTLPLSHM

SEQ ID NO: 83936 - protein, 276 aa, Homo sapiens
  Payload ID: 16708
  Gene Symbol: SOX21
  Gene Name: SRY (sex determining region Y)-box 21
  Uniprot ID: Q9Y651
  ENSP ID: ENSP00000366144
MSKPVDHVKRPMNAFMVWSRAQRRKMAQENPKMHNSEISKRLGAEWKLLTESEKRPFIDEAKRLRAMHMKEHPDYKYRPRRKPKTLLKKDKFAFPVPYGLGGVADAEHPALKAGAGLHAGAGGGLVPESLLANPEKAAAAAAAAAARVFFPQSAAAAAAAAAAAAAGSPYSLLDLGSKMAEISSSSSGLPYASSLGYPTAGAGAFHGAAAAAAAAAAAAGGHTHSHPSPGNPGYMIPCNCSAWPSPGLQPPLAYILLPGMGKPQLDPYPAAYAAAL

SEQ ID NO: 83937 - protein, 446 aa, Homo sapiens
  Payload ID: 16709
  Gene Symbol: SOX3
  Gene Name: SRY (sex determining region Y)-box 3
  Uniprot ID: P41225
  ENSP ID: ENSP00000359567
MRPVRENSSGARSPRVPADLARSILISLPFPPDSLAHRPPSSAPTESQGLFTVAAPAPGAPSPPATLAHLLPAPAMYSLLETELKNPVGTPTQAAGTGGPAAPGGAGKSSANAAGGANSGGGSSGGASGGGGGTDQDRVKRPMNAFMVWSRGQRRKMALENPKMHNSEISKRLGADWKLLTDAEKRPFIDEAKRLRAVHMKEYPDYKYRPRRKTKTLLKKDKYSLPSGLLPPGAAAAAAAAAAAAAAASSPVGVGQRLDTYTHVNGWANGAYSLVQEQLGYAQPPSMSSPPPPPALPPMHRYDMAGLQYSPMMPPGAQSYMNVAAAAAAASGYGGMAPSATAAAAAAYGQQPATAAAAAAAAAAMSLGPMGSVVKSEPSSPPPAIASHSQRACLGDLRDMISMYLPPGGDAADAASPLPGGRLHGVHQHYQGAGTAVNGTVPLTHI

SEQ ID NO: 83938 - protein, 753 aa, Homo sapiens [sequence omitted]

SEQ ID NO: 83939 - protein, 501 aa, Homo sapiens
  Payload ID: 16710
  Gene Symbol: SOX30
  Gene Name: SRY (sex determining region Y)-box 30
  Uniprot ID: O94993
  ENSP ID: ENSP00000309343
MERARPEPPPQPRPLRPAPPPLPVEGTSFWAAAMEPPPSSPTLSAAASATLASSCGEAVASGLQPAVRRLLQVKPEQVLLLPQPQAQNEEAAASSAQARLLQFRPDLRLLQPPTASDGATSRPELHPVQPLALHVKAKKQKLGPSLDQSVGPRGAVETGPRASRVVKLEGPGPALGYFRGDEKGKLEAEEVMRDSMQGGAGKSPAAIREGVIKTEEPERLLEDCRLGAEPASNGLVHGSAEVILAPTSGAFGPHQQDLRIPLTLHTVPPGARIQFQGAPPSELIRLTKVPLTPVPTKMQSLLEPSVKIETKDVPLTVLPSDAGIPDTPFSKDRNGHVKRPMNAFMVWARIHRPALAKANPAANNAEISVQLGLEWNKLSEEQKKPYYDEAQKIKEKHREEFPGWVYQPRPGKRKRFPLSVSNVFSGTTQNIISTNPTTVYPYRSPTYSVVIPSLQNPITHPVVHALTVGLPLAMEIFRVQCQNALVIMKTGTQNMRVSFQL

SEQ ID NO: 83940 - protein, 448 aa, Homo sapiens
  Payload ID: 16710
  Gene Symbol: SOX30
  Gene Name: SRY (sex determining region Y)-box 30
  ENSP ID: ENSP00000427984
MEKCCRGKEQSLLCIQQGIPDTPFSKDRNGHVKRPMNAFMVWARIHRPALAKANPAANNAEISVQLGLEWNKLSEEQKKPYYDEAQKIKEKHREEFPGWVYQPRPGKRKRFPLSVSNVFSGTTQNIISTNPTTVYPYRSPTYSVVIPSLQNPITHPVGETSPAIQLPTPAVQSPSPVTLFQPSVSSAAQVAVQDPSLPVYPALPPQRFTGPSQTDTHQLHSEATHTVKQPTPVSLESANRISSSASTAHARFATSTIQPPREYSSVSPCPRSAPIPQASPIPHPHVYQPPPLGHPATLFGTPPRFSFHHPYFLPGPHYFPSSTCPYSRPPFGYGNFPSSMPECLSYYEDRYPKHEGIFSTLNRDYSFRDYSSECTHSENSRSCENMNGTSYYNSHSHSGEENLNPVPQLDIGTLENVFTAPTSTPSSIQQVNVTDSDEEEEEKVLRDL

SEQ ID NO: 83941 - protein, 474 aa, Homo sapiens
  Payload ID: 16711
  Gene Symbol: SOX4
  Gene Name: SRY (sex determining region Y)-box 4
  Uniprot ID: Q06945
  ENSP ID: ENSP00000244745
MVQQTNNAENTEALLAGESSDSGAGLELGIASSPTPGSTASTGGKADDPSWCKTPSGHIKRPMNAFMVWSQIERRKIMEQSPDMHNAEISKRLGKRWKLLKDSDKIPFIREAERLRLKHMADYPDYKYRPRKKVKSGNANSSSSAAASSKPGEKGDKVGGSGGGGHGGGGGGGSSNAGGGGGGASGGGANSKPAQKKSCGSKVAGGAGGGVSKPHAKLILAGGGGGGKAAAAAAASFAAEQAGAAALLPLGAAADHHSLYKARTPSASASASSAASASAALAAPGKHLAEKKVKRVYLFGGLGTSSSPVGGVGAGADPSDPLGLYEEEGAGCSPDAPSLSGRSSAASSPAAGRSPADHRGYASLRAASPAPSSAPSHASSSASSHSSSSSSSGSSSSDDEFEDDLLDLNPSSNFESMSLGSFSSSSALDRDLDFNFEPGSGSHFEFPDYCTPEVSEMISGDWLESSISNLVFTY

SEQ ID NO: 83942 - protein, 509 aa, Homo sapiens
  Payload ID: 16712
  Gene Symbol: SOX5
  Gene Name: SRY (sex determining region Y)-box 5
  ENSP ID: ENSP00000356174
MSVMSSKRPASPYGEADGEVAMVTSRQKVEEEESDGLPAFHLPLHVSFPNKPHSEEFQPVSLLTQETCGHRTPTSQHNTMEVDGNKVMSSFAPHNSSTSPQKAEEGGRQSGESLSSTALGTPERRKGSLADVVDTLKQRKMEELIKNEPEETPSIEKLLSKDWKDKLLAMGSGNFGEIKGTPESLAEKERQLMGMINQLTSLREQLLAAHDEQKKLAASQIEKQRQQMELAKQQQEQIARQQQQLLQQQHKINLLQQQIQVQGQLPPLMIPVFPPDQRTLAAAAQQGFLLPPGFSYKAGCSDPYPVQLIPTTMAAAAAATPGLGPLQLQQLYAAQLAAMQVSPGGKLPGIPQGNLGAAVSPTSIHTDKSTNSPPPKSKDEVAQPLNLSAKPKTSDGKSPTSPTSPHMPALRINSGAGPLKASVPAALASPSARVSTIGYLNDHDAVTKAIQEARQMKEQLRREQQVLDGKVAVVNSLGLNNCRTEKEVLESQSQEFIGNPEGVVAMNPT

SEQ ID NO: 83943 - protein, 642 aa, Homo sapiens
  Payload ID: 16712
  Gene Symbol: SOX5
  Gene Name: SRY (sex determining region Y)-box 5
  Uniprot ID: P35711
  ENSP ID: ENSP00000370788
MSSKRPASPYGEADGEVAMVTSRQKVEEEESDGLPAFHLPLHVSFPNKPHSEEFQPVSLLTQETCGHRTPTSQHNTMEVDGNKVMSSFAPHNSSTSPQKAEEGGRQSGESLSSTALGTPERRKGSLADVVDTLKQRKMEELIKNEPEETPSIEKLLSKDWKDKLLAMGSGNFGEIKGTPESLAEKERQLMGMINQLTSLREQLLAAHDEQKKLAASQIEKQRQQMELAKQQQEQIARQQQQLLQQQHKINLLQQQIQVQGQLPPLMIPVFPPDQRTLAAAAQQGFLLPPGFSYKAGCSDPYPVQLIPTTMAAAAAATPGLGPLQLQQLYAAQLAAMQVSPGGKLPGIPQGNLGAAVSPTSIHTDKSTNSPPPKSKEKTTLESLTQQLAVKQNEEGKFSHAMMDFNLSGDSDGSAGVSESRIYRESRGRGSNEPHIKRPMNAFMVWAKDERRKILQAFPDMHNSNISKILGSRWKAMTNLEKQPYYEEQARLSKQHLEKYPDYKYKPRPKRTCLVDGKKLRIGEYKAIMRNRRQEMRQYFNVGQQAQIPIATAGVVYPGAIAMAGMPSPHLPSEHSSVSSSPEPGMPVIQSTYGVKGEEPHIKEEIQAEDINGEIYDEYDEEEDDPDVDYGSDSENHIAGQAN

SEQ ID NO: 83944 - protein, 377 aa, Homo sapiens
  Payload ID: 16712
  Gene Symbol: SOX5
  Gene Name: SRY (sex determining region Y)-box 5
  Uniprot ID: P35711
  ENSP ID: ENSP00000379328
MHDEVAQPLNLSAKPKTSDGKSPTSPTSPHMPALRINSGAGPLKASVPAALASPSARVSTIGYLNDHDAVTKAIQEARQMKEQLRREQQVLDGKVAVVNSLGLNNCRTEKEKTTLESLTQQLAVKQNEEGKFSHAMMDFNLSGDSDGSAGVSESRIYRESRGRGSNEPHIKRPMNAFMVWAKDERRKILQAFPDMHNSNISKILGSRWKAMTNLEKQPYYEEQARLSKQHLEKYPDYKYKPRPKRTCLVDGKKLRIGEYKAIMRNRRQEMRQYFNVGQQAQIPIATAGVVYPGAIAMAGMPSPHLPSEHSSVSSSPEPGMPVIQSTYGVKGEEPHIKEEIQAEDINGEIYDEYDEEEDDPDVDYGSDSENHIAGQAN

SEQ ID NO: 83945 - protein, 128 aa, Homo sapiens
  Payload ID: 16712
  Gene Symbol: SOX5
  Gene Name: SRY (sex determining region Y)-box 5
  ENSP ID: ENSP00000393240
MLTDPDLPQEFERMSSKRPASPYGEADGEVAMVTSRQKVEEEESDGLPAFHLPLHEVDGNKVMSSFAPHNSSTSPQKAEEGGRQSGESLSSTALGTPERRKGSLADVVDTLKQRKMEELIKNEPEGSH

SEQ ID NO: 83946 - protein, 763 aa, Homo sapiens [sequence omitted]

SEQ ID NO: 83947 - protein, 750 aa, Homo sapiens
  Payload ID: 16712
  Gene Symbol: SOX5
  Gene Name: SRY (sex determining region Y)-box 5
  Uniprot ID: P35711
  ENSP ID: ENSP00000437487
MSSKRPASPYGEADGEVAMVTSRQKVEEEESDGLPAFHLPLHVSFPNKPHSEEFQPVSLLTQETCGHRTPTSQHNTMEVDGNKVMSSFAPHNSSTSPQKAEEGGRQSGESLSSTALGTPERRKGSLADVVDTLKQRKMEELIKNEPEETPSIEKLLSKDWKDKLLAMGSGNFGEIKGTPESLAEKERQLMGMINQLTSLREQLLAAHDEQKKLAASQIEKQRQQMELAKQQQEQIARQQQQLLQQQHKINLLQQQIQVQGQLPPLMIPVFPPDQRTLAAAAQQGFLLPPGFSYKAGCSDPYPVQLIPTTMAAAAAATPGLGPLQLQQLYAAQLAAMQVSPGGKLPGIPQGNLGAAVSPTSIHTDKSTNSPPPKSKDEVAQPLNLSAKPKTSDGKSPTSPTSPHMPALRINSGAGPLKASVPAALASPSARVSTIGYLNDHDAVTKAIQEARQMKEQLRREQQVLDGKVAVVNSLGLNNCRTEKEKTTLESLTQQLAVKQNEEGKFSHAMMDFNLSGDSDGSAGVSESRIYRESRGRGSNEPHIKRPMNAFMVWAKDERRKILQAFPDMHNSNISKILGSRWKAMTNLEKQPYYEEQARLSKQHLEKYPDYKYKPRPKRTCLVDGKKLRIGEYKAIMRNRRQEMRQYFNVGQQAQIPIATAGVVYPGAIAMAGMPSPHLPSEHSSVSSSPEPGMPVIQSTYGVKGEEPHIKEEIQAEDINGEIYDEYDEEEDDPDVDYGSDSENHIAGQAN

SEQ ID NO: 83948 - protein, 728 aa, Homo sapiens
  Payload ID: 16712
  Gene Symbol: SOX5
  Gene Name: SRY (sex determining region Y)-box 5
  ENSP ID: ENSP00000439832
MLTDPDLPQEFERMSSKRPASPYGEADGEVAMVTSRQKVEEEESDGLPAFHLPLHEVDGNKVMSSFAPHNSSTSPQKAEEGGRQSGESLSSTALGTPERRKGSLADVVDTLKQRKMEELIKNEPEETPSIEKLLSKDWKDKLLAMGSGNFGEIKGTPESLAEKERQLMGMINQLTSLREQLLAAHDEQKKLAASQIEKQRQQMELAKQQQEQIARQQQQLLQQQHKINLLQQQIQVQGQLPPLMIPVFPPDQRTLAAAAQQGFLLPPGFSYKAGCSDPYPVQLIPTTMAAAAAATPGLGPLQLQQLYAAQLAAMQVSPGGKLPGIPQGNLGAAVSPTSIHTDKSTNSPPPKSKDEVAQPLNLSAKPKTSDGKSPTSPTSPHMPALRINSGAGPLKASVPAALASPSARVSTIGYLNDHDAVTKAIQEARQMKEQLRREQQVLDGKVAVVNSLGLNNCRTEKEKTTLESLTQQLAVKQNEEGKFSHAMMDFNLSGDSDGSAGVSESRIYRESRGRGSNEPHIKRPMNAFMVWAKDERRKILQAFPDMHNSNISKILGSRWKAMTNLEKQPYYEEQARLSKQHLEKYPDYKYKPRPKRTCLVDGKKLRIGEYKAIMRNRRQEMRQYFNVGQQAQIPIATAGVVYPGAIAMAGMPSPHLPSEHSSVSSSPEPGMPVIQSTYGVKGEEPHIKEEIQAEDINGEIYDEYDEEEDDPDVDYGSDSENHIAGQAN

SEQ ID NO: 83949 - protein, 144 aa, Homo sapiens
  Payload ID: 16712
  Gene Symbol: SOX5
  Gene Name: SRY (sex determining region Y)-box 5
  ENSP ID: ENSP00000441579
MSSKRPASPYGEADGEVAMVTSRQKVEEEESDGLPAFHLPLHVSFPNKPHSEEFQPVSLLTQETCGHRTPTSQHNTMEVDGNKVMSSFAPHNSSTSPQKAEEGGRQSGESLSSTALGTPERRKGSLADVVDTLKQRKMEELIKN

SEQ ID NO: 83950 - protein, 642 aa, Homo sapiens; identical to SEQ ID NO: 83943
  Payload ID: 16712
  Gene Symbol: SOX5
  Gene Name: SRY (sex determining region Y)-box 5
  Uniprot ID: P35711
  ENSP ID: ENSP00000441973

SEQ ID NO: 83951 - protein, 241 aa, Homo sapiens [sequence omitted]

SEQ ID NO: 83952 - protein, 753 aa, Homo sapiens
  Payload ID: 16712
  Gene Symbol: SOX5
  Gene Name: SRY (sex determining region Y)-box 5
  Uniprot ID: P35711
  ENSP ID: ENSP00000443520
MSVMSSKRPASPYGEADGEVAMVTSRQKVEEEESDGLPAFHLPLHVSFPNKPHSEEFQPVSLLTQETCGHRTPTSQHNTMEVDGNKVMSSFAPHNSSTSPQKAEEGGRQSGESLSSTALGTPERRKGSLADVVDTLKQRKMEELIKNEPEETPSIEKLLSKDWKDKLLAMGSGNFGEIKGTPESLAEKERQLMGMINQLTSLREQLLAAHDEQKKLAASQIEKQRQQMELAKQQQEQIARQQQQLLQQQHKINLLQQQIQVQGQLPPLMIPVFPPDQRTLAAAAQQGFLLPPGFSYKAGCSDPYPVQLIPTTMAAAAAATPGLGPLQLQQLYAAQLAAMQVSPGGKLPGIPQGNLGAAVSPTSIHTDKSTNSPPPKSKDEVAQPLNLSAKPKTSDGKSPTSPTSPHMPALRINSGAGPLKASVPAALASPSARVSTIGYLNDHDAVTKAIQEARQMKEQLRREQQVLDGKVAVVNSLGLNNCRTEKEKTTLESLTQQLAVKQNEEGKFSHAMMDFNLSGDSDGSAGVSESRIYRESRGRGSNEPHIKRPMNAFMVWAKDERRKILQAFPDMHNSNISKILGSRWKAMTNLEKQPYYEEQARLSKQHLEKYPDYKYKPRPKRTCLVDGKKLRIGEYKAIMRNRRQEMRQYFNVGQQAQIPIATAGVVYPGAIAMAGMPSPHLPSEHSSVSSSPEPGMPVIQSTYGVKGEEPHIKEEIQAEDINGEIYDEYDEEEDDPDVDYGSDSENHIAGQAN

SEQ ID NO: 83953 - protein, 808 aa, Homo sapiens
  Payload ID: 16713
  Gene Symbol: SOX6
  Gene Name: SRY (sex determining region Y)-box 6
  Uniprot ID: P35712
  ENSP ID: ENSP00000324948
MSSKQATSPFACAADGEDAMTQDLTSREKEEGSDQHVASHLPLHPIMHNKPHSEELPTLVSTIQQDADWDSVLSSQQRMESENNKLCSLYSFRNTSTSPHKPDEGSRDREIMTSVTFGTPERRKGSLADVVDTLKQKKLEEMTRTEQEDSSCMEKLLSKDWKEKMERLNTSELLGEIKGTPESLAEKERQLSTMITQLISLREQLLAAHDEQKKLAASQIEKQRQQMDLARQQQEQIARQQQQLLQQQHKINLLQQQIQVQGHMPPLMIPIFPHDQRTLAAAAAAQQGFLFPPGITYKPGDNYPVQFIPSTMAAAAASGLSPLQLQKGHVSHPQINQRLKGLSDRFGRNLDTFEHGGGHSYNHKQIEQLYAAQLASMQVSPGAKMPSTPQPPNTAGTVSPTGIKNEKRGTSPVTQVKDEAAAQPLNLSSRPKTAEPVKSPTSPTQNLFPASKTSPVNLPNKSSIPSPIGGSLGRGSSLDILSSLNSPALFGDQDTVMKAIQEARKMREQIQREQQQQQPHGVDGKLSSINNMGLNSCRNEKERTRFENLGPQLTGKSNEDGKLGPGVIDLTRPEDAEGGATVAEARVYRDARGRASSEPHIKRPMNAFMVWAKDERRKILQAFPDMHNSNISKILGSRWKSMSNQEKQPYYEEQARLSKIHLEKYPNYKYKPRPKRTCIVDGKKLRIGEYKQLMRSRRQEMRQFFTVGQQPQIPITTGTGVVYPGAITMATTTPSPQMTSDCSSTSASPEPSLPVIQSTYGMKTDGGSLAGNEMINGEDEMEMYDDYEDDPKSDYSSENEAPEAVSAN

SEQ ID NO: 83954 - protein, 808 aa, Homo sapiens; identical to SEQ ID NO: 83953
  Payload ID: 16713
  Gene Symbol: SOX6
  Gene Name: SRY (sex determining region Y)-box 6
  Uniprot ID: P35712
  ENSP ID: ENSP00000379644

SEQ ID NO: 83955 - protein, 801 aa, Homo sapiens
  Payload ID: 16713
  Gene Symbol: SOX6
  Gene Name: SRY (sex determining region Y)-box 6
  Uniprot ID: P35712
  ENSP ID: ENSP00000432134
MSSKQATSPFACAADGEDAMTQDLTSREKEEGSDQHVASHLPLHPIMHNKPHSEELPTLVSTIQQDADWDSVLSSQQRMESENNKLCSLYSFRNTSTSPHKPDEGSRDREIMTSVTFGTPERRKGSLADVVDTLKQKKLEEMTRTEQEDSSCMEKLLSKDWKEKMERLNTSELLGEIKGTPESLAEKERQLSTMITQLISLREQLLAAHDEQKKLAASQIEKQRQQMDLARQQQEQIARQQQQLLQQQHKINLLQQQIQVQGHMPPLMIPIFPHDQRTLAAAAAAQQGFLFPPGITYKPGDNYPVQFIPSTMAAAAASGLSPLQLQQLYAAQLASMQVSPGAKMPSTPQPPNTAGTVSPTGIKNEKRGTSPVTQVKDEAAAQPLNLSSRPKTAEPVKSPTSPTQNLFPASKTSPVNLPNKSSIPSPIGGSLGRGSSLGKWKSQHQEETYELDILSSLNSPALFGDQDTVMKAIQEARKMREQIQREQQQQQPHGVDGKLSSINNMGLNSCRNEKERTRFENLGPQLTGKSNEDGKLGPGVIDLTRPEDAEGSKAMNGSAAKLQQYYCWPTGGATVAEARVYRDARGRASSEPHIKRPMNAFMVWAKDERRKILQAFPDMHNSNISKILGSRWKSMSNQEKQPYYEEQARLSKIHLEKYPNYKYKPRPKRTCIVDGKKLRIGEYKQLMRSRRQEMRQFFTVGQQPQIPITTGTGVVYPGAITMATTTPSPQMTSDCSSTSASPEPSLPVIQSTYGMKTDGGSLAGNEMINGEDEMEMYDDYEDDPKSDYSSENEAPEAVSAN

SEQ ID NO: 83956 - protein, 159 aa, Homo sapiens
  Payload ID: 16713
  Gene Symbol: SOX6
  Gene Name: SRY (sex determining region Y)-box 6
  ENSP ID: ENSP00000432577
MSSKQATSPFACAADGEDAMTQDLTSREKEEGSDQHVASHLPLHPIMHNKPHSEELPTLVSTIQQDADWDSVLSSQQRMESENNKLCSLYSFRNTSTSPHKPDEGSRDREIMTSVTFGTPERRKGSLADVVDTLKQKKLEEMTRTEQEASLSFKISGVP

SEQ ID NO: 83957 - protein, 79 aa, Homo sapiens
  Payload ID: 16713
  Gene Symbol: SOX6
  Gene Name: SRY (sex determining region Y)-box 6
  ENSP ID: ENSP00000432596
MSSKQATSPFACAADGEDAMTQDLTSREKEEGSDQHVASHLPLHPIMHNKPHSEELPTLVSTIQQDADWDSVLSSQQRM

SEQ ID NO: 83958 - protein, 828 aa, Homo sapiens
  Payload ID: 16713
  Gene Symbol: SOX6
  Gene Name: SRY (sex determining region Y)-box 6
  Uniprot ID: P35712
  ENSP ID: ENSP00000433233
MSSKQATSPFACAADGEDAMTQDLTSREKEEGSDQHVASHLPLHPIMHNKPHSEELPTLVSTIQQDADWDSVLSSQQRMESENNKLCSLYSFRNTSTSPHKPDEGSRDREIMTSVTFGTPERRKGSLADVVDTLKQKKLEEMTRTEQEDSSCMEKLLSKDWKEKMERLNTSELLGEIKGTPESLAEKERQLSTMITQLISLREQLLAAHDEQKKLAASQIEKQRQQMDLARQQQEQIARQQQQLLQQQHKINLLQQQIQVQGHMPPLMIPIFPHDQRTLAAAAAAQQGFLFPPGITYKPGDNYPVQFIPSTMAAAAASGLSPLQLQKGHVSHPQINQRLKGLSDRFGRNLDTFEHGGGHSYNHKQIEQLYAAQLASMQVSPGAKMPSTPQPPNTAGTVSPTGIKNEKRGTSPVTQVKDEAAAQPLNLSSRPKTAEPVKSPTSPTQNLFPASKTSPVNLPNKSSIPSPIGGSLGRGSSLDILSSLNSPALFGDQDTVMKAIQEARKMREQIQREQQQQQPHGVDGKLSSINNMGLNSCRNEKERTRFENLGPQLTGKSNEDGKLGPGVIDLTRPEDAEGSKAMNGSAAKLQQYYCWPTGGATVAEARVYRDARGRASSEPHIKRPMNAFMVWAKDERRKILQAFPDMHNSNISKILGSRWKSMSNQEKQPYYEEQARLSKIHLEKYPNYKYKPRPKRTCIVDGKKLRIGEYKQLMRSRRQEMRQFFTVGQQPQIPITTGTGVVYPGAITMATTTPSPQMTSDCSSTSASPEPSLPVIQSTYGMKTDGGSLAGNEMINGEDEMEMYDDYEDDPKSDYSSENEAPEAVSAN

SEQ ID NO: 83959 - protein, 804 aa, Homo sapiens
  Payload ID: 16713
  Gene Symbol: SOX6
  Gene Name: SRY (sex determining region Y)-box 6
  Uniprot ID: P35712
  ENSP ID: ENSP00000434455
MGRMSSKQATSPFACAADGEDAMTQDLTSREKEEGSDQHVASHLPLHPIMHNKPHSEELPTLVSTIQQDADWDSVLSSQQRMESENNKLCSLYSFRNTSTSPHKPDEGSRDREIMTSVTFGTPERRKGSLADVVDTLKQKKLEEMTRTEQEDSSCMEKLLSKDWKEKMERLNTSELLGEIKGTPESLAEKERQLSTMITQLISLREQLLAAHDEQKKLAASQIEKQRQQMDLARQQQEQIARQQQQLLQQQHKINLLQQQIQVQGHMPPLMIPIFPHDQRTLAAAAAAQQGFLFPPGITYKPGDNYPVQFIPSTMAAAAASGLSPLQLQQLYAAQLASMQVSPGAKMPSTPQPPNTAGTVSPTGIKNEKRGTSPVTQVKDEAAAQPLNLSSRPKTAEPVKSPTSPTQNLFPASKTSPVNLPNKSSIPSPIGGSLGRGSSLGKWKSQHQEETYELDILSSLNSPALFGDQDTVMKAIQEARKMREQIQREQQQQQPHGVDGKLSSINNMGLNSCRNEKERTRFENLGPQLTGKSNEDGKLGPGVIDLTRPEDAEGSKAMNGSAAKLQQYYCWPTGGATVAEARVYRDARGRASSEPHIKRPMNAFMVWAKDERRKILQAFPDMHNSNISKILGSRWKSMSNQEKQPYYEEQARLSKIHLEKYPNYKYKPRPKRTCIVDGKKLRIGEYKQLMRSRRQEMRQFFTVGQQPQIPITTGTGVVYPGAITMATTTPSPQMTSDCSSTSASPEPSLPVIQSTYGMKTDGGSLAGNEMINGEDEMEMYDDYEDDPKSDYSSENEAPEAVSAN

SEQ ID NO: 83960 - protein, 139 aa, Homo sapiens
  Payload ID: 16713
  Gene Symbol: SOX6
  Gene Name: SRY (sex determining region Y)-box 6
  ENSP ID: ENSP00000434892
MSSKQATSPFACAADGEDAMTQDLTSREKEEGSDQHVASHLPLHPIMHNKPHSEELPTLVSTIQQDADWDSVLSSQQRMESENNKLCSLYSFRNTSTSPHKPDEGSRDREIMTSVTFGTPERRKGSLADVVDTLKQKKL

SEQ ID NO: 83961 - protein, 159 aa, Homo sapiens
  Payload ID: 16713
  Gene Symbol: SOX6
  Gene Name: SRY (sex determining region Y)-box 6
  ENSP ID: ENSP00000436170
MSSKQATSPFACAADGEDAMTQDLTSREKEEGSDQHVASHLPLHPIMHNKPHSEELPTLVSTIQQDADWDSVLSSQQRMESENNKLCSLYSFRNTSTSPHKPDEGSRDREIMTSVTFGTPERRKGSLADVVDTLKQKKLEEMTRTEQEDSSCMEKLLSK

SEQ ID NO: 83962 - protein, 388 aa, Homo sapiens [sequence omitted]

SEQ ID NO: 83963 - protein, 446 aa, Homo sapiens [sequence omitted]

SEQ ID NO: 83964 - protein, 509 aa, Homo sapiens
  Payload ID: 16716
  Gene Symbol: SOX9
  Gene Name: SRY (sex determining region Y)-box 9
  Uniprot ID: P48436
  ENSP ID: ENSP00000245479
MNLLDPFMKMTDEQEKGLSGAPSPTMSEDSAGSPCPSGSGSDTENTRPQENTFPKGEPDLKKESEEDKFPVCIREAVSQVLKGYDWTLVPMPVRVNGSSKNKPHVKRPMNAFMVWAQAARRKLADQYPHLHNAELSKTLGKLWRLLNESEKRPFVEEAERLRVQHKKDHPDYKYQPRRRKSVKNGQAEAEEATEQTHISPNAIFKALQADSPHSSSGMSEVHSPGEHSGQSQGPPTPPTTPKTDVQPGKADLKREGRPLPEGGRQPPIDFRDVDIGELSSDVISNIETFDVNEFDQYLPPNGHPGVPATHGQVTYTGSYGISSTAATPASAGHVWMSKQQAPPPPPQQPPQAPPAPQAPPQPQAAPPQQPAAPPQQPQAHTLTTLSSEPGQSQRTHIKTEQLSPSHYSEQQQHSPQQIAYSPFNLPHYSPSYPPITRSQYDYTDHQNSSSYYSHAAGQGTGLYSTFTYMNPAQRPMYTPIADTSGVPSIPQTHSPQHWEQPVYTQLTRP

SEQ ID NO: 83965 - protein, 353 aa, Homo sapiens
  Payload ID: 16717
  Gene Symbol: SSUH2
  Gene Name: ssu-2 homolog (C. elegans)
  Uniprot ID: Q9Y2M2
  ENSP ID: ENSP00000324551
MPSPVGLLRALPLPWPQFLACTLRRLAGPRESTGPSQKPPPLCSVPCRVPAMTEEVAREALLSFVDSKCCYSSTVAGDLVIQELKRQTLCRYRLETFSESRISEWTFQPFTNHSVDGPQRGASPRLWDIKVQGPPMFQEDTRKFQVPHSSLVKECHKCHGRGRYKCSGCHGAGTVRCPSCCGAKRKAKQSRRCQLCAGSGRRRCSTCSGRGNKTCATCKGEKKLLHFIQLVIMWKNSLFEFVSEHRLNCPRELLAKAKGENLFKDENSVVYPIVDFPLRDISLASQRGIAEHSAALASRARVLQQRQTIELIPLTEVHYWYQGKTYVYYIYGTDHQVYAVDYPERYCCGCTIV

SEQ ID NO: 83966 - protein, 353 aa, Homo sapiens; identical to SEQ ID NO: 83965
  Payload ID: 16717
  Gene Symbol: SSUH2
  Gene Name: ssu-2 homolog (C. elegans)
  Uniprot ID: Q9Y2M2
  ENSP ID: ENSP00000339150

SEQ ID NO: 83967 - protein, 156 aa, Homo sapiens
  Payload ID: 16717
  Gene Symbol: SSUH2
  Gene Name: ssu-2 homolog (C. elegans)
  ENSP ID: ENSP00000388845
MDRDLNEDDSVVDLSFEAESPLAPPTELLERLPSYDWLLQGGRGQIFFPPLEAPGRPQEQRSWPSFLEHRKNPASSGESSLASPAHSVSCAAIHGSEDRRAPLCARAGGCWRYKCAELWINGSQGCHGEMHEDARGGRRILSSWRCWGQKDFKSLR

SEQ ID NO: 83968 - protein, 84 aa, Homo sapiens
  Payload ID: 16717
  Gene Symbol: SSUH2
  Gene Name: ssu-2 homolog (C. elegans)
  ENSP ID: ENSP00000389937
MLLLMSQCRKQFPPLCSAARRKQHCLGTRIITKNFSVNLSVCLLQLPVCPLWYLWKPVVGKSLLRYLMNLHISYTAHNKYPLNE

SEQ ID NO: 83969 - protein, 39 aa, Homo sapiens
  Payload ID: 16717
  Gene Symbol: SSUH2
  Gene Name: ssu-2 homolog (C. elegans)
  ENSP ID: ENSP00000390328
MTGFFKGAEDRYSSHLWRPQGGPRSKGPGPRSWNTESLR

SEQ ID NO: 83970 - protein, 173 aa, Homo sapiens
  Payload ID: 16717
  Gene Symbol: SSUH2
  Gene Name: ssu-2 homolog (C. elegans)
  ENSP ID: ENSP00000401289
MDRDLNEDDSVVDLSFEAESPLAPPTELLERLPSYDWLLQGGRGQIFFPPLEAPGRPQEQRSWPSFLEHRVPAMTEEVAREALLSFVDSKCCYSSTVAGDLVIQELKRQTLCRYRLETFSESRISEWTFQPFTNHSVDGPQRGASPRLWDIKVQGPPMFQEDTRKFQVPHSSL

SEQ ID NO: 83971 - protein, 315 aa, Homo sapiens
  Payload ID: 16717
  Gene Symbol: SSUH2
  Gene Name: ssu-2 homolog (C. elegans)
  ENSP ID: ENSP00000410757
MPSPVGLLRALPLPWPQFLACTLRRLAGPRESTGPSQKPPPLCSVPCRVPAMTEEVAREALLSFVDSKCCYSSTVAGDLVIQELKRQTLCRYRLETFSESRISEWTFQPFTNHSVDGPQRGASPRLWDIKVQGPPMFQEDTRKFQVPHSSLVKECHKCHGRGRYKCSGCHGAGTVRCPSCCGAKRKAKQSRRCQLCAGSGRRRCSTCSGRGNKTCATCKGEKKLLHFIQLVIMWKNSLFEFVSEHRLNCPRELLAKAKGENLFKDENSVVYPIVDFPLRDISLASQRGIAEHSAALASRARVLQQVSQGGGAIWL

SEQ ID NO: 83972 - protein, 85 aa, Homo sapiens
  Payload ID: 16717
  Gene Symbol: SSUH2
  Gene Name: ssu-2 homolog (C. elegans)
  ENSP ID: ENSP00000412333
MSLRVSQSVLIRRMESSFPYSNGLTLLLTDAGLDLLGSSSLLTSASQSAGITDVSYRSQLPLFLINGINVFLNGGRGNICQLYLC

SEQ ID NO: 83973 - protein, 375 aa, Homo sapiens
  Payload ID: 16717
  Gene Symbol: SSUH2
  Gene Name: ssu-2 homolog (C. elegans)
  Uniprot ID: Q9Y2M2
  ENSP ID: ENSP00000439378
MDRDLNEDDSVVDLSFEAESPLAPPTELLERLPSYDWLLQGGRGQIFFPPLEAPGRPQEQRSWPSFLEHRVPAMTEEVAREALLSFVDSKCCYSSTVAGDLVIQELKRQTLCRYRLETFSESRISEWTFQPFTNHSVDGPQRGASPRLWDIKVQGPPMFQEDTRKFQVPHSSLVKECHKCHGRGRYKCSGCHGAGTVRCPSCCGAKRKAKQSRRCQLCAGSGRRRCSTCSGRGNKTCATCKGEKKLLHFIQLVIMWKNSLFEFVSEHRLNCPRELLAKAKGENLFKDENSVVYPIVDFPLRDISLASQRGIAEHSAALASRARVLQQRQTIELIPLTEVHYWYQGKTYVYYIYGTDHQVYAVDYPERYCCGCTIV

SEQ ID NO: 83974 - protein, 194 aa, Homo sapiens
  Payload ID: 16718
  Gene Symbol: SSU72
  Gene Name: SSU72 homolog, RNA polymerase II CTD phosphatase
  Uniprot ID: Q9NP77
  ENSP ID: ENSP00000291386
MPSSPLRVAVVCSSNQNRSMEAHNILSKRGFSVRSFGTGTHVKLPGPAPDKPNVYDFKTTYDQMYNDLLRKDKELYTQNGILHMLDRNKRIKPRPERFQNCKDLFDLILTCEERVYDQVVEDLNSREQETCQPVHVVNVDIQDNHEEATLGAFLICELCQCIQHTEDMENEIDELLQEFEEKSGRTFLHTVCFY

SEQ ID NO: 83975 - protein, 153 aa, Homo sapiens
  Payload ID: 16718
  Gene Symbol: SSU72
  Gene Name: SSU72 homolog, RNA polymerase II CTD phosphatase
  Uniprot ID: Q9NP77
  ENSP ID: ENSP00000351955
MPSSPLRVAVVCSSNQNRSMEAHNILSKRGFSVRSFGTGTHVKLPGPAPDKPNVYDFKTTYDQMYNDLLRKDKELYPSGLPFKNPPCGPPWKVLRVARAQEACHPVQCTHWLLCLCESLVSIPGARRIVHGLVPVPPMAVGVVRRTDTVWGSP

SEQ ID NO: 83976 - protein, 179 aa, Homo sapiens
  Payload ID: 16719
  Gene Symbol: ST20-MTHFS
  Gene Name: ST20-MTHFS readthrough
  ENSP ID: ENSP00000455643
MARSRLTATSVSQVQVIAHSEYQKSKRISIFLSMQDEIETEEIIKDIFQRGKICFIPRYRFQSNHMDMVRIESPEEISLLPKTSWNIPQPGEGDVREEALSTGGLDLIFMPGLGFDKHGNRLGRGKGYYDAYLKRCLQHQEVKPYTLALAFKEQICLQVPVNENDMKVDEVLYEDSSTA

SEQ ID NO: 83977 - protein, 122 aa, Homo sapiens
  Payload ID: 16719
  Gene Symbol: ST20-MTHFS
  Gene Name: ST20-MTHFS readthrough
  ENSP ID: ENSP00000489298
MEDVNSNVNADQEVIAHSEYQKSKRISIFLSMQDEIETEEIIKDIFQRGKICFIPRYRFQSNHMDMVRIESPEEISLLPKTSWNIPQPGEGDVREEALSTGGLDLIFMPGLGFDKHGNRLGR

SEQ ID NO: 83978 - protein, 179 aa, Homo sapiens; identical to SEQ ID NO: 83976
  Payload ID: 16719
  Gene Symbol: ST20-MTHFS
  Gene Name: ST20-MTHFS readthrough
  ENSP ID: ENSP00000489525

SEQ ID NO: 83979 - protein, 340 aa, Homo sapiens
  Payload ID: 16720
  Gene Symbol: ST3GAL1
  Gene Name: ST3 beta-galactoside alpha-2,3-sialyltransferase 1
  Uniprot ID: Q11201
  ENSP ID: ENSP00000414073
MVTLRKRTLKVLTFLVLFIFLTSFFLNYSHTMVATTWFPKQMVLELSENLKRLIKHRPCTCTHCIGQRKLSAWFDERFNQTMQPLLTAQNALLEDDTYRWWLRLQREKKPNNLNDTIKELFRVVPGNVDPMLEKRSVGCRRCAVVGNSGNLRESSYGPEIDSHDFVLRMNKAPTAGFEADVGTKTTHHLVYPESFRELGDNVSMILVPFKTIDLEWVVSAITTGTISHTYIPVPAKIRVKQDKILIYHPAFIKYVFDNWLQGHGRYPSTGILSVIFSMHVCDEVDLYGFGADSKGNWHHYWENNPSAGAFRKTGVHDADFESNVTATLASINKIRIFKGR

SEQ ID NO: 83980 - protein, 46 aa, Homo sapiens
  Payload ID: 16720
  Gene Symbol: ST3GAL1
  Gene Name: ST3 beta-galactoside alpha-2,3-sialyltransferase 1
  ENSP ID: ENSP00000427720
MLEKRSVGCRRCAVVGNSGNLRESSYGPEIDSHDFVLRMNKAPTAG

SEQ ID NO: 83981 - protein, 47 aa, Homo sapiens
  Payload ID: 16720
  Gene Symbol: ST3GAL1
  Gene Name: ST3 beta-galactoside alpha-2,3-sialyltransferase 1
  ENSP ID: ENSP00000427786
MVTLRKRTLKVLTFLVLFIFLTSFFLNYSHTMVATTWFPKQMVLELS

SEQ ID NO: 83982 - protein, 340 aa, Homo sapiens; identical to SEQ ID NO: 83979
  Payload ID: 16720
  Gene Symbol: ST3GAL1
  Gene Name: ST3 beta-galactoside alpha-2,3-sialyltransferase 1
  Uniprot ID: Q11201
  ENSP ID: ENSP00000428540

SEQ ID NO: 83983 - protein, 97 aa, Homo sapiens
  Payload ID: 16720
  Gene Symbol: ST3GAL1
  Gene Name: ST3 beta-galactoside alpha-2,3-sialyltransferase 1
  ENSP ID: ENSP00000429638
MLEKRSVGCRRCAVVGNSGNLRESSYGPEIDSHDFVLRMNKAPTAGFEADVGTKTTHHLVYPESFRELGDNVSMILVPFKTIDLEWVVSAITTGTIS

SEQ ID NO: 83984 - protein, 72 aa, Homo sapiens
  Payload ID: 16720
  Gene Symbol: ST3GAL1
  Gene Name: ST3 beta-galactoside alpha-2,3-sialyltransferase 1
  ENSP ID: ENSP00000429936
MVTLRKRTLKVLTFLVLFIFLTSFFLNYSHTMVATTWFPKQMVLELSENLKRLIKHRPCTCTHCIGQRKLSA

SEQ ID NO: 83985 - protein, 49 aa, Homo sapiens
  Payload ID: 16720
  Gene Symbol: ST3GAL1
  Gene Name: ST3 beta-galactoside alpha-2,3-sialyltransferase 1
  ENSP ID: ENSP00000430135
MVTLRKRTLKVLTFLVLFIFLTSFFLNYSHTMVATTWFPKQMVLELSEN

SEQ ID NO: 83986 - protein, 340 aa, Homo sapiens; identical to SEQ ID NO: 83979
  Payload ID: 16720
  Gene Symbol: ST3GAL1
  Gene Name: ST3 beta-galactoside alpha-2,3-sialyltransferase 1
  Uniprot ID: Q11201
  ENSP ID: ENSP00000430515

SEQ ID NO: 83987 - protein, 350 aa, Homo sapiens
  Payload ID: 16721
  Gene Symbol: ST3GAL2
  Gene Name: ST3 beta-galactoside alpha-2,3-sialyltransferase 2
  Uniprot ID: Q16842
  ENSP ID: ENSP00000345477
MKCSLRVWFLSVAFLLVFIMSLLFTYSHHSMATLPYLDSGALDGTHRVKLVPGYAGLQRLSKERLSGKSCACRRCMGDAGASDWFDSHFDGNISPVWTRENMDLPPDVQRWWMMLQPQFKSHNTNEVLEKLFQIVPGENPYRFRDPHQCRRCAVVGNSGNLRGSGYGQDVDGHNFIMRMNQAPTVGFEQDVGSRTTHHFMYPESAKNLPANVSFVLVPFKVLDLLWIASALSTGQIRFTYAPVKSFLRVDKEKVQIYNPAFFKYIHDRWTEHHGRYPSTGMLVLFFALHVCDEVNVYGFGADSRGNWHHYWENNRYAGEFRKTGVHDADFEAHIIDMLAKASKIEVYRGN

SEQ ID NO: 83988 - protein, 350 aa, Homo sapiens; identical to SEQ ID NO: 83987
  Payload ID: 16721
  Gene Symbol: ST3GAL2
  Gene Name: ST3 beta-galactoside alpha-2,3-sialyltransferase 2
  Uniprot ID: Q16842
  ENSP ID: ENSP00000377257

SEQ ID NO: 83989 - protein, 444 aa, Homo sapiens
  Payload ID: 16722
  Gene Symbol: ST3GAL3
  Gene Name: ST3 beta-galactoside alpha-2,3-sialyltransferase 3
  Uniprot ID: Q11203
  ENSP ID: ENSP00000262915
MGLLVFVRNLLLALCLFLVLGFLYYSAWKLHLLQWEEDSSKYSHSSSPQEKPVADSVVLSFDSAGQTLGSEYDRLGFLLNLDSKLSPRTLCTVVFGLDCILESPGEPKKLLMPASHPLEILKSLSEDTAFALGFLKLPRPAELATKYANFSEGACKPGYASALMTAIFPRFSKPAPMFLDDSFRKWARIREFVPPFGIKGQDNLIKAILSVTKEYRLTPALDSLRCRRCIIVGNGGVLANKSLGSRIDDYDIVVRLNSAPVKGFEKDVGSKTTLRITYPEGAMQRPEQYERDSLFVLAGFKWQDFKWLKYIVYKERVSASDGFWKSVATRVPKEPPEIRILNPYFIQEAAFTLIGLPFNNGLMGRGNIPTLGSVAVTMALHGCDEVAVAGFGYDMSTPNAPLHYYETVRMAAIKESWTHNIQREKEFLRKLVKARVITDLSSGI

SEQ ID NO: 83990 - protein, 413 aa, Homo sapiens
  Payload ID: 16722
  Gene Symbol: ST3GAL3
  Gene Name: ST3 beta-galactoside alpha-2,3-sialyltransferase 3
  Uniprot ID: Q11203
  ENSP ID: ENSP00000316999
MGLLVFVRNLLLALCLFLVLGFLYYSAWKLHLLQWEEDSKYDRLGFLLNLDSKLSPRTLCTVVFGLDCILESPGEPKKLLMPASHPLEILKSLSEDTAFALGFLKLPRPAELATKYANFSEGACKPGYASALMTAIFPRFSKPAPMFLDDSFRKWARIREFVPPFGIKGQDNLIKAILSVTKEYRLTPALDSLRCRRCIIVGNGGVLANKSLGSRIDDYDIVVRLNSAPVKGFEKDVGSKTTLRITYPEGAMQRPEQYERDSLFVLAGFKWQDFKWLKYIVYKERVSASDGFWKSVATRVPKEPPEIRILNPYFIQEAAFTLIGLPFNNGLMGRGNIPTLGSVAVTMALHGCDEVAVAGFGYDMSTPNAPLHYYETVRMAAIKESWTHNIQREKEFLRKLVKARVITDLSSGI

SEQ ID NO: 83991 - protein, 390 aa, Homo sapiens
  Payload ID: 16722
  Gene Symbol: ST3GAL3
  Gene Name: ST3 beta-galactoside alpha-2,3-sialyltransferase 3
  Uniprot ID: Q11203
  ENSP ID: ENSP00000317192
MGLLVFVRNLLLALCLFLVLGFLYYSAWKLHLLQWEEDSSKYSHSSSPQEKPVADSVVLSFDSAGQTLGSEYDRLGFLLNLDSKLPAELATKYANFSEGACKPGYASALMTAIFPRFSKPAPMFLDDSFRKWARIREFVPPFGIKGQDNLIKAILSVTKEYRLTPALDSLRCRRCIIVGNGGVLANKSLGSRIDDYDIVVRLNSAPVKGFEKDVGSKTTLRITYPEGAMQRPEQYERDSLFVLAGFKWQDFKWLKYIVYKERVSASDGFWKSVATRVPKEPPEIRILNPYFIQEAAFTLIGLPFNNGLMGRGNIPTLGSVAVTMALHGCDEVAVAGFGYDMSTPNAPLHYYETVRMAAIKESWTHNIQREKEFLRKLVKARVITDLSSGI

SEQ ID NO: 83992 - protein, 344 aa, Homo sapiens
  Payload ID: 16722
  Gene Symbol: ST3GAL3
  Gene Name: ST3 beta-galactoside alpha-2,3-sialyltransferase 3
  Uniprot ID: Q11203
  ENSP ID: ENSP00000329755
MGLLVFVRNLLLALCLFLVLGFLYYSAWKLHLLQWEEDSNSVVLSFDSAGQTLGSEYDRLGFLLNLDSKLFSKPAPMFLDDSFRKWARIREFVPPFGIKGQDNLIKAILSVTKEYRLTPALDSLRCRRCIIVGNGGVLANKSLGSRIDDYDIVVRLNSAPVKGFEKDVGSKTTLRITYPEGAMQRPEQYERDSLFVLAGFKWQDFKWLKYIVYKERVSASDGFWKSVATRVPKEPPEIRILNPYFIQEAAFTLIGLPFNNGLMGRGNIPTLGSVAVTMALHGCDEVAVAGFGYDMSTPNAPLHYYETVRMAAIKESWTHNIQREKEFLRKLVKARVITDLSSGI

SEQ ID NO: 83993 - protein, 277 aa, Homo sapiens
  Payload ID: 16722
  Gene Symbol: ST3GAL3
  Gene Name: ST3 beta-galactoside alpha-2,3-sialyltransferase 3
  Uniprot ID: Q11203
  ENSP ID: ENSP00000330463
MGLLVFVRNLLLALCLFLVLGFLYYSAWKLHLLQWEEDSNSVVLSFDSAGQTLGSEYDRLGFLLNLDSKLPAELATKYANFSEGACKPGYASALMTAIFPRFSKPAPMFLDDSFRKWARIREFVPPFGIKGQDNLIKAILSVTKEYRLTPALDSLRCRRCIIVGNGGVLANKSLGSRIDDYDIVVRLNSAPVKGFEKDVGSKTTLRITYPEGAMQRPEQYERDSLFVLAGFKWQDFKWLKYIVYKERVSWTHNIQREKEFLRKLVKARVITDLSSGI

SEQ ID NO: 83994 - protein, 101 aa, Homo sapiens
  Payload ID: 16722
  Gene Symbol: ST3GAL3
  Gene Name: ST3 beta-galactoside alpha-2,3-sialyltransferase 3
  Uniprot ID: Q11203
  ENSP ID: ENSP00000333494
MGLLVFVRNLLLALCLFLVLGFLYYSAWKLHLLQWEEDSKYDRLGFLLNLDSKLPAELATKYANFSEGACKPGYASALMTAIFPRPGRTISSERKSFCGSW

SEQ ID NO: 83995 - protein, 185 aa, Homo sapiens
  Payload ID: 16722
  Gene Symbol: ST3GAL3
  Gene Name: ST3 beta-galactoside alpha-2,3-sialyltransferase 3
  Uniprot ID: Q11203
  ENSP ID: ENSP00000335633
MGLLVFVRNLLLALCLFLVLGFLYYSAWKLHLLQWEEDSSKYSHSSSPQEKPVAEYDRLGFLLNLDSKLPAELATKYANFSEGACKPGYASALMTAIFPRFSKPAPMFLDDSFRKWARIREFVPPFGIKGQDNLIKAILSVTKEYRLTPALDSLRCRRCIIVGNGGVLANKSLGSRIDDYDIVVR

SEQ ID NO: 83996 - protein, 444 aa, Homo sapiens; identical to SEQ ID NO: 83989
  Payload ID: 16722
  Gene Symbol: ST3GAL3
  Gene Name: ST3 beta-galactoside alpha-2,3-sialyltransferase 3
  Uniprot ID: Q11203
  ENSP ID: ENSP00000354657

SEQ ID NO: 83997 - protein, 359 aa, Homo sapiens
  Payload ID: 16722
  Gene Symbol: ST3GAL3
  Gene Name: ST3 beta-galactoside alpha-2,3-sialyltransferase 3
  Uniprot ID: Q11203
  ENSP ID: ENSP00000354748
MGLLVFVRNLLLALCLFLVLGFLYYSAWKLHLLQWEEDSKYDRLGFLLNLDSKLPAELATKYANFSEGACKPGYASALMTAIFPRFSKPAPMFLDDSFRKWARIREFVPPFGIKGQDNLIKAILSVTKEYRLTPALDSLRCRRCIIVGNGGVLANKSLGSRIDDYDIVVRLNSAPVKGFEKDVGSKTTLRITYPEGAMQRPEQYERDSLFVLAGFKWQDFKWLKYIVYKERVSASDGFWKSVATRVPKEPPEIRILNPYFIQEAAFTLIGLPFNNGLMGRGNIPTLGSVAVTMALHGCDEVAVAGFGYDMSTPNAPLHYYETVRMAAIKESWTHNIQREKEFLRKLVKARVITDLSSGI

SEQ ID NO: 83998 - protein, 170 aa, Homo sapiens
  Payload ID: 16722
  Gene Symbol: ST3GAL3
  Gene Name: ST3 beta-galactoside alpha-2,3-sialyltransferase 3
  Uniprot ID: Q11203
  ENSP ID: ENSP00000355201
MGLLVFVRNLLLALCLFLVLGFLYYSAWKLHLLQWEEDSSKYSHSSSPQEKPVADSVVLSFDSAGQTLGSEYDRLGFLLNLDSKLPAELATKYANFSEGACKPGYASALMTAIFPRFSKPAPMFLDDSFRKWARIREFVPPFGIKGQVLDAQYPARERVSAEAGESSRHH

SEQ ID NO: 83999 - protein, 375 aa, Homo sapiens
  Payload ID: 16722
  Gene Symbol: ST3GAL3
  Gene Name: ST3 beta-galactoside alpha-2,3-sialyltransferase 3
  Uniprot ID: Q11203
  ENSP ID: ENSP00000355341
MGLLVFVRNLLLALCLFLVLGFLYYSAWKLHLLQWEEDSNSVVLSFDSAGQTLGSEYDRLGFLLNLDSKLPAELATKYANFSEGACKPGYASALMTAIFPRFSKPAPMFLDDSFRKWARIREFVPPFGIKGQDNLIKAILSVTKEYRLTPALDSLRCRRCIIVGNGGVLANKSLGSRIDDYDIVVRLNSAPVKGFEKDVGSKTTLRITYPEGAMQRPEQYERDSLFVLAGFKWQDFKWLKYIVYKERVSASDGFWKSVATRVPKEPPEIRILNPYFIQEAAFTLIGLPFNNGLMGRGNIPTLGSVAVTMALHGCDEVAVAGFGYDMSTPNAPLHYYETVRMAAIKESWTHNIQREKEFLRKLVKARVITDLSSGI

SEQ ID NO: 84000 - protein, 155 aa, Homo sapiens
  Payload ID: 16722
  Gene Symbol: ST3GAL3
  Gene Name: ST3 beta-galactoside alpha-2,3-sialyltransferase 3
  Uniprot ID: Q11203
  ENSP ID: ENSP00000361437
MGLLVFVRNLLLALCLFLVLGFLYYSAWKLHLLQWEEDSNSVVLSFDSAGQTLGSEYDRLGFLLNLDSKLPAELATKYANFSEGACKPGYASALMTAIFPRFSKPAPMFLDDSFRKWARIREFVPPFGIKGQVLDAQYPARERVSAEAGESSRHH

SEQ ID NO: 84001 - protein, 186 aa, Homo sapiens
  Payload ID: 16722
  Gene Symbol: ST3GAL3
  Gene Name: ST3 beta-galactoside alpha-2,3-sialyltransferase 3
  Uniprot ID: Q11203
  ENSP ID: ENSP00000361440
MGLLVFVRNLLLALCLFLVLGFLYYSAWKLHLLQWEEDSNSVVLSFDSAGQTLGSEYDRLGFLLNLDSKLPAELATKYANFSEGACKPGYASALMTAIFPRFSKPAPMFLDDSFRKWARIREFVPPFGIKGQDNLIKAILSVTKEYRLTPALDSLRCRRCIIVGNGGVLANKSLGSRIDDYDIVVR

SEQ ID NO: 84002 - protein, 185 aa, Homo sapiens; identical to SEQ ID NO: 83995
  Payload ID: 16722
  Gene Symbol: ST3GAL3
  Gene Name: ST3 beta-galactoside alpha-2,3-sialyltransferase 3
  Uniprot ID: Q11203
  ENSP ID: ENSP00000361441

SEQ ID NO: 84003 - protein, 201 aa, Homo sapiens
  Payload ID: 16722
  Gene Symbol: ST3GAL3
  Gene Name: ST3 beta-galactoside alpha-2,3-sialyltransferase 3
  Uniprot ID: Q11203
  ENSP ID: ENSP00000361442
MGLLVFVRNLLLALCLFLVLGFLYYSAWKLHLLQWEEDSSKYSHSSSPQEKPVAEYDRLGFLLNLDSKLPAELATKYANFSEGACKPGYASALMTAIFPRFSKPAPMFLDDSFRKWARIREFVPPFGIKGQDNLIKAILSVTKEYRLTPALDSLRCRRCIIVGNGGVLANKSLGSRIDDYDIVVSPGRTISSERKSFCGSW

SEQ ID NO: 84004 - protein, 429 aa, Homo sapiens
  Payload ID: 16722
  Gene Symbol: ST3GAL3
  Gene Name: ST3 beta-galactoside alpha-2,3-sialyltransferase 3
  Uniprot ID: Q11203
  ENSP ID: ENSP00000361443
MGLLVFVRNLLLALCLFLVLGFLYYSAWKLHLLQWEEDSNSVVLSFDSAGQTLGSEYDRLGFLLNLDSKLSPRTLCTVVFGLDCILESPGEPKKLLMPASHPLEILKSLSEDTAFALGFLKLPRPAELATKYANFSEGACKPGYASALMTAIFPRFSKPAPMFLDDSFRKWARIREFVPPFGIKGQDNLIKAILSVTKEYRLTPALDSLRCRRCIIVGNGGVLANKSLGSRIDDYDIVVRLNSAPVKGFEKDVGSKTTLRITYPEGAMQRPEQYERDSLFVLAGFKWQDFKWLKYIVYKERVSASDGFWKSVATRVPKEPPEIRILNPYFIQEAAFTLIGLPFNNGLMGRGNIPTLGSVAVTMALHGCDEVAVAGFGYDMSTPNAPLHYYETVRMAAIKESWTHNIQREKEFLRKLVKARVITDLSSGI

SEQ ID NO: 84005 - protein, 345 aa, Homo sapiens
  Payload ID: 16722
  Gene Symbol: ST3GAL3
  Gene Name: ST3 beta-galactoside alpha-2,3-sialyltransferase 3
  Uniprot ID: Q11203
  ENSP ID: ENSP00000361444
MGLLVFVRNLLLALCLFLVLGFLYYSAWKLHLLQWEEDSNSVVLSFDSAGQTLGSEYDRLGFLLNLDSKLPAELATKYANFSEGACKPGYASALMTAIFPRFSKPAPMFLDDSFRKWARIREFVPPFGIKGQDNLIKAILSVTKEYRLTPALDSLRCRRCIIVGNGGVLANKSLGSRIDDYDIVVRLNSAPVKGFEKDVGSKTTLRITYPEGAMQRPEQYERDSLFVLAGFKWQDFKWLKYIVYKERVEAAFTLIGLPFNNGLMGRGNIPTLGSVAVTMALHGCDEVAVAGFGYDMSTPNAPLHYYETVRMAAIKESWTHNIQREKEFLRKLVKARVITDLSSGI

SEQ ID NO: 84006 - protein, 413 aa, Homo sapiens; identical to SEQ ID NO: 83990
  Payload ID: 16722
  Gene Symbol: ST3GAL3
  Gene Name: ST3 beta-galactoside alpha-2,3-sialyltransferase 3
  Uniprot ID: Q11203
  ENSP ID: ENSP00000361447

SEQ ID NO: 84007 - protein, 344 aa, Homo sapiens; identical to SEQ ID NO: 83992
  Payload ID: 16722
  Gene Symbol: ST3GAL3
  Gene Name: ST3 beta-galactoside alpha-2,3-sialyltransferase 3
  Uniprot ID: Q11203
  ENSP ID: ENSP00000361449

SEQ ID NO: 84008 - protein, 189 aa, Homo sapiens
  Payload ID: 16722
  Gene Symbol: ST3GAL3
  Gene Name: ST3 beta-galactoside alpha-2,3-sialyltransferase 3
  Uniprot ID: Q11203
  ENSP ID: ENSP00000431700
MGLLVFVRNLLLALCLFLVLGFLYYSAWKLHLLQWEEDSNSVVLSFDSAGQTLGSEYDRLGFLLNLDSKLPAELATKYANFSEGACKPGYASALMTAIFPRFSKPAPMFLDDSFRKWARIREFVPPFGIKGQDNLIKAILSVTKEYRLTPALDSLRCRRCIIVGNGGVLANKSLGSRIDDYDIVVRPRL

SEQ ID NO: 84009 - protein, 85 aa, Homo sapiens
  Payload ID: 16722
  Gene Symbol: ST3GAL3
  Gene Name: ST3 beta-galactoside alpha-2,3-sialyltransferase 3
  ENSP ID: ENSP00000431816
MGLLVFVRNLLLALCLFLVLGFLYYSAWKLHLLQWEEDSNSVVLSFDSAGQTLGSGTVTADWNLWWFITMKKGSGSLTTEMPVAC

SEQ ID NO: 84010 - protein, 115 aa, Homo sapiens
  Payload ID: 16722
  Gene Symbol: ST3GAL3
  Gene Name: ST3 beta-galactoside alpha-2,3-sialyltransferase 3
  Uniprot ID: Q11203
  ENSP ID: ENSP00000432071
MGLLVFVRNLLLALCLFLVLGFLYYSAWKLHLLQWEEDSNSVVLSFDSAGQTLGSEYDRLGFLLNLDSKLPAELATKYANFSEGACKPGYASALMTAIFPREKVRTFMAWLAWYG

SEQ ID NO: 84011 - protein, 85 aa, Homo sapiens; identical to SEQ ID NO: 84009
  Payload ID: 16722
  Gene Symbol: ST3GAL3
  Gene Name: ST3 beta-galactoside alpha-2,3-sialyltransferase 3
  ENSP ID: ENSP00000432214

SEQ ID NO: 84012 - protein, 261 aa, Homo sapiens
  Payload ID: 16722
  Gene Symbol: ST3GAL3
  Gene Name: ST3 beta-galactoside alpha-2,3-sialyltransferase 3
  Uniprot ID: Q11203
  ENSP ID: ENSP00000432682
MGLLVFVRNLLLALCLFLVLGFLYYSAWKLHLLQWEEDSKYDRLGFLLNLDSKLPAELATKYANFSEGACKPGYASALMTAIFPRFSKPAPMFLDDSFRKWARIREFVPPFGIKGQDNLIKAILSVTKEYRLTPALDSLRCRRCIIVGNGGVLANKSLGSRIDDYDIVVRLNSAPVKGFEKDVGSKTTLRITYPEGAMQRPEQYERDSLFVLAGFKWQDFKWLKYIVYKERVSWTHNIQREKEFLRKLVKARVITDLSSGI

SEQ ID NO: 84013 - protein, 277 aa, Homo sapiens; identical to SEQ ID NO: 83993
  Payload ID: 16722
  Gene Symbol: ST3GAL3
  Gene Name: ST3 beta-galactoside alpha-2,3-sialyltransferase 3
  Uniprot ID: Q11203
  ENSP ID: ENSP00000432965

SEQ ID NO: 84014 - protein, 100 aa, Homo sapiens
  Payload ID: 16722
  Gene Symbol: ST3GAL3
  Gene Name: ST3 beta-galactoside alpha-2,3-sialyltransferase 3
  ENSP ID: ENSP00000433668
MGLLVFVRNLLLALCLFLVLGFLYYSAWKLHLLQWEEDSSKYSHSSSPQEKPVADSVVLSFDSAGQTLGSGTVTADWNLWWFITMKKGSGSLTTEMPVAC

SEQ ID NO: 84015 - protein, 101 aa, Homo sapiens; identical to SEQ ID NO: 83994
  Payload ID: 16722
  Gene Symbol: ST3GAL3
  Gene Name: ST3 beta-galactoside alpha-2,3-sialyltransferase 3
  Uniprot ID: Q11203
  ENSP ID: ENSP00000434378

SEQ ID NO: 84016 - protein, 106 aa, Homo sapiens
  Payload ID: 16722
  Gene Symbol: ST3GAL3
  Gene Name: ST3 beta-galactoside alpha-2,3-sialyltransferase 3
  ENSP ID: ENSP00000434686
MGLLVFVRNLLLALCLFLVLGFLYYSAWKLHLLQWEEDSNSVVLSFDSAGQTLGSEYDRLGFLLNLDSKLPAELATKYANFSEGACKPGYASALMTAIFPRENKRR

SEQ ID NO: 84017 - protein, 186 aa, Homo sapiens
  Payload ID: 16722
  Gene Symbol: ST3GAL3
  Gene Name: ST3 beta-galactoside alpha-2,3-sialyltransferase 3
  Uniprot ID: Q11203
  ENSP ID: ENSP00000434876
MGLLVFVRNLLLALCLFLVLGFLYYSAWKLHLLQWEEDSKYDRLGFLLNLDSKLPAELATKYANFSEGACKPGYASALMTAIFPRFSKPAPMFLDDSFRKWARIREFVPPFGIKGQDNLIKAILSVTKEYRLTPALDSLRCRRCIIVGNGGVLANKSLGSRIDDYDIVVSPGRTISSERKSFCGSW

SEQ ID NO: 84018 - protein, 73 aa, Homo sapiens
  Payload ID: 16722
  Gene Symbol: ST3GAL3
  Gene Name: ST3 beta-galactoside alpha-2,3-sialyltransferase 3
  Uniprot ID: Q11203
  ENSP ID: ENSP00000435018
MGLLVFVRNLLLALCLFLVLGFLYYSAWKLHLLQWEEDSSSPSQHPCSWMTPFASGLESGSSCRLLGSKVKTI

SEQ ID NO: 84019 - protein, 139 aa, Homo sapiens
  Payload ID: 16722
  Gene Symbol: ST3GAL3
  Gene Name: ST3 beta-galactoside alpha-2,3-sialyltransferase 3
  Uniprot ID: Q11203
  ENSP ID: ENSP00000435603
MGLLVFVRNLLLALCLFLVLGFLYYSAWKLHLLQWEEDSKYDRLGFLLNLDSKLPAELATKYANFSEGACKPGYASALMTAIFPRFSKPAPMFLDDSFRKWARIREFVPPFGIKGQVLDAQYPARERVSAEAGESSRHH

SEQ ID NO: 84020 - protein, 151 aa, Homo sapiens
  Payload ID: 16722
  Gene Symbol: ST3GAL3
  Gene Name: ST3 beta-galactoside alpha-2,3-sialyltransferase 3
  Uniprot ID: Q11203
  ENSP ID: ENSP00000435621
MGLLVFVRNLLLALCLFLVLGFLYYSAWKLHLLQWEEDSNSVVLSFDSAGQTLGSEYDRLGFLLNLDSKLPAELATKYANFSEGACKPGYASALMTAIFPRFSKPAPMFLDDSFRKWARIREFVPPFGIKGQECIGWLLEICGHSSAQGAP

SEQ ID NO: 84021 - protein, 197 aa, Homo sapiens
  Payload ID: 16722
  Gene Symbol: ST3GAL3
  Gene Name: ST3 beta-galactoside alpha-2,3-sialyltransferase 3
  ENSP ID: ENSP00000436298
  MOD_RES (1)..(1): Any amino acid
XTTLRITYPEGAMQRPEQYERDSLFVLAGFKWQDFKWLKYIVYKERVSASDGFWKSVATRVPKEPPEIRILNPYFIQEAAFTLIGLPFNNGLMGRGNIPTLGSVAVTMALHGCDEVAVAGFGYDMSTPNAPLHYYETVRMAAIKEVSTVTEYWRVVTKKAPSPGRGSKGLSKGPTDHFISPFSPGRTISSERKSFCG

SEQ ID NO: 84022 - protein, 121 aa, Homo sapiens
  Payload ID: 16722
  Gene Symbol: ST3GAL3
  Gene Name: ST3 beta-galactoside alpha-2,3-sialyltransferase 3
  Uniprot ID: Q11203
  ENSP ID: ENSP00000437206
MGLLVFVRNLLLALCLFLVLGFLYYSAWKLHLLQWEEDSNSVVLSFDSAGQTLGSEYDRLGFLLNLDSKLPAELATKYANFSEGACKPGYASALMTAIFPRAKRNGAWRQKHIQAYVLRQR

SEQ ID NO: 84023 - protein, 228 aa, Homo sapiens
  Payload ID: 16722
  Gene Symbol: ST3GAL3
  Gene Name: ST3 beta-galactoside alpha-2,3-sialyltransferase 3
  Uniprot ID: Q11203
  ENSP ID: ENSP00000437293
MGLLVFVRNLLLALCLFLVLGFLYYSAWKLHLLQWEEDSKYDRLGFLLNLDSKLPAELATKYANFSEGACKPGYASALMTAIFPRFSKPAPMFLDDSFRKWARIREFVPPFGIKGQDNLIKAILSVTKEYRLTPALDSLRCRRCIIVGNGGVLANKSLGSRIDDYDIVVRVHRMASGNLWPLECPRSPLRFESSTHISSRRPPSPSLACPSTMASWAGGTSLPLAVWQ

SEQ ID NO: 84024 - protein, 170 aa, Homo sapiens; identical to SEQ ID NO: 83998
  Payload ID: 16722
  Gene Symbol: ST3GAL3
  Gene Name: ST3 beta-galactoside alpha-2,3-sialyltransferase 3
  Uniprot ID: Q11203
  ENSP ID: ENSP00000439634

SEQ ID NO: 84025 - protein, 329 aa, Homo sapiens
  Payload ID: 16723
  Gene Symbol: ST3GAL4
  Gene Name: ST3 beta-galactoside alpha-2,3-sialyltransferase 4
  Uniprot ID: Q11206
  ENSP ID: ENSP00000227495
MVSKSRWKLLAMLALVLVVMVWYSISREDSFYFPIPEKKEPCLQGEAESKASKLFGNYSRDQPIFLRLEDYFWVKTPSAYELPYGTKGSEDLLLRVLAITSSSIPKNIQSLRCRRCVVVGNGHRLRNSSLGDAINKYDVVIRLNNAPVAGYEGDVGSKTTMRLFYPESAHFDPKVENNPDTLLVLVAFKAMDFHWIETILSDKKRVRKGFWKQPPLIWDVNPKQIRILNPFFMEIAADKLLSLPMQQPRKIKQKPTTGLLAITLALHLCDLVHIAGFGYPDAYNKKQTIHYYEQITLKSMAGSGHNVSQEALAIKRMLEMGAIKNLTSF

SEQ ID NO: 84026 - protein, 339 aa, Homo sapiens
  Payload ID: 16723
  Gene Symbol: ST3GAL4
  Gene Name: ST3 beta-galactoside alpha-2,3-sialyltransferase 4
  Uniprot ID: Q11206
  ENSP ID: ENSP00000348451
MVSKSRWKLLAMLALVLVVMVWYSISREDRYIELFYFPIPEKKEPCLQGEAESKASKLFGKLSPLCSYSRDQPIFLRLEDYFWVKTPSAYELPYGTKGSEDLLLRVLAITSSSIPKNIQSLRCRRCVVVGNGHRLRNSSLGDAINKYDVVIRLNNAPVAGYEGDVGSKTTMRLFYPESAHFDPKVENNPDTLLVLVAFKAMDFHWIETILSDKKRVRKGFWKQPPLIWDVNPKQIRILNPFFMEIAADKLLSLPMQQPRKIKQKPTTGLLAITLALHLCDLVHIAGFGYPDAYNKKQTIHYYEQITLKSMAGSGHNVSQEALAIKRMLEMGAIKNLTSF

SEQ ID NO: 84027 - protein, 333 aa, Homo sapiens
  Payload ID: 16723
  Gene Symbol: ST3GAL4
  Gene Name: ST3 beta-galactoside alpha-2,3-sialyltransferase 4
  Uniprot ID: Q11206
  ENSP ID: ENSP00000376437
MVSKSRWKLLAMLALVLVVMVWYSISREDRYIELFYFPIPEKKEPCLQGEAESKASKLFGNYSRDQPIFLRLEDYFWVKTPSAYELPYGTKGSEDLLLRVLAITSSSIPKNIQSLRCRRCVVVGNGHRLRNSSLGDAINKYDVVIRLNNAPVAGYEGDVGSKTTMRLFYPESAHFDPKVENNPDTLLVLVAFKAMDFHWIETILSDKKRVRKGFWKQPPLIWDVNPKQIRILNPFFMEIAADKLLSLPMQQPRKIKQKPTTGLLAITLALHLCDLVHIAGFGYPDAYNKKQTIHYYEQITLKSMAGSGHNVSQEALAIKRMLEMGAIKNLTSF

SEQ ID NO: 84028 - protein, 333 aa, Homo sapiens; identical to SEQ ID NO: 84027
  Payload ID: 16723
  Gene Symbol: ST3GAL4
  Gene Name: ST3 beta-galactoside alpha-2,3-sialyltransferase 4
  Uniprot ID: Q11206
  ENSP ID: ENSP00000394354

SEQ ID NO: 84029 - protein, 322 aa, Homo sapiens
  Payload ID: 16723
  Gene Symbol: ST3GAL4
  Gene Name: ST3 beta-galactoside alpha-2,3-sialyltransferase 4
  Uniprot ID: Q11206
  ENSP ID: ENSP00000399444
MLALVLVVMVWYSISREDRYIELFYFPIPEKKEPCLQGEAESKASKLFGNYSRDQPIFLRLEDYFWVKTPSAYELPYGTKGSEDLLLRVLAITSSSIPKNIQSLRCRRCVVVGNGHRLRNSSLGDAINKYDVVIRLNNAPVAGYEGDVGSKTTMRLFYPESAHFDPKVENNPDTLLVLVAFKAMDFHWIETILSDKKRVRKGFWKQPPLIWDVNPKQIRILNPFFMEIAADKLLSLPMQQPRKIKQKPTTGLLAITLALHLCDLVHIAGFGYPDAYNKKQTIHYYEQITLKSMAGSGHNVSQEALAIKRMLEMGAIKNLTSF

SEQ ID NO: 84030 - protein, 153 aa, Homo sapiens
  Payload ID: 16723
  Gene Symbol: ST3GAL4
  Gene Name: ST3 beta-galactoside alpha-2,3-sialyltransferase 4
  ENSP ID: ENSP00000431170
MRLFYPESAHFDPKVENNPDTLLVLVAFKAMDFHWIETILSDKKRVRKGFWKQPPLIWDVNPKQIRILNPFFMEIAADKLLSLPMQQPRKIKQKPTTGLLAITLALHLCDLVHIAGFGYPDAYNKKQTIHYYEQITLKSMAGSGHNVSQEALA

SEQ ID NO: 84031 - protein, 209 aa, Homo sapiens
  Payload ID: 16723
  Gene Symbol: ST3GAL4
  Gene Name: ST3 beta-galactoside alpha-2,3-sialyltransferase 4
  ENSP ID: ENSP00000432424
MVSKSRWKLLAMLALVLVVMVWYSISREDRYIELFYFPIPEKKEPCLQGEAESKASKLFGNYSRDQPIFLRLEDYFWVKTPSAYELPYGTKGSEDLLLRVLAITSSSIPKNIQSLRCRRCVVVGNGHRLRNSSLGDAINKYDVVIRLNNAPVAGYEGDVGSKTTMRLFYPESAHFDPKVENNPDTLLVLVAFKAMDFHWIETILSDKKR

SEQ ID NO: 84032 - protein, 111 aa, Homo sapiens
  Payload ID: 16723
  Gene Symbol: ST3GAL4
  Gene Name: ST3 beta-galactoside alpha-2,3-sialyltransferase 4
  ENSP ID: ENSP00000432647
MVSKSRWKLLAMLALVLVVMVWYSISREDRYIELFYFPIPEKKEPCLQGEAESKASKLFGNYSRDQPIFLRLEDYFWVKTPSAYELPYGTKGSEDLLLRVLAITSSSIPKN

SEQ ID NO: 84033 - protein, 126 aa, Homo sapiens
  Payload ID: 16723
  Gene Symbol: ST3GAL4
  Gene Name: ST3 beta-galactoside alpha-2,3-sialyltransferase 4
  ENSP ID: ENSP00000432929
MVSKSRWKLLAMLALVLVVMVWYSISREDRYIELFYFPIPEKKEPCLQGEAESKASKLFGNYSRDQPIFLRLEDYFWVKTPSAYELPYGTKGSASGAAAVWSWGTGTGCGTAHWEMPSTSTMWSSD

SEQ ID NO: 84034 - protein, 333 aa, Homo sapiens; identical to SEQ ID NO: 84027
  Payload ID: 16723
  Gene Symbol: ST3GAL4
  Gene Name: ST3 beta-galactoside alpha-2,3-sialyltransferase 4
  Uniprot ID: Q11206
  ENSP ID: ENSP00000433318

SEQ ID NO: 84035 - protein, 47 aa, Homo sapiens
  Payload ID: 16723
  Gene Symbol: ST3GAL4
  Gene Name: ST3 beta-galactoside alpha-2,3-sialyltransferase 4
  ENSP ID: ENSP00000433495
MSVLSGPGWTTGCPWPQNHPNPCHISGREVARGSRDDSSPQESCCLL

SEQ ID NO: 84036 - protein, 329 aa, Homo sapiens; identical to SEQ ID NO: 84025
  Payload ID: 16723
  Gene Symbol: ST3GAL4
  Gene Name: ST3 beta-galactoside alpha-2,3-sialyltransferase 4
  Uniprot ID: Q11206
  ENSP ID: ENSP00000433989

SEQ ID NO: 84037 - protein, 332 aa, Homo sapiens
  Payload ID: 16723
  Gene Symbol: ST3GAL4
  Gene Name: ST3 beta-galactoside alpha-2,3-sialyltransferase 4
  Uniprot ID: Q11206
  ENSP ID: ENSP00000434349
MCPAGWKLLAMLALVLVVMVWYSISREDRYIELFYFPIPEKKEPCLQGEAESKASKLFGNYSRDQPIFLRLEDYFWVKTPSAYELPYGTKGSEDLLLRVLAITSSSIPKNIQSLRCRRCVVVGNGHRLRNSSLGDAINKYDVVIRLNNAPVAGYEGDVGSKTTMRLFYPESAHFDPKVENNPDTLLVLVAFKAMDFHWIETILSDKKRVRKGFWKQPPLIWDVNPKQIRILNPFFMEIAADKLLSLPMQQPRKIKQKPTTGLLAITLALHLCDLVHIAGFGYPDAYNKKQTIHYYEQITLKSMAGSGHNVSQEALAIKRMLEMGAIKNLTSF

SEQ ID NO: 84038 - protein, 328 aa, Homo sapiens
  Payload ID: 16723
  Gene Symbol: ST3GAL4
  Gene Name: ST3 beta-galactoside alpha-2,3-sialyltransferase 4
  Uniprot ID: Q11206
  ENSP ID: ENSP00000434668
MCPAGWKLLAMLALVLVVMVWYSISREDSFYFPIPEKKEPCLQGEAESKASKLFGNYSRDQPIFLRLEDYFWVKTPSAYELPYGTKGSEDLLLRVLAITSSSIPKNIQSLRCRRCVVVGNGHRLRNSSLGDAINKYDVVIRLNNAPVAGYEGDVGSKTTMRLFYPESAHFDPKVENNPDTLLVLVAFKAMDFHWIETILSDKKRVRKGFWKQPPLIWDVNPKQIRILNPFFMEIAADKLLSLPMQQPRKIKQKPTTGLLAITLALHLCDLVHIAGFGYPDAYNKKQTIHYYEQITLKSMAGSGHNVSQEALAIKRMLEMGAIKNLTSF

SEQ ID NO: 84039 - protein, 93 aa, Homo sapiens
  Payload ID: 16723
  Gene Symbol: ST3GAL4
  Gene Name: ST3 beta-galactoside alpha-2,3-sialyltransferase 4
  ENSP ID: ENSP00000434756
MVSKSRWKLLAMLALVLVVMVWYSISREDRYIELFYFPIPEKKEPCLQGEAESKASKLFGNYSRDQPIFLRLEDYFWVKTPSAYELPYGTKGS

SEQ ID NO: 84040 - protein, 333 aa, Homo sapiens; identical to SEQ ID NO: 84027
  Payload ID: 16723
  Gene Symbol: ST3GAL4
  Gene Name: ST3 beta-galactoside alpha-2,3-sialyltransferase 4
  Uniprot ID: Q11206
  ENSP ID: ENSP00000436047

SEQ ID NO: 84041 - protein, 112 aa, Homo sapiens
  Payload ID: 16724
  Gene Symbol: ST3GAL5
  Gene Name: ST3 beta-galactoside alpha-2,3-sialyltransferase 5
  ENSP ID: ENSP00000306247
MRTKAAGCAERRPLQPRTEAAAAPAGRAMPSEYTYVKLRSDCSRPSLQWYTRAQSKMRRPSLLLKDILKCTLLVFGVWILYILKLNYTTEECDMKKMHYVDPDHVKVVSSSF

SEQ ID NO: 84042 - protein, 418 aa, Homo sapiens
  Payload ID: 16724
  Gene Symbol: ST3GAL5
  Gene Name: ST3 beta-galactoside alpha-2,3-sialyltransferase 5
  Uniprot ID: Q9UNP4
  ENSP ID: ENSP00000366549
MRTKAAGCAERRPLQPRTEAAAAPAGRAMPSEYTYVKLRSDCSRPSLQWYTRAQSKMRRPSLLLKDILKCTLLVFGVWILYILKLNYTTEECDMKKMHYVDPDHVKRAQKYAQQVLQKECRPKFAKTSMALLFEHRYSVDLLPFVQKAPKDSEAESKYDPPFGFRKFSSKVQTLLELLPEHDLPEHLKAKTCRRCVVIGSGGILHGLELGHTLNQFDVVIRLNSAPVEGYSEHVGNKTTIRMTYPEGAPLSDLEYYSNDLFVAVLFKSVDFNWLQAMVKKETLPFWVRLFFWKQVAEKIPLQPKHFRILNPVIIKETAFDILQYSEPQSRFWGRDKNVPTIGVIAVVLATHLCDEVSLAGFGYDLNQPRTPLHYFDSQCMAAMNFQTMHNVTTETKFLLKLVKEGVVKDLSGGIDREF

SEQ ID NO: 84043 - protein, 390 aa, Homo sapiens
  Payload ID: 16724
  Gene Symbol: ST3GAL5
  Gene Name: ST3 beta-galactoside alpha-2,3-sialyltransferase 5
  Uniprot ID: Q9UNP4
  ENSP ID: ENSP00000377394
MPSEYTYVKLRSDCSRPSLQWYTRAQSKMRRPSLLLKDILKCTLLVFGVWILYILKLNYTTEECDMKKMHYVDPDHVKRAQKYAQQVLQKECRPKFAKTSMALLFEHRYSVDLLPFVQKAPKDSEAESKYDPPFGFRKFSSKVQTLLELLPEHDLPEHLKAKTCRRCVVIGSGGILHGLELGHTLNQFDVVIRLNSAPVEGYSEHVGNKTTIRMTYPEGAPLSDLEYYSNDLFVAVLFKSVDFNWLQAMVKKETLPFWVRLFFWKQVAEKIPLQPKHFRILNPVIIKETAFDILQYSEPQSRFWGRDKNVPTIGVIAVVLATHLCDEVSLAGFGYDLNQPRTPLHYFDSQCMAAMNFQTMHNVTTETKFLLKLVKEGVVKDLSGGIDREF

SEQ ID NO: 84044 - protein, 395 aa, Homo sapiens
  Payload ID: 16724
  Gene Symbol: ST3GAL5
  Gene Name: ST3 beta-galactoside alpha-2,3-sialyltransferase 5
  Uniprot ID: Q9UNP4
  ENSP ID: ENSP00000377397
MASVPMPSEYTYVKLRSDCSRPSLQWYTRAQSKMRRPSLLLKDILKCTLLVFGVWILYILKLNYTTEECDMKKMHYVDPDHVKRAQKYAQQVLQKECRPKFAKTSMALLFEHRYSVDLLPFVQKAPKDSEAESKYDPPFGFRKFSSKVQTLLELLPEHDLPEHLKAKTCRRCVVIGSGGILHGLELGHTLNQFDVVIRLNSAPVEGYSEHVGNKTTIRMTYPEGAPLSDLEYYSNDLFVAVLFKSVDFNWLQAMVKKETLPFWVRLFFWKQVAEKIPLQPKHFRILNPVIIKETAFDILQYSEPQSRFWGRDKNVPTIGVIAVVLATHLCDEVSLAGFGYDLNQPRTPLHYFDSQCMAAMNFQTMHNVTTETKFLLKLVKEGVVKDLSGGIDREF

SEQ ID NO: 84045 - protein, 139 aa, Homo sapiens
  Payload ID: 16724
  Gene Symbol: ST3GAL5
  Gene Name: ST3 beta-galactoside alpha-2,3-sialyltransferase 5
  ENSP ID: ENSP00000401375
MPSEYTYVKLRSDCSRPSLQWYTRAQSKMRRPSLLLKDILKCTLLVFGVWILYILKLNYTTEECDMKKMHYVDPDHVKRAQKYAQQVLQKECRPKFAKTSMALLFEHRYSVDLLPFVQKAPKDSEAESKYDPPFGFRKF

SEQ ID NO: 84046 - protein, 47 aa, Homo sapiens
  Payload ID: 16724
  Gene Symbol: ST3GAL5
  Gene Name: ST3 beta-galactoside alpha-2,3-sialyltransferase 5
  ENSP ID: ENSP00000408635
MRTKAAGCAERRPLQPRTEAAAAPAGRGTVKTVVCKAETPACMESAF

SEQ ID NO: 84047 - protein, 213 aa, Homo sapiens
  Payload ID: 16725
  Gene Symbol: ST3GAL6
  Gene Name: ST3 beta-galactoside alpha-2,3-sialyltransferase 6
  Uniprot ID: Q9Y274
  ENSP ID: ENSP00000265261
MRTSAEYFRLALSKLQSCDLFDEFDKMNNGPVLGHEEEVGRRTTFRLFYPESVFSDPIHNDPNTTVILTAFKPHDLRWLLELLMGDKINTNGFWKKPALNLIYKPYQIRILDPFIIRTAAYELLHFPKVFPKNQKPKHPTTGIIAITLAFYICHEVHLAGFKYNFSDLKSPLHYYGNATMSLMNKNAYHNVTAEQLFLKDIIEKNLVINLTQD

SEQ ID NO: 84048 - protein, 331 aa, Homo sapiens
  Payload ID: 16725
  Gene Symbol: ST3GAL6
  Gene Name: ST3 beta-galactoside alpha-2,3-sialyltransferase 6
  Uniprot ID: Q9Y274
  ENSP ID: ENSP00000377717
MRGYLVAIFLSAVFLYYVLHCILWGTNVYWVAPVEMKRRNKIQPCLSKPAFASLLRFHQFHPFLCAADFRKIASLYGSDKFDLPYGMRTSAEYFRLALSKLQSCDLFDEFDNIPCKKCVVVGNGGVLKNKTLGEKIDSYDVIIRMNNGPVLGHEEEVGRRTTFRLFYPESVFSDPIHNDPNTTVILTAFKPHDLRWLLELLMGDKINTNGFWKKPALNLIYKPYQIRILDPFIIRTAAYELLHFPKVFPKNQKPKHPTTGIIAITLAFYICHEVHLAGFKYNFSDLKSPLHYYGNATMSLMNKNAYHNVTAEQLFLKDIIEKNLVINLTQD

SEQ ID NO: 84049 - protein, 90 aa, Homo sapiens
  Payload ID: 16725
  Gene Symbol: ST3GAL6
  Gene Name: ST3 beta-galactoside alpha-2,3-sialyltransferase 6
  ENSP ID: ENSP00000417109
MRGYLVAIFLSAVFLYYVLHCILWGTNVYWVAPVEMKRRNKIQPCLSKPAFASLLSQSSAYILRKGIEELNQTSILFTQVSSVSPFSVCG

SEQ ID NO: 84050 - protein, 262 aa, Homo sapiens
  Payload ID: 16725
  Gene Symbol: ST3GAL6
  Gene Name: ST3 beta-galactoside alpha-2,3-sialyltransferase 6
  ENSP ID: ENSP00000417201
MTACPGAEWTQVSAGPPGKGEPAMRGYLVAIFLSAVFLYYVLHCILWGTNVYWVAPVEMKRRNKIQPCLSKPAFASLLRFHQFHPFLCAADFRKIASLYGSDKFDLPYGMRTSAEYFRLALSKLQSCDLFDEFDNIPCKKCVVVGNGGVLKNKTLGEKIDSYDVIIRMNNGPVLGHEEEVGRRTTFRLFYPESVFSDPIHNDPNTTVILTAFKPHDLRWLLELLMGDKINTNGFWKKPALNLIYKPYQIRILDPFIIRTAAY

SEQ ID NO: 84051 - protein, 331 aa, Homo sapiens; identical to SEQ ID NO: 84048
  Payload ID: 16725
  Gene Symbol: ST3GAL6
  Gene Name: ST3 beta-galactoside alpha-2,3-sialyltransferase 6
  Uniprot ID: Q9Y274
  ENSP ID: ENSP00000417376

SEQ ID NO: 84052 - protein, 165 aa, Homo sapiens
  Payload ID: 16725
  Gene Symbol: ST3GAL6
  Gene Name: ST3 beta-galactoside alpha-2,3-sialyltransferase 6
  ENSP ID: ENSP00000417584
MRGYLVAIFLSAVFLYYVLHCILWGTNVYWVAPVEMKRRNKIQPCLSKPAFASLLRFHQFHPFLCAADFRKIASLYGSDKFDLPYGMRTSAEYFRLALSKLQSCDLFDEFDKMNNGPVLGHEEEVGRRTTFRLFYPESVFSDPIHNDPNTTVILTAFKPHDLRWL

SEQ ID NO: 84053 - protein, 65 aa, Homo sapiens
  Payload ID: 16725
  Gene Symbol: ST3GAL6
  Gene Name: ST3 beta-galactoside alpha-2,3-sialyltransferase 6
  ENSP ID: ENSP00000418581
MWQAPRERQQPAGAAAPQVSEPGAPLRSSLLGLGGSLLPAGFAAGLHCPAFASEEAAQPWVLDNF

SEQ ID NO: 84054 - protein, 218 aa, Homo sapiens
  Payload ID: 16725
  Gene Symbol: ST3GAL6
  Gene Name: ST3 beta-galactoside alpha-2,3-sialyltransferase 6
  ENSP ID: ENSP00000418650
MRGYLVAIFLSAVFLYYVLHCILWGTNVYWVAPVEMKRRNKIQPCLSKPAFASLLRFHQFHPFLCAADFRKIASLYGSDKFDLPYGMRTSAEYFRLALSKLQSCDLFDEFDKMNNGPVLGHEEEVGRRTTFRLFYPESVFSDPIHNDPNTTVILTAFKPHDLRWLLELLMGDKINTNGFWKKPALNLIYKPYQIRILDPFIIRTAAYELLHFPKVFPK

SEQ ID NO: 84055 - protein, 231 aa, Homo sapiens
  Payload ID: 16725
  Gene Symbol: ST3GAL6
  Gene Name: ST3 beta-galactoside alpha-2,3-sialyltransferase 6
  ENSP ID: ENSP00000418896
MRGYLVAIFLSAVFLYYVLHCILWGTNVYWVAPVEMKRRNKIQPCLSKPAFASLLRFHQFHPFLCAADFRKIASLYGSDKFDLPYGMRTSAEYFRLALSKLQSCDLFDEFDNIPCKKCVVVGNGGVLKNKTLGEKIDSYDVIIRMNNGPVLGHEEEVGRRTTFRLFYPESVFSDPIHNDPNTTVILTAFKPHDLRWLLELLMGDKINTNGFWKKPALNLIYKPYQIRILDP

SEQ ID NO: 84056 - protein, 157 aa, Homo sapiens
  Payload ID: 16725
  Gene Symbol: ST3GAL6
  Gene Name: ST3 beta-galactoside alpha-2,3-sialyltransferase 6
  ENSP ID: ENSP00000419202
MRTSAEYFRLALSKLQSCDLFDEFDNIPCKKCVVVGNGGVLKNKTLGEKIDSYDVIIRMNNGPVLGHEEEVGRRTTFRLFYPESVFSDPIHNDPNTTVILTAFKPHDLRWLLELLMGDKINTNGFWKKPALNLIYKPYQIRILDPFIIRTAAYELLH

SEQ ID NO: 84057 - protein, 101 aa, Homo sapiens
  Payload ID: 16725
  Gene Symbol: ST3GAL6
  Gene Name: ST3 beta-galactoside alpha-2,3-sialyltransferase 6
  ENSP ID: ENSP00000419209
MRGYLVAIFLSAVFLYYVLHCILWGTNVYWVAPVEMKRRNKIQPCLSKPAFASLLRFHQFHPFLCAADFRKIASLYGSDKFDLPYGMRTSAYPVKSVWWLV

SEQ ID NO: 84058 - protein, 90 aa, Homo sapiens; identical to SEQ ID NO: 84049
  Payload ID: 16725
  Gene Symbol: ST3GAL6
  Gene Name: ST3 beta-galactoside alpha-2,3-sialyltransferase 6
  ENSP ID: ENSP00000419690

SEQ ID NO: 84059 - protein, 121 aa, Homo sapiens
  Payload ID: 16725
  Gene Symbol: ST3GAL6
  Gene Name: ST3 beta-galactoside alpha-2,3-sialyltransferase 6
  ENSP ID: ENSP00000419987
MKRRNKIQPCLSKPAFASLLRFHQFHPFLCAADFRKIASLYGSDKFDLPYGMRTSAEYFRLALSKLQSCDLFDEFDNIPCKKCVVVGNGGVLKNKTLGEKIDSYDVIIRMNNGPVLGHEEE

SEQ ID NO: 84060 - protein, 90 aa, Homo sapiens; identical to SEQ ID NO: 84049
  Payload ID: 16725
  Gene Symbol: ST3GAL6
  Gene Name: ST3 beta-galactoside alpha-2,3-sialyltransferase 6
  ENSP ID: ENSP00000420047

SEQ ID NO: 84061 - protein, 146 aa, Homo sapiens
  Payload ID: 16725
  Gene Symbol: ST3GAL6
  Gene Name: ST3 beta-galactoside alpha-2,3-sialyltransferase 6
  ENSP ID: ENSP00000420474
MRGYLVAIFLSAVFLYYVLHCILWGTNVYWVAPVEMKRRNKIQPCLSKPAFASLLRFHQFHPFLCAADFRKIASLYGSDKFDLPYGMRTSAEYFRLALSKLQSCDLFDEFDKNREPRTMRLPPAGQQGLPVASQLFSQSLSEARLL

SEQ ID NO: 84062 - protein, 90 aa, Homo sapiens; identical to SEQ ID NO: 84049
  Payload ID: 16725
  Gene Symbol: ST3GAL6
  Gene Name: ST3 beta-galactoside alpha-2,3-sialyltransferase 6
  ENSP ID: ENSP00000420693

SEQ ID NO: 84063 - protein, 384 aa, Homo sapiens
  Payload ID: 16725
  Gene Symbol: ST3GAL6
  Gene Name: ST3 beta-galactoside alpha-2,3-sialyltransferase 6
  ENSP ID: ENSP00000480884
MWQAPRERQQPAGAAAPQVSEPGAPLRSSLLGLGGSLLPAGFAAGLHCPGEPAMRGYLVAIFLSAVFLYYVLHCILWGTNVYWVAPVEMKRRNKIQPCLSKPAFASLLRFHQFHPFLCAADFRKIASLYGSDKFDLPYGMRTSAEYFRLALSKLQSCDLFDEFDNIPCKKCVVVGNGGVLKNKTLGEKIDSYDVIIRMNNGPVLGHEEEVGRRTTFRLFYPESVFSDPIHNDPNTTVILTAFKPHDLRWLLELLMGDKINTNGFWKKPALNLIYKPYQIRILDPFIIRTAAYELLHFPKVFPKNQKPKHPTTGIIAITLAFYICHEVHLAGFKYNFSDLKSPLHYYGNATMSLMNKNAYHNVTAEQLFLKDIIEKNLVINLTQD

SEQ ID NO: 84064 - protein, 600 aa, Homo sapiens
  Payload ID: 16726
  Gene Symbol: ST6GALNAC1
  Gene Name: ST6 (alpha-N-acetyl-neuraminyl-2,3-beta-galactosyl-1,3)- N-acetylgalactosaminide alpha-2,6-sialyltransferase 1
  Uniprot ID: Q9NSC7
  ENSP ID: ENSP00000156626
MRSCLWRCRHLSQGVQWSLLLAVLVFFLFALPSFIKEPQTKPSRHQRTENIKERSLQSLAKPKSQAPTRARRTTIYAEPVPENNALNTQTQPKAHTTGDRGKEANQAPPEEQDKVPHTAQRAAWKSPEKEKTMVNTLSPRGQDAGMASGRTEAQSWKSQDTKTTQGNGGQTRKLTASRTVSEKHQGKAATTAKTLIPKSQHRMLAPTGAVSTRTRQKGVTTAVIPPKEKKPQATPPPAPFQSPTTQRNQRLKAANFKSEPRWDFEEKYSFEIGGLQTTCPDSVKIKASKSLWLQKLFLPNLTLFLDSRHFNQSEWDRLEHFAPPFGFMELNYSLVQKVVTRFPPVPQQQLLLASLPAGSLRCITCAVVGNGGILNNSHMGQEIDSHDYVFRLSGALIKGYEQDVGTRTSFYGFTAFSLTQSLLILGNRGFKNVPLGKDVRYLHFLEGTRDYEWLEALLMNQTVMSKNLFWFRHRPQEAFREALHMDRYLLLHPDFLRYMKNRFLRSKTLDGAHWRIYRPTTGALLLLTALQLCDQVSAYGFITEGHERFSDHYYDTSWKRLIFYINHDFKLEREVWKRLHDEGIIRLYQRPGPGTAKAKN

SEQ ID NO: 84065 - protein, 471 aa, Homo sapiens
  Payload ID: 16726
  Gene Symbol: ST6GALNAC1
  Gene Name: ST6 (alpha-N-acetyl-neuraminyl-2,3-beta-galactosyl-1,3)- N-acetylgalactosaminide alpha-2,6-sialyltransferase 1
  ENSP ID: ENSP00000351991
MRSCLWRCRHLSQGVQWSLLLAVLVFFLFALPSFIKEPQTKPSRHQRTENIKERSLQSLAKPKSQAPTRARRTTIYAEPVPENNALNTQTQPKAHTTGDRGKEANQAPPEEQDKVPHTAQRAAWKSPEKEKTMVNTLSPRGQDAGMASGRTEAQSWKSQDTKTTQGNGGQTRKLTASRTVSEKHQGKAATTAKTLIPKSQHRMLAPTGAVSTRTRQKGVTTAVIPPKEKKPQATPPPAPFQSPTTQRNQRLKAANFKSEPRWDFEEKYSFEIGGLQTTCPDSVKIKASKSLWLQKLFLPNLTLFLDSRHFNQSEWDRLEHFAPPFGFMELNYSLVQKVVTRFPPVPQQQLLLASLPAGSLRCITCAVVGNGGILNNSHMGQEIDSHDYVFRLSGALIKGYEQDVGTRTSFYGFTAFSLTQSLLILGNRGFKNVPLGKAQTPGSFSGSPAHGQVPVAAPRLSPIHEEQVSEV

SEQ ID NO: 84066 - protein, 63 aa, Homo sapiens
  Payload ID: 16726
  Gene Symbol: ST6GALNAC1
  Gene Name: ST6 (alpha-N-acetyl-neuraminyl-2,3-beta-galactosyl-1,3)- N-acetylgalactosaminide alpha-2,6-sialyltransferase 1
  ENSP ID: ENSP00000465092
MRSCLWRCRHLSQGVQWSLLLAVLVFFLFALPSFIKEPQTKPSRMVSRAPGHLMRCQGMGVGR

SEQ ID NO: 84067 - protein, 47 aa, Homo sapiens
  Payload ID: 16726
  Gene Symbol: ST6GALNAC1
  Gene Name: ST6 (alpha-N-acetyl-neuraminyl-2,3-beta-galactosyl-1,3)- N-acetylgalactosaminide alpha-2,6-sialyltransferase 1
  ENSP ID: ENSP00000465116
MRSCLWRCRHLSQGVQWSLLLAVLVFFLFALPSFIKEPQTKPSRLTL

SEQ ID NO: 84068 - protein, 59 aa, Homo sapiens
  Payload ID: 16726
  Gene Symbol: ST6GALNAC1
  Gene Name: ST6 (alpha-N-acetyl-neuraminyl-2,3-beta-galactosyl-1,3)- N-acetylgalactosaminide alpha-2,6-sialyltransferase 1
  ENSP ID: ENSP00000466230
  MOD_RES (1)..(1): Any amino acid
XVRYLHFLEGTRDYEWLEALLMNQTAQTPGSFSGSPAHGQVPVAAPRLSPIHEEQVSEV

SEQ ID NO: 84069 - protein, 152 aa, Homo sapiens
  Payload ID: 16726
  Gene Symbol: ST6GALNAC1
  Gene Name: ST6 (alpha-N-acetyl-neuraminyl-2,3-beta-galactosyl-1,3)- N-acetylgalactosaminide alpha-2,6-sialyltransferase 1
  ENSP ID: ENSP00000466436
GSLRCITCAVVGNGGILNNSHMGQEIDSHDYVFRLSGALIKGYEQDVGTRTSFYGFTAFSLTQSLLILGNRGFKNVPLGKDVRYLHFLEGTRDYEWLEALLMNQTVMSKNLFWFRHRPQEAFREALHMDRFLRSKTLDGAHWRIYRPTTGAL

SEQ ID NO: 84070 - protein, 63 aa, Homo sapiens; identical to SEQ ID NO: 84066
  Payload ID: 16726
  Gene Symbol: ST6GALNAC1
  Gene Name: ST6 (alpha-N-acetyl-neuraminyl-2,3-beta-galactosyl-1,3)- N-acetylgalactosaminide alpha-2,6-sialyltransferase 1
  ENSP ID: ENSP00000468784

SEQ ID NO: 84071 - protein, 374 aa, Homo sapiens
  Payload ID: 16727
  Gene Symbol: ST6GALNAC2
  Gene Name: ST6 (alpha-N-acetyl-neuraminyl-2,3-beta-galactosyl-1,3)- N-acetylgalactosaminide alpha-2,6-sialyltransferase 2
  Uniprot ID: Q9UJ37
  ENSP ID: ENSP00000225276
MGLPRGSFFWLLLLLTAACSGLLFALYFSAVQRYPGPAAGARDTTSFEAFFQSKASNSWTGKGQACRHLLHLAIQRHPHFRGLFNLSIPVLLWGDLFTPALWDRLSQHKAPYGWRGLSHQVIASTLSLLNGSESAKLFAPPRDTPPKCIRCAVVGNGGILNGSRQGPNIDAHDYVFRLNGAVIKGFERDVGTKTSFYGFTVNTMKNSLVSYWNLGFTSVPQGQDLQYIFIPSDIRDYVMLRSAILGVPVPEGLDKGDRPHAYFGPEASASKFKLLHPDFISYLTERFLKSKLINTHFGDLYMPSTGALMLLTALHTCDQVSAYGFITSNYWKFSDHYFERKMKPLIFYANHDLSLEAALWRDLHKAGILQLYQR

SEQ ID NO: 84072 - protein, 38 aa, Homo sapiens
  Payload ID: 16727
  Gene Symbol: ST6GALNAC2
  Gene Name: ST6 (alpha-N-acetyl-neuraminyl-2,3-beta-galactosyl-1,3)- N-acetylgalactosaminide alpha-2,6-sialyltransferase 2
  ENSP ID: ENSP00000464915
  MOD_RES (1)..(1): Any amino acid
XDYVMLRSAILGVPVPEGLDKGDSPAPTAQGTAATPAP

SEQ ID NO: 84073 - protein, 84 aa, Homo sapiens
  Payload ID: 16727
  Gene Symbol: ST6GALNAC2
  Gene Name: ST6 (alpha-N-acetyl-neuraminyl-2,3-beta-galactosyl-1,3)- N-acetylgalactosaminide alpha-2,6-sialyltransferase 2
  ENSP ID: ENSP00000465778
MGLPRGSFFWLLLLLTAACSGLLFALYFSAVQRYPGPAAGARARPADTCFTWPFSGTPTSVACSISPFQCCCGGTSSPQRSGTA

SEQ ID NO: 84074 - protein, 74 aa, Homo sapiens
  Payload ID: 16727
  Gene Symbol: ST6GALNAC2
  Gene Name: ST6 (alpha-N-acetyl-neuraminyl-2,3-beta-galactosyl-1,3)- N-acetylgalactosaminide alpha-2,6-sialyltransferase 2
  ENSP ID: ENSP00000466513
MGLPRGSFFWLLLLLTAACSGLLFALYFSAVQRYPGPAAGASCQPRVPSTCGCWGEGRGLREAWPPFERGHHII

SEQ ID NO: 84075 - protein, 212 aa, Homo sapiens
  Payload ID: 16727
  Gene Symbol: ST6GALNAC2
  Gene Name: ST6 (alpha-N-acetyl-neuraminyl-2,3-beta-galactosyl-1,3)- N-acetylgalactosaminide alpha-2,6-sialyltransferase 2
  ENSP ID: ENSP00000466560
LSLLNGSESAKLFAPPRDTPPKCIRCAVVGNGGILNGSRQGPNIDAHDYVFRLNGAVIKGFERDVGTKTSFYGFTVNTMKNSLVSYWNLGFTSVPQGQDLQYIFIPSDIRDYVMLRSAILGVPVPEGLDKGDRFLKSKLINTHFGDLYMPSTGALMLLTALHTCDQVSAYGFITSNYWKFSDHYFERKMKPLIFYANHDLSLEAALWRDLHK

SEQ ID NO: 84076 - protein, 283 aa, Homo sapiens
  Payload ID: 16727
  Gene Symbol: ST6GALNAC2
  Gene Name: ST6 (alpha-N-acetyl-neuraminyl-2,3-beta-galactosyl-1,3)- N-acetylgalactosaminide alpha-2,6-sialyltransferase 2
  ENSP ID: ENSP00000489527
MSSPSHTPNPSPTQSPSQSRSNNIVTPPGQQPAPSPSPTRGSSSRPPSHPPTPNASQPSSRTSSLNPSPQVQHVPRGAAQTPTPPTSKSPSQSGFKSLSRNPSLTPAVPPKSSFYSPATSSSYIGPIQNIPSYITPYVPRFLKEPPFFQPPTAPLPQNPCFACPSPCPARKPPPPPDSLYLPLLPPPPHHPQFNCPFPTPPGLFMPPSSLSYTPPVEVLVSGKPHVVPNVLPATFYTPFSRYYSQPRSYRSGYRGYSGALTLPSISPLQYDGSGRSVHFYHGS

SEQ ID NO: 84077 - protein, 305 aa, Homo sapiens
  Payload ID: 16728
  Gene Symbol: ST6GALNAC3
  Gene Name: ST6 (alpha-N-acetyl-neuraminyl-2,3-beta-galactosyl-1,3)- N-acetylgalactosaminide alpha-2,6-sialyltransferase 3
  Uniprot ID: Q8NDV1
  ENSP ID: ENSP00000329214
MACILKRKSVIAVSFIAAFLFLLVVRLVNEVNFPLLLNCFGQPGTKWIPFSYTYRRPLRTHYGYINVKTQEPLQLDCDLCAIVSNSGQMVGQKVGNEIDRSSCIWRMNNAPTKGYEEDVGRMTMIRVVSHTSVPLLLKNPDYFFKEANTTIYVIWGPFRNMRKDGNGIVYNMLKKTVGIYPNAQIYVTTEKRMSYCDGVFKKETGKDRVQSGSYLSTGWFTFLLAMDACYGIHVYGMINDTYCKTEGYRKVPYHYYEQGRDECDEYFLHEHAPYGGHRFITEKKVFAKWAKKHRIIFTHPNWTLS

SEQ ID NO: 84078 - protein, 139 aa, Homo sapiens [sequence omitted]

SEQ ID NO: 84079 - protein, 302 aa, Homo sapiens
  Payload ID: 16729
  Gene Symbol: ST6GALNAC4
  Gene Name: ST6 (alpha-N-acetyl-neuraminyl-2,3-beta-galactosyl-1,3)- N-acetylgalactosaminide alpha-2,6-sialyltransferase 4
  Uniprot ID: Q9H4F1
  ENSP ID: ENSP00000336733
MKAPGRLVLIILCSVVFSAVYILLCCWAGLPLCLATCLDHHFPTGSRPTVPGPLHFSGYSSVPDGKPLVREPCRSCAVVSSSGQMLGSGLGAEIDSAECVFRMNQAPTVGFEADVGQRSTLRVVSHTSVPLLLRNYSHYFQKARDTLYMVWGQGRHMDRVLGGRTYRTLLQLTRMYPGLQVYTFTERMMAYCDQIFQDETGKNRRQSGSFLSTGWFTMILALELCEEIVVYGMVSDSYCREKSHPSVPYHYFEKGRLDECQMYLAHEQAPRSAHRFITEKAVFSRWAKKRPIVFAHPSWRTE

SEQ ID NO: 84080 - protein, 200 aa, Homo sapiens
  Payload ID: 16729
  Gene Symbol: ST6GALNAC4
  Gene Name: ST6 (alpha-N-acetyl-neuraminyl-2,3-beta-galactosyl-1,3)- N-acetylgalactosaminide alpha-2,6-sialyltransferase 4
  ENSP ID: ENSP00000355130
MLGSGLGAEIDSAECVFRMNQAPTVGFEADVGQRSTLRVVSHTSVPLLLRNYSHYFQKARDTLYMVWGQGRHMDRVLGGRTYRTLLQLTRMYPGLQVYTFTERMMAYCDQIFQDETGKNRRQSGSFLSTGWFTMILALELCEEIVVYGMVSDSYCREKSHPSVPYHYFEKGRLDECQMYLAHEQAPRSAHRFITEKAVFS

SEQ ID NO: 84081 - protein, 336 aa, Homo sapiens
  Payload ID: 16730
  Gene Symbol: ST6GALNAC5
  Gene Name: ST6 (alpha-N-acetyl-neuraminyl-2,3-beta-galactosyl-1,3)- N-acetylgalactosaminide alpha-2,6-sialyltransferase 5
  Uniprot ID: Q9BVH7
  ENSP ID: ENSP00000417583
MKTLMRHGLAVCLALTTMCTSLLLVYSSLGGQKERPPQQQQQQQQQQQQASATGSSQPAAESSTQQRPGVPAGPRPLDGYLGVADHKPLKMHCRDCALVTSSGHLLHSRQGSQIDQTECVIRMNDAPTRGYGRDVGNRTSLRVIAHSSIQRILRNRHDLLNVSQGTVFIFWGPSSYMRRDGKGQVYNNLHLLSQVLPRLKAFMITRHKMLQFDELFKQETGKDRKISNTWLSTGWFTMTIALELCDRINVYGMVPPDFCRDPNHPSVPYHYYEPFGPDECTMYLSHERGRKGSHHRFITEKRVFKNWARTFNIHFFQPDWKPESLAINHPENKPVF

SEQ ID NO: 84082 - protein, 236 aa, Homo sapiens
  Payload ID: 16730
  Gene Symbol: ST6GALNAC5
  Gene Name: ST6 (alpha-N-acetyl-neuraminyl-2,3-beta-galactosyl-1,3)- N-acetylgalactosaminide alpha-2,6-sialyltransferase 5
  ENSP ID: ENSP00000436263
MKTLMRHGLAVCLALTTMCTSLLLVYSSLGGQKERPPQQQQQQQQQQQQASATGSSQPAAESSTQQRPGVPAGPRPLDGYLGVADHKPLKMHCRDCALVTSSGHLLHSRQGSQIDQTECVIRMNDAPTRGYGRDVGNRTSLRVIAHSSIQRILRNRHDLLNVSQGTVFIFWGPSSYMRRDGKGQVYNNLHLLSQVLPRLKAFMITRHKMLQFDELFKQETGKDRYPTLGSALAGLQ

SEQ ID NO: 84083 - protein, 333 aa, Homo sapiens
  Payload ID: 16731
  Gene Symbol: ST6GALNAC6
  Gene Name: ST6 (alpha-N-acetyl-neuraminyl-2,3-beta-galactosyl-1,3)- N-acetylgalactosaminide alpha-2,6-sialyltransferase 6
  Uniprot ID: Q969X2
  ENSP ID: ENSP00000291839
MACSRPPSQCEPTSLPPGPPAGRRHLPLSRRRREMSSNKEQRSAVFVILFALITILILYSSNSANEVFHYGSLRGRSRRPVNLKKWSITDGYVPILGNKTLPSRCHQCVIVSSSSHLLGTKLGPEIERAECTIRMNDAPTTGYSADVGNKTTYRVVAHSSVFRVLRRPQEFVNRTPETVFIFWGPPSKMQKPQGSLVRVIQRAGLVFPNMEAYAVSPGRMRQFDDLFRGETGKDREKSHSWLSTGWFTMVIAVELCDHVHVYGMVPPNYCSQRPRLQRMPYHYYEPKGPDECVTYIQNEHSRKGNHHRFITEKRVFSSWAQLYGITFSHPSWT

SEQ ID NO: 84084 - protein, 299 aa, Homo sapiens
  Payload ID: 16731
  Gene Symbol: ST6GALNAC6
  Gene Name: ST6 (alpha-N-acetyl-neuraminyl-2,3-beta-galactosyl-1,3)- N-acetylgalactosaminide alpha-2,6-sialyltransferase 6
  Uniprot ID: Q969X2
  ENSP ID: ENSP00000362234
MSSNKEQRSAVFVILFALITILILYSSNSANEVFHYGSLRGRSRRPVNLKKWSITDGYVPILGNKTLPSRCHQCVIVSSSSHLLGTKLGPEIERAECTIRMNDAPTTGYSADVGNKTTYRVVAHSSVFRVLRRPQEFVNRTPETVFIFWGPPSKMQKPQGSLVRVIQRAGLVFPNMEAYAVSPGRMRQFDDLFRGETGKDREKSHSWLSTGWFTMVIAVELCDHVHVYGMVPPNYCSQRPRLQRMPYHYYEPKGPDECVTYIQNEHSRKGNHHRFITEKRVFSSWAQLYGITFSHPSWT

SEQ ID NO: 84085 - protein, 374 aa, Homo sapiens
  Payload ID: 16731
  Gene Symbol: ST6GALNAC6
  Gene Name: ST6 (alpha-N-acetyl-neuraminyl-2,3-beta-galactosyl-1,3)- N-acetylgalactosaminide alpha-2,6-sialyltransferase 6
  Uniprot ID: Q969X2
  ENSP ID: ENSP00000362235
MACSRPPSQCEPTSLPPGPPAGRRHLPLSRRRREMSSNKEQRSAVFVILFALITILILYSSNSANEVFHYGSLRGRSRRPVNLKKWSITDGYVPILGNKTLPSRCHQCVIVSSSSHLLGTKLGPEIERAECTIRMNDAPTTGYSADVGNKTTYRVVAHSSVFRVLRRPQEFVNRTPETVFIFWGPPSKMQKPQGSLVRVIQRAGLVFPNMEAYAVSPGRMRQFDDLFRGETGKDREKSHSWLSTGWFTMVIAVELCDHVHVYGMVPPNYCSGPASSACPTTTTSPRGRTNVSPTSRMSTVARATTTASSPRKGSSHRGPSCMASPSPTPPGPRPPSLWDLRRVRGEAASAQPLGQGPSSGQSRLAGVSPSQSGP

SEQ ID NO: 84086 - protein, 299 aa, Homo sapiens; identical to SEQ ID NO: 84084
  Payload ID: 16731
  Gene Symbol: ST6GALNAC6
  Gene Name: ST6 (alpha-N-acetyl-neuraminyl-2,3-beta-galactosyl-1,3)- N-acetylgalactosaminide alpha-2,6-sialyltransferase 6
  Uniprot ID: Q969X2
  ENSP ID: ENSP00000362237

SEQ ID NO: 84087 - protein, 333 aa, Homo sapiens; identical to SEQ ID NO: 84083
  Payload ID: 16731
  Gene Symbol: ST6GALNAC6
  Gene Name: ST6 (alpha-N-acetyl-neuraminyl-2,3-beta-galactosyl-1,3)- N-acetylgalactosaminide alpha-2,6-sialyltransferase 6
  Uniprot ID: Q969X2
  ENSP ID: ENSP00000362239

SEQ ID NO: 84088 - protein, 200 aa, Homo sapiens
  Payload ID: 16731
  Gene Symbol: ST6GALNAC6
  Gene Name: ST6 (alpha-N-acetyl-neuraminyl-2,3-beta-galactosyl-1,3)- N-acetylgalactosaminide alpha-2,6-sialyltransferase 6
  ENSP ID: ENSP00000405326
MSSNKEQRSAVFVILFALITILILYSSNSANEVFHYGSLRGRSRRPVNLKKWSITDGYVPILGNKTLPSRCHQCVIVSSSSHLLGTKLGPEIERAECTIRMNDAPTTGYSADVGNKTTYRVVAHSSVFRVLRRPQEFVNRTPETVFIFWGPPSKMQKPQGSLVRVIQRAGLVFPNMEAYAVSPGRMRQFDDLFRGETGKD

SEQ ID NO: 84089 - protein, 86 aa, Homo sapiens
  Payload ID: 16731
  Gene Symbol: ST6GALNAC6
  Gene Name: ST6 (alpha-N-acetyl-neuraminyl-2,3-beta-galactosyl-1,3)- N-acetylgalactosaminide alpha-2,6-sialyltransferase 6
  ENSP ID: ENSP00000438109
MSSNKEQRSAVFVILFALITILILYSSNSANEVFHYGSLRGRSRRPVNLKKWSITDGYVPILGNKGEVSFVVEHRLVYHGDRGGVV

SEQ ID NO: 84090 - protein, 299 aa, Homo sapiens; identical to SEQ ID NO: 84084
  Payload ID: 16731
  Gene Symbol: ST6GALNAC6
  Gene Name: ST6 (alpha-N-acetyl-neuraminyl-2,3-beta-galactosyl-1,3)- N-acetylgalactosaminide alpha-2,6-sialyltransferase 6
  Uniprot ID: Q969X2
  ENSP ID: ENSP00000477575

SEQ ID NO: 84091 - protein, 406 aa, Homo sapiens
  Payload ID: 16732
  Gene Symbol: ST6GAL1
  Gene Name: ST6 beta-galactosamide alpha-2,6-sialyltranferase 1
  Uniprot ID: P15907
  ENSP ID: ENSP00000169298
MIHTNLKKKFSCCVLVFLLFAVICVWKEKKKGSYYDSFKLQTKEFQVLKSLGKLAMGSDSQSVSSSSTQDPHRGRQTLGSLRGLAKAKPEASFQVWNKDSSSKNLIPRLQKIWKNYLSMNKYKVSYKGPGPGIKFSAEALRCHLRDHVNVSMVEVTDFPFNTSEWEGYLPKESIRTKAGPWGRCAVVSSAGSLKSSQLGREIDDHDAVLRFNGAPTANFQQDVGTKTTIRLMNSQLVTTEKRFLKDSLYNEGILIVWDPSVYHSDIPKWYQNPDYNFFNNYKTYRKLHPNQPFYILKPQMPWELWDILQEISPEEIQPNPPSSGMLGIIIMMTLCDQVDIYEFLPSKRKTDVCYYYQKFFDSACTMGAYHPLLYEKNLVKHLNQGTDEDIYLLGKATLPGFRTIHC

SEQ ID NO: 84092 - protein, 91 aa, Homo sapiens
  Payload ID: 16732
  Gene Symbol: ST6GAL1
  Gene Name: ST6 beta-galactosamide alpha-2,6-sialyltranferase 1
  ENSP ID: ENSP00000388789
MIHTNLKKKFSCCVLVFLLFAVICVWKEKKKGSYYDSFKLQTKEFQVLKSLGKLAMGSDSQSVSSSSTQDPHRGRQTLGSLRGLAKAKPEA

SEQ ID NO: 84093 - protein, 45 aa, Homo sapiens
  Payload ID: 16732
  Gene Symbol: ST6GAL1
  Gene Name: ST6 beta-galactosamide alpha-2,6-sialyltranferase 1
  ENSP ID: ENSP00000388928
MIHTNLKKKFSCCVLVFLLFAVICVWKEKKKGSYYDSFKLQTKEF

SEQ ID NO: 84094 - protein, 406 aa, Homo sapiens; identical to SEQ ID NO: 84091
  Payload ID: 16732
  Gene Symbol: ST6GAL1
  Gene Name: ST6 beta-galactosamide alpha-2,6-sialyltranferase 1
  Uniprot ID: P15907
  ENSP ID: ENSP00000389337

SEQ ID NO: 84095 - protein, 98 aa, Homo sapiens
  Payload ID: 16732
  Gene Symbol: ST6GAL1
  Gene Name: ST6 beta-galactosamide alpha-2,6-sialyltranferase 1
  ENSP ID: ENSP00000390793
MIHTNLKKKFSCCVLVFLLFAVICVWKEKKKGSYYDSFKLQTKEFQVLKSLGKLAMGSDSQSVSSSSTQDPHRGRQTLGSLRGLAKAKPEASFQVWNK

SEQ ID NO: 84096 - protein, 21 aa, Homo sapiens
  Payload ID: 16732
  Gene Symbol: ST6GAL1
  Gene Name: ST6 beta-galactosamide alpha-2,6-sialyltranferase 1
  ENSP ID: ENSP00000397273
MNSQLVTTEKRFLKDSLYNEG

SEQ ID NO: 84097 - protein, 42 aa, Homo sapiens
  Payload ID: 16732
  Gene Symbol: ST6GAL1
  Gene Name: ST6 beta-galactosamide alpha-2,6-sialyltranferase 1
  ENSP ID: ENSP00000399525
MIHTNLKKKFSCCVLVFLLFAVICVWKEKKKGSYYDSFKLQT

SEQ ID NO: 84098 - protein, 25 aa, Homo sapiens
  Payload ID: 16732
  Gene Symbol: ST6GAL1
  Gene Name: ST6 beta-galactosamide alpha-2,6-sialyltranferase 1
  ENSP ID: ENSP00000400547
MIHTNLKKKFSCCVLVFLLFAVICV

SEQ ID NO: 84099 - protein, 115 aa, Homo sapiens
  Payload ID: 16732
  Gene Symbol: ST6GAL1
  Gene Name: ST6 beta-galactosamide alpha-2,6-sialyltranferase 1
  ENSP ID: ENSP00000403063
MNSQLVTTEKRFLKDSLYNEGILIVWDPSVYHSDIPKWYQNPDYNFFNNYKTYRKLHPNQPFYILKPQMPWELWDILQEISPEEIQPNPPSSGMLGIIIMMTLCDQVDIYEFLPS

SEQ ID NO: 84100 - protein, 113 aa, Homo sapiens
  Payload ID: 16732
  Gene Symbol: ST6GAL1
  Gene Name: ST6 beta-galactosamide alpha-2,6-sialyltranferase 1
  ENSP ID: ENSP00000407631
MIHTNLKKKFSCCVLVFLLFAVICVWKEKKKGSYYDSFKLQTKEFQVLKSLGKLAMGSDSQSVSSSSTQDPHRGRQTLGSLRGLAKAKPEASFQVWNKDSSSKNLIPRLQKIW

SEQ ID NO: 84101 - protein, 127 aa, Homo sapiens
  Payload ID: 16732
  Gene Symbol: ST6GAL1
  Gene Name: ST6 beta-galactosamide alpha-2,6-sialyltranferase 1
  ENSP ID: ENSP00000411518
MIHTNLKKKFSCCVLVFLLFAVICVWKEKKKGSYYDSFKLQTKEFQVLKSLGKLAMGSDSQSVSSSSTQDPHRGRQTLGSLRGLAKAKPEASFQVWNKDSSSKNLIPRLQKIWKNYLSMNKYKVSYK

SEQ ID NO: 84102 - protein, 175 aa, Homo sapiens
  Payload ID: 16732
  Gene Symbol: ST6GAL1
  Gene Name: ST6 beta-galactosamide alpha-2,6-sialyltranferase 1
  Uniprot ID: P15907
  ENSP ID: ENSP00000412221
MNSQLVTTEKRFLKDSLYNEGILIVWDPSVYHSDIPKWYQNPDYNFFNNYKTYRKLHPNQPFYILKPQMPWELWDILQEISPEEIQPNPPSSGMLGIIIMMTLCDQVDIYEFLPSKRKTDVCYYYQKFFDSACTMGAYHPLLYEKNLVKHLNQGTDEDIYLLGKATLPGFRTIHC

SEQ ID NO: 84103 - protein, 52 aa, Homo sapiens
  Payload ID: 16732
  Gene Symbol: ST6GAL1
  Gene Name: ST6 beta-galactosamide alpha-2,6-sialyltranferase 1
  ENSP ID: ENSP00000412821
MNSQLVTTEKRFLKDSLYNEGILIVWDPSVYHSDIPKWYQNPDYNFFNNYKT

SEQ ID NO: 84104 - protein, 74 aa, Homo sapiens
  Payload ID: 16732
  Gene Symbol: ST6GAL1
  Gene Name: ST6 beta-galactosamide alpha-2,6-sialyltranferase 1
  ENSP ID: ENSP00000414504
MIHTNLKKKFSCCVLVFLLFAVICVWKEKKKGSYYDSFKLQTKEFQVLKSLGKLAMGSDSQSVSSSSTQDPHRG

SEQ ID NO: 84105 - protein, 178 aa, Homo sapiens
  Payload ID: 16732
  Gene Symbol: ST6GAL1
  Gene Name: ST6 beta-galactosamide alpha-2,6-sialyltranferase 1
  ENSP ID: ENSP00000415886
LIPRLQKIWKNYLSMNKYKVSYKGPGPGIKFSAEALRCHLRDHVNVSMVEVTDFPFNTSEWEGYLPKESIRTKAGPWGRCAVVSSAGSLKSSQLGREIDDHDAVLRFNGAPTANFQQDVGTKTTIRLMNSQISVHHCARAARKVAHFPGYTTHPQESLSCCFLVGYHREALPQRQFVQ

SEQ ID NO: 84106 - protein, 97 aa, Homo sapiens
  Payload ID: 16732
  Gene Symbol: ST6GAL1
  Gene Name: ST6 beta-galactosamide alpha-2,6-sialyltranferase 1
  ENSP ID: ENSP00000416163
MIHTNLKKKFSCCVLVFLLFAVICVWKEKKKGSYYDSFKLQTKEFQVLKSLGKLAMGSDSQSVSSSSTQDPHRGRQTLGSLRGLAKAKPEASFQVWN

SEQ ID NO: 84107 - protein, 529 aa, Homo sapiens
  Payload ID: 16733
  Gene Symbol: ST6GAL2
  Gene Name: ST6 beta-galactosamide alpha-2,6-sialyltranferase 2
  Uniprot ID: Q96JF0
  ENSP ID: ENSP00000355273
MKPHLKQWRQRMLFGIFAWGLLFLLIFIYFTDSNPAEPVPSSLSFLETRRLLPVQGKQRAIMGAAHEPSPPGGLDARQALPRAHPAGSFHAGPGDLQKWAQSQDGFEHKEFFSSQVGRKSQSAFYPEDDDYFFAAGQPGWHSHTQGTLGFPSPGEPGPREGAFPAAQVQRRRVKKRHRRQRRSHVLEEGDDGDRLYSSMSRAFLYRLWKGNVSSKMLNPRLQKAMKDYLTANKHGVRFRGKREAGLSRAQLLCQLRSRARVRTLDGTEAPFSALGWRRLVPAVPLSQLHPRGLRSCAVVMSAGAILNSSLGEEIDSHDAVLRFNSAPTRGYEKDVGNKTTIRIINSQILTNPSHHFIDSSLYKDVILVAWDPAPYSANLNLWYKKPDYNLFTPYIQHRQRNPNQPFYILHPKFIWQLWDIIQENTKEKIQPNPPSSGFIGILIMMSMCREVHVYEYIPSVRQTELCHYHELYYDAACTLGAYHPLLYEKLLVQRLNMGTQGDLHRKGKVVLPGFQAVHCPAPSPVIPHS

SEQ ID NO: 84108 - protein, 95 aa, Homo sapiens
  Payload ID: 16733
  Gene Symbol: ST6GAL2
  Gene Name: ST6 beta-galactosamide alpha-2,6-sialyltranferase 2
  ENSP ID: ENSP00000355386
  MOD_RES (1)..(1): Any amino acid
XSGFIGILIMMSMCREVHVYEYIPSVRQTELCHYHELYYDAACTLGAYHPLLYEKLLVQRLNMGTQGDLHRKGKVVLPGFQAVHCPAPSPVIPHS

SEQ ID NO: 84109 - protein, 529 aa, Homo sapiens; identical to SEQ ID NO: 84107
  Payload ID: 16733
  Gene Symbol: ST6GAL2
  Gene Name: ST6 beta-galactosamide alpha-2,6-sialyltranferase 2
  Uniprot ID: Q96JF0
  ENSP ID: ENSP00000386942

SEQ ID NO: 84110 - protein, 466 aa, Homo sapiens
  Payload ID: 16733
  Gene Symbol: ST6GAL2
  Gene Name: ST6 beta-galactosamide alpha-2,6-sialyltranferase 2
  Uniprot ID: Q96JF0
  ENSP ID: ENSP00000387332
MKPHLKQWRQRMLFGIFAWGLLFLLIFIYFTDSNPAEPVPSSLSFLETRRLLPVQGKQRAIMGAAHEPSPPGGLDARQALPRAHPAGSFHAGPGDLQKWAQSQDGFEHKEFFSSQVGRKSQSAFYPEDDDYFFAAGQPGWHSHTQGTLGFPSPGEPGPREGAFPAAQVQRRRVKKRHRRQRRSHVLEEGDDGDRLYSSMSRAFLYRLWKGNVSSKMLNPRLQKAMKDYLTANKHGVRFRGKREAGLSRAQLLCQLRSRARVRTLDGTEAPFSALGWRRLVPAVPLSQLHPRGLRSCAVVMSAGAILNSSLGEEIDSHDAVLRFNSAPTRGYEKDVGNKTTIRIINSQILTNPSHHFIDSSLYKDVILVAWDPAPYSANLNLWYKKPDYNLFTPYIQHRQRNPNQPFYILHPKFIWQLWDIIQENTKEKIQPNPPSSGFIGSFVKIGHIRACSEPRSRDCTPAWTTE

SEQ ID NO: 84111 - protein, 34 aa, Homo sapiens
  Payload ID: 16733
  Gene Symbol: ST6GAL2
  Gene Name: ST6 beta-galactosamide alpha-2,6-sialyltranferase 2
  ENSP ID: ENSP00000395581
MKPHLKQWRQRMLFGIFAWGLLFLLIFIYFTDSN

SEQ ID NO: 84112 - protein, 135 aa, Homo sapiens
  Payload ID: 16734
  Gene Symbol: ST8SIA1
  Gene Name: ST8 alpha-N-acetyl-neuraminide alpha-2,8-sialyltransferase 1
  Uniprot ID: Q92185
  ENSP ID: ENSP00000261197
MSPCGRARRQTSRGAMAVLAWKFPRTRLPMGASALCVVVLCWLYIFPVYRLPNEKEIVQGVLQQGTAWRRNQTAARAFRKQMEDCCDPAHLFAMTKMNSPMGKSMWYDGEFLYSFTIDNSTYSLFPQMQSPSFVK

SEQ ID NO: 84113 - protein, 83 aa, Homo sapiens
  Payload ID: 16734
  Gene Symbol: ST8SIA1
  Gene Name: ST8 alpha-N-acetyl-neuraminide alpha-2,8-sialyltransferase 1
  ENSP ID: ENSP00000370832
MSPCGRARRQTSRGAMAVLAWKFPRTRLPMGASALCVVVLCWLYIFPVYRLPNEKEIVQGVLQQGTAWRRNQTAARAFSCGIA

SEQ ID NO: 84114 - protein, 356 aa, Homo sapiens
  Payload ID: 16734
  Gene Symbol: ST8SIA1
  Gene Name: ST8 alpha-N-acetyl-neuraminide alpha-2,8-sialyltransferase 1
  Uniprot ID: Q92185
  ENSP ID: ENSP00000379353
MSPCGRARRQTSRGAMAVLAWKFPRTRLPMGASALCVVVLCWLYIFPVYRLPNEKEIVQGVLQQGTAWRRNQTAARAFRKQMEDCCDPAHLFAMTKMNSPMGKSMWYDGEFLYSFTIDNSTYSLFPQATPFQLPLKKCAVVGNGGILKKSGCGRQIDEANFVMRCNLPPLSSEYTKDVGSKSQLVTANPSIIRQRFQNLLWSRKTFVDNMKIYNHSYIYMPAFSMKTGTEPSLRVYYTLSDVGANQTVLFANPNFLRSIGKFWKSRGIHAKRLSTGLFLVSAALGLCEEVAIYGFWPFSVNMHEQPISHHYYDNVLPFSGFHAMPEEFLQLWYLHKIGALRMQLDPCEDTSLQPTS

SEQ ID NO: 84115 - protein, 120 aa, Homo sapiens
  Payload ID: 16734
  Gene Symbol: ST8SIA1
  Gene Name: ST8 alpha-N-acetyl-neuraminide alpha-2,8-sialyltransferase 1
  ENSP ID: ENSP00000384467
MSPCGRARRQTSRGAMAVLAWKFPRTRLPMGASALCVVVLCWLYIFPVYRLPNEKEIVQGVLQQGTAWRRNQTAARAFSVSTLLTLAAHESLNIHLGGGITVLVFKEHRFYFTSGPKMQD

SEQ ID NO: 84116 - protein, 172 aa, Homo sapiens
  Payload ID: 16734
  Gene Symbol: ST8SIA1
  Gene Name: ST8 alpha-N-acetyl-neuraminide alpha-2,8-sialyltransferase 1
  ENSP ID: ENSP00000440292
PRTRLPMGASALCVVVLCWLYIFPVYRLPNEKEIVQGVLQQGTAWRRNQTAARAFRKQMEDCCDPAHLFAMTKMNSPMGKSMWYDGEFLYSFTIDNSTYSLFPQATPFQLPLKKCAVVGNGGILKKSGCGRQIDEANFVMRCNLPPLSSEYTKDVGSKSQLVTANPSIIRQR

SEQ ID NO: 84117 - protein, 190 aa, Homo sapiens
  Payload ID: 16734
  Gene Symbol: ST8SIA1
  Gene Name: ST8 alpha-N-acetyl-neuraminide alpha-2,8-sialyltransferase 1
  ENSP ID: ENSP00000441707
LFQDRRELAGYFAGLKMIFILKNLYQPPLWKQMEDCCDPAHLFAMTKMNSPMGKSMWYDGEFLYSFTIDNSTYSLFPQATPFQLPLKKCAVVGNGGILKKSGCGRQIDEANFVMRCNLPPLSSEYTKDVGSKSQLVTANPSIIRQRFQNLLWSRKTFVDNMKIYNHSYIYMPAFSMKTGTEPSLRVYYTL

SEQ ID NO: 84118 - protein, 24 aa, Homo sapiens
  Payload ID: 16734
  Gene Symbol: ST8SIA1
  Gene Name: ST8 alpha-N-acetyl-neuraminide alpha-2,8-sialyltransferase 1
  ENSP ID: ENSP00000444999
SQLVTANPSIIRQRDFTAVERVKK

SEQ ID NO: 84119 - protein, 375 aa, Homo sapiens
  Payload ID: 16735
  Gene Symbol: ST8SIA2
  Gene Name: ST8 alpha-N-acetyl-neuraminide alpha-2,8-sialyltransferase 2
  Uniprot ID: Q92186
  ENSP ID: ENSP00000268164
MQLQFRSWMLAALTLLVVFLIFADISEIEEEIGNSGGRGTIRSAVNSLHSKSNRAEVVINGSSSPAVVDRSNESIKHNIQPASSKWRHNQTLSLRIRKQILKFLDAEKDISVLKGTLKPGDIIHYIFDRDSTMNVSQNLYELLPRTSPLKNKHFGTCAIVGNSGVLLNSGCGQEIDAHSFVIRCNLAPVQEYARDVGLKTDLVTMNPSVIQRAFEDLVNATWREKLLQRLHSLNGSILWIPAFMARGGKERVEWVNELILKHHVNVRTAYPSLRLLHAVRGYWLTNKVHIKRPTTGLLMYTLATRFCKQIYLYGFWPFPLDQNQNPVKYHYYDSLKYGYTSQASPHTMPLEFKALKSLHEQGALKLTVGQCDGAT

SEQ ID NO: 84120 - protein, 354 aa, Homo sapiens
  Payload ID: 16735
  Gene Symbol: ST8SIA2
  Gene Name: ST8 alpha-N-acetyl-neuraminide alpha-2,8-sialyltransferase 2
  ENSP ID: ENSP00000437382
MQLQFRSWMLAALTLLVVFLIFADISEIEEEIGAEVVINGSSSPAVVDRSNESIKHNIQPASSKWRHNQTLSLRIRKQILKFLDAEKDISVLKGTLKPGDIIHYIFDRDSTMNVSQNLYELLPRTSPLKNKHFGTCAIVGNSGVLLNSGCGQEIDAHSFVIRCNLAPVQEYARDVGLKTDLVTMNPSVIQRAFEDLVNATWREKLLQRLHSLNGSILWIPAFMARGGKERVEWVNELILKHHVNVRTAYPSLRLLHAVRGYWLTNKVHIKRPTTGLLMYTLATRFCKQIYLYGFWPFPLDQNQNPVKYHYYDSLKYGYTSQASPHTMPLEFKALKSLHEQGALKLTVGQCDGAT

SEQ ID NO: 84121 - protein, 332 aa, Homo sapiens
  Payload ID: 16735
  Gene Symbol: ST8SIA2
  Gene Name: ST8 alpha-N-acetyl-neuraminide alpha-2,8-sialyltransferase 2
  ENSP ID: ENSP00000450851
MQLQFRSWMLAALTLLVVFLIFADISEIEEEIGNSGGRGTIRSAVNSLHSKSNRKQILKFLDAEKDISVLKGTLKPGDIIHYIFDRDSTMNVSQNLYELLPRTSPLKNKHFGTCAIVGNSGVLLNSGCGQEIDAHSFVIRCNLAPVQEYARDVGLKTDLVTMNPSVIQRAFEDLVNATWREKLLQRLHSLNGSILWIPAFMARGGKERVEWVNELILKHHVNVRTAYPSLRLLHAVRGYWLTNKVHIKRPTTGLLMYTLATRFCKQIYLYGFWPFPLDQNQNPVKYHYYDSLKYGYTSQASPHTMPLEFKALKSLHEQGALKLTVGQCDGAT

SEQ ID NO: 84122 - protein, 380 aa, Homo sapiens
  Payload ID: 16736
  Gene Symbol: ST8SIA3
  Gene Name: ST8 alpha-N-acetyl-neuraminide alpha-2,8-sialyltransferase 3
  Uniprot ID: O43173
  ENSP ID: ENSP00000320431
MRNCKMARVASVLGLVMLSVALLILSLISYVSLKKENIFTTPKYASPGAPRMYMFHAGFRSQFALKFLDPSFVPITNSLTQELQEKPSKWKFNRTAFLHQRQEILQHVDVIKNFSLTKNSVRIGQLMHYDYSSHKYVFSISNNFRSLLPDVSPIMNKHYNICAVVGNSGILTGSQCGQEIDKSDFVFRCNFAPTEAFQRDVGRKTNLTTFNPSILEKYYNNLLTIQDRNNFFLSLKKLDGAILWIPAFFFHTSATVTRTLVDFFVEHRGQLKVQLAWPGNIMQHVNRYWKNKHLSPKRLSTGILMYTLASAICEEIHLYGFWPFGFDPNTREDLPYHYYDKKGTKFTTKWQESHQLPAEFQLLYRMHGEGLTKLTLSHCA

SEQ ID NO: 84123 - protein, 125 aa, Homo sapiens
  Payload ID: 16736
  Gene Symbol: ST8SIA3
  Gene Name: ST8 alpha-N-acetyl-neuraminide alpha-2,8-sialyltransferase 3
  ENSP ID: ENSP00000467752
  MOD_RES (1)..(1): Any amino acid
XKSDFVFRCNFAPTEAFQRDVGRKTNLTTFNPSILEKYYNNLLTIQDRNNFFLSLKKLDGAILWIPAFFFHTSATVTRTLVDFFVEHRGQLKVQLAWPGNIMQHVNRFFATLHCCKQCSDEHLWN

SEQ ID NO: 84124 - protein, 359 aa, Homo sapiens
  Payload ID: 16737
  Gene Symbol: ST8SIA4
  Gene Name: ST8 alpha-N-acetyl-neuraminide alpha-2,8-sialyltransferase 4
  Uniprot ID: Q92187
  ENSP ID: ENSP00000231461
MRSIRKRWTICTISLLLIFYKTKEIARTEEHQETQLIGDGELSLSRSLVNSSDKIIRKAGSSIFQHNVEGWKINSSLVLEIRKNILRFLDAERDVSVVKSSFKPGDVIHYVLDRRRTLNISHDLHSLLPEVSPMKNRRFKTCAVVGNSGILLDSECGKEIDSHNFVIRCNLAPVVEFAADVGTKSDFITMNPSVVQRAFGGFRNESDREKFVHRLSMLNDSVLWIPAFMVKGGEKHVEWVNALILKNKLKVRTAYPSLRLIHAVRGYWLTNKVPIKRPSTGLLMYTLATRFCDEIHLYGFWPFPKDLNGKAVKYHYYDDLKYRYFSNASPHRMPLEFKTLNVLHNRGALKLTTGKCVKQ

SEQ ID NO: 84125 - protein, 46 aa, Homo sapiens
  Payload ID: 16737
  Gene Symbol: ST8SIA4
  Gene Name: ST8 alpha-N-acetyl-neuraminide alpha-2,8-sialyltransferase 4
  ENSP ID: ENSP00000428826
MRSIRKRWTICTISLLLIFYKTKEIARTEEHQETQLIGASGGGVDS

SEQ ID NO: 84126 - protein, 168 aa, Homo sapiens
  Payload ID: 16737
  Gene Symbol: ST8SIA4
  Gene Name: ST8 alpha-N-acetyl-neuraminide alpha-2,8-sialyltransferase 4
  Uniprot ID: Q92187
  ENSP ID: ENSP00000428914
MRSIRKRWTICTISLLLIFYKTKEIARTEEHQETQLIGDGELSLSRSLVNSSDKIIRKAGSSIFQHNVEGWKINSSLVLEIRKNILRFLDAERDVSVVKSSFKPGDVIHYVLDRRRTLNISHDLHSLLPEVSPMKNRRFKTCAVVGNSGILLDSECGKEIDSHNFVIR

SEQ ID NO: 84127 - protein, 376 aa, Homo sapiens
  Payload ID: 16738
  Gene Symbol: ST8SIA5
  Gene Name: ST8 alpha-N-acetyl-neuraminide alpha-2,8-sialyltransferase 5
  Uniprot ID: O15466
  ENSP ID: ENSP00000321343
MRYADPSANRDLLGSRTLLFIFICAFALVTLLQQILYGRNYIKRYFEFYEGPFEYNSTRCLELRHEILEVKVLSMVKQSELFDRWKSLQMCKWAMNISEANQFKSTLSRCCNAPAFLFTTQKNTPLGTKLKYEVDTSGIYHINQEIFRMFPKDMPYYRSQFKKCAVVGNGGILKNSRCGREINSADFVFRCNLPPISEKYTMDVGVKTDVVTVNPSIITERFHKLEKWRRPFYRVLQVYENASVLLPAFYNTRNTDVSIRVKYVLDDFESPQAVYYFHPQYLVNVSRYWLSLGVRAKRISTGLILVTAALELCEEVHLFGFWAFPMNPSGLYITHHYYDNVKPRPGFHAMPSEIFNFLHLHSRGILRVHTGTCSCC

SEQ ID NO: 84128 - protein, 345 aa, Homo sapiens
  Payload ID: 16738
  Gene Symbol: ST8SIA5
  Gene Name: ST8 alpha-N-acetyl-neuraminide alpha-2,8-sialyltransferase 5
  ENSP ID: ENSP00000443683
MRYADPSANRDLLGSRTLLFIFICAFALVTLLQQILYGRNYIKRVKQSELFDRWKSLQMCKWAMNISEANQFKSTLSRCCNAPAFLFTTQKNTPLGTKLKYEVDTSGIYHINQEIFRMFPKDMPYYRSQFKKCAVVGNGGILKNSRCGREINSADFVFRCNLPPISEKYTMDVGVKTDVVTVNPSIITERFHKLEKWRRPFYRVLQVYENASVLLPAFYNTRNTDVSIRVKYVLDDFESPQAVYYFHPQYLVNVSRYWLSLGVRAKRISTGLILVTAALELCEEVHLFGFWAFPMNPSGLYITHHYYDNVKPRPGFHAMPSEIFNFLHLHSRGILRVHTGTCSCC

SEQ ID NO: 84129 - protein, 412 aa, Homo sapiens
  Payload ID: 16738
  Gene Symbol: ST8SIA5
  Gene Name: ST8 alpha-N-acetyl-neuraminide alpha-2,8-sialyltransferase 5
  Uniprot ID: O15466
  ENSP ID: ENSP00000445492
MRYADPSANRDLLGSRTLLFIFICAFALVTLLQQILYGRNYIKRGLQFGWQSGDQLTNWTGLFNVTDDPAVQSGSDSSSRYFEFYEGPFEYNSTRCLELRHEILEVKVLSMVKQSELFDRWKSLQMCKWAMNISEANQFKSTLSRCCNAPAFLFTTQKNTPLGTKLKYEVDTSGIYHINQEIFRMFPKDMPYYRSQFKKCAVVGNGGILKNSRCGREINSADFVFRCNLPPISEKYTMDVGVKTDVVTVNPSIITERFHKLEKWRRPFYRVLQVYENASVLLPAFYNTRNTDVSIRVKYVLDDFESPQAVYYFHPQYLVNVSRYWLSLGVRAKRISTGLILVTAALELCEEVHLFGFWAFPMNPSGLYITHHYYDNVKPRPGFHAMPSEIFNFLHLHSRGILRVHTGTCSCC

SEQ ID NO: 84130 - protein, 40 aa, Homo sapiens
  Payload ID: 16738
  Gene Symbol: ST8SIA5
  Gene Name: ST8 alpha-N-acetyl-neuraminide alpha-2,8-sialyltransferase 5
  ENSP ID: ENSP00000466787
MVVVGTNEQVPLPRSQPACVCGRKNLISESQDLLLGCVML

SEQ ID NO: 84131 - protein, 54 aa, Homo sapiens
  Payload ID: 16738
  Gene Symbol: ST8SIA5
  Gene Name: ST8 alpha-N-acetyl-neuraminide alpha-2,8-sialyltransferase 5
  ENSP ID: ENSP00000468112
MVVVGTNEQVPLPRSQPACVCGRKNLISESQDLLLGTLNFMRGLLNITPQDAWS

SEQ ID NO: 84132 - protein, 398 aa, Homo sapiens
  Payload ID: 16739
  Gene Symbol: ST8SIA6
  Gene Name: ST8 alpha-N-acetyl-neuraminide alpha-2,8-sialyltransferase 6
  Uniprot ID: P61647
  ENSP ID: ENSP00000366827
MRPGGALLALLASLLLLLLLRLLWCPADAPGRARILVEESREATHGTPAALRTLRSPATAVPRATNSTYLNEKSLQLTEKCKNLQYGIESFSNKTKGYSENDYLQIITDIQSCPWKRQAEEYANFRAKLASCCDAVQNFVVSQNNTPVGTNMSYEVESKKEIPIKKNIFHMFPVSQPFVDYPYNQCAVVGNGGILNKSLCGTEIDKSDFVFRCNLPPTTGDVSKDVGSKTNLVTINPSIITLKYGNLKEKKALFLEDIATYGDAFFLLPAFSFRANTGTSFKVYYTLEESKARQKVLFFHPKYLKDLALFWRTKGVTAYRLSTGLMITSVAVELCKNVKLYGFWPFSKTVEDIPVSHHYYDNKLPKHGFHQMPKEYSQILQLHMKGILKLQFSKCEVA

SEQ ID NO: 84133 - protein, 128 aa, Homo sapiens
  Payload ID: 16739
  Gene Symbol: ST8SIA6
  Gene Name: ST8 alpha-N-acetyl-neuraminide alpha-2,8-sialyltransferase 6
  ENSP ID: ENSP00000388343
  MOD_RES (1)..(1): Any amino acid
XYPYNQCAVVGNGGILNKSLCGTEIDKSDFVFRCNLPPTTGDVSKDVGSKTNLVTINPSIITLKYGNLKEKKALFLEDIATYGDAFFLLPAFSFRANTGTSFKVYYTLEESKARQKCKTKRKTINSIL

SEQ ID NO: 84134 - protein, 2570 aa, Homo sapiens
  Payload ID: 16740
  Gene Symbol: STAB1
  Gene Name: stabilin 1
  Uniprot ID: Q9NY15
  ENSP ID: ENSP00000312946
MAGPRGLLPLCLLAFCLAGFSFVRGQVLFKGCDVKTTFVTHVPCTSCAAIKKQTCPSGWLRELPDQITQDCRYEVQLGGSMVSMSGCRRKCRKQVVQKACCPGYWGSRCHECPGGAETPCNGHGTCLDGMDRNGTCVCQENFRGSACQECQDPNRFGPDCQSVCSCVHGVCNHGPRGDGSCLCFAGYTGPHCDQELPVCQELRCPQNTQCSAEAPSCRCLPGYTQQGSECRAPNPCWPSPCSLLAQCSVSPKGQAQCHCPENYHGDGMVCLPKDPCTDNLGGCPSNSTLCVYQKPGQAFCTCRPGLVSINSNASAGCFAFCSPFSCDRSATCQVTADGKTSCVCRESEVGDGRACYGHLLHEVQKATQTGRVFLQLRVAVAMMDQGCREILTTAGPFTVLVPSVSSFSSRTMNASLAQQLCRQHIIAGQHILEDTRTQQTRRWWTLAGQEITVTFNQFTKYSYKYKDQPQQTFNIYKANNIAANGVFHVVTGLRWQAPSGTPGDPKRTIGQILASTEAFSRFETILENCGLPSILDGPGPFTVFAPSNEAVDSLRDGRLIYLFTAGLSKLQELVRYHIYNHGQLTVEKLISKGRILTMANQVLAVNISEEGRILLGPEGVPLQRVDVMAANGVIHMLDGILLPPTILPILPKHCSEEQHKIVAGSCVDCQALNTSTCPPNSVKLDIFPKECVYIHDPTGLNVLKKGCASYCNQTIMEQGCCKGFFGPDCTQCPGGFSNPCYGKGNCSDGIQGNGACLCFPDYKGIACHICSNPNKHGEQCQEDCGCVHGLCDNRPGSGGVCQQGTCAPGFSGRFCNESMGDCGPTGLAQHCHLHARCVSQEGVARCRCLDGFEGDGFSCTPSNPCSHPDRGGCSENAECVPGSLGTHHCTCHKGWSGDGRVCVAIDECELDMRGGCHTDALCSYVGPGQSRCTCKLGFAGDGYQCSPIDPCRAGNGGCHGLATCRAVGGGQRVCTCPPGFGGDGFSCYGDIFRELEANAHFSIFYQWLKSAGITLPADRRVTALVPSEAAVRQLSPEDRAFWLQPRTLPNLVRAHFLQGALFEEELARLGGQEVATLNPTTRWEIRNISGRVWVQNASVDVADLLATNGVLHILSQVLLPPRGDVPGGQGLLQQLDLVPAFSLFRELLQHHGLVPQIEAATAYTIFVPTNRSLEAQGNSSHLDADTVRHHVVLGEALSMETLRKGGHRNSLLGPAHWIVFYNHSGQPEVNHVPLEGPMLEAPGRSLIGLSGVLTVGSSRCLHSHAEALREKCVNCTRRFRCTQGFQLQDTPRKSCVYRSGFSFSRGCSYTCAKKIQVPDCCPGFFGTLCEPCPGGLGGVCSGHGQCQDRFLGSGECHCHEGFHGTACEVCELGRYGPNCTGVCDCAHGLCQEGLQGDGSCVCNVGWQGLRCDQKITSPQCPRKCDPNANCVQDSAGASTCACAAGYSGNGIFCSEVDPCAHGHGGCSPHANCTKVAPGQRTCTCQDGYMGDGELCQEINSCLIHHGGCHIHAECIPTGPQQVSCSCREGYSGDGIRTCELLDPCSKNNGGCSPYATCKSTGDGQRTCTCDTAHTVGDGLTCRARVGLELLRDKHASFFSLRLLEYKELKGDGPFTIFVPHADLMSNLSQDELARIRAHRQLVFRYHVVGCRRLRSEDLLEQGYATALSGHPLRFSEREGSIYLNDFARVVSSDHEAVNGILHFIDRVLLPPEALHWEPDDAPIPRRNVTAAAQGFGYKIFSGLLKVAGLLPLLREASHRPFTMLWPTDAAFRALPPDRQAWLYHEDHRDKLAAILRGHMIRNVEALASDLPNLGPLRTMHGTPISFSCSRTRAGELMVGEDDARIVQRHLPFEGGLAYGIDQLLEPPGLGARCDHFETRPLRLNTCSICGLEPPCPEGSQEQGSPEACWRFYPKFWTSPPLHSLGLRSVWVHPSLWGRPQGLGRGCHRNCVTTTWKPSCCPGHYGSECQACPGGPSSPCSDRGVCMDGMSGSGQCLCRSGFAGTACELCAPGAFGPHCQACRCTVHGRCDEGLGGSGSCFCDEGWTGPRCEVQLELQPVCTPPCAPEAVCRAGNSCECSLGYEGDGRVCTVADLCQDGHGGCSEHANCSQVGTMVTCTCLPDYEGDGWSCRARNPCTDGHRGGCSEHANCLSTGLNTRRCECHAGYVGDGLQCLEESEPPVDRCLGQPPPCHSDAMCTDLHFQEKRAGVFHLQATSGPYGLNFSEAEAACEAQGAVLASFPQLSAAQQLGFHLCLMGWLANGSTAHPVVFPVADCGNGRVGIVSLGARKNLSERWDAYCFRVQDVACRCRNGFVGDGISTCNGKLLDVLAATANFSTFYGMLLGYANATQRGLDFLDFLDDELTYKTLFVPVNEGFVDNMTLSGPDLELHASNATLLSANASQGKLLPAHSGLSLIISDAGPDNSSWAPVAPGTVVVSRIIVWDIMAFNGIIHALASPLLAPPQPQAVLAPEAPPVAAGVGAVLAAGALLGLVAGALYLRARGKPMGFGFSAFQAEDDADDDFSPWQEGTNPTLVSVPNPVFGSDTFCEPFDDSLLEEDFPDTQRILTVK

SEQ ID NO: 84135 - protein, 177 aa, Homo sapiens
  Payload ID: 16740
  Gene Symbol: STAB1
  Gene Name: stabilin 1
  ENSP ID: ENSP00000418426
  MOD_RES (1)..(1): Any amino acid
XDDELTYKTLFVPVNEGFVDNMTLSGPDLELHASNATLLSANASQGKLLPAHSGLSLIISDAGPDNSSWAPVQAVLAPEAPPVAAGVGAVLAAGALLGLVAGALYLRARGKPMGFGFSAFQAEDDADDDFSPWQEGTNPTLVSVPNPVFGSDTFCEPFDDSLLEEDFPDTQRILTVK

SEQ ID NO: 84136 - protein, 2551 aa, Homo sapiens
  Payload ID: 16741
  Gene Symbol: STAB2
  Gene Name: stabilin 2
  Uniprot ID: Q8WWQ8
  ENSP ID: ENSP00000373539
MMLQHLVIFCLGLVVQNFCSPAETTGQARRCDRKSLLTIRTECRSCALNLGVKCPDGYTMITSGSVGVRDCRYTFEVRTYSLSLPGCRHICRKDYLQPRCCPGRWGPDCIECPGGAGSPCNGRGSCAEGMEGNGTCSCQEGFGGTACETCADDNLFGPSCSSVCNCVHGVCNSGLDGDGTCECYSAYTGPKCDKPIPECAALLCPENSRCSPSTEDENKLECKCLPNYRGDGKYCDPINPCLRKICHPHAHCTYLGPNRHSCTCQEGYRGDGQVCLPVDPCQINFGNCPTKSTVCKYDGPGQSHCECKEHYQNFVPGVGCSMTDICKSDNPCHRNANCTTVAPGRTECICQKGYVGDGLTCYGNIMERLRELNTEPRGKWQGRLTSFISLLDKAYAWPLSKLGPFTVLLPTDKGLKGFNVNELLVDNKAAQYFVKLHIIAGQMNIEYMNNTDMFYTLTGKSGEIFNSDKDNQIKLKLHGGKKKVKIIQGDIIASNGLLHILDRAMDKLEPTFESNNEQTIMTMLQPRYSKFRSLLEETNLGHALDEDGVGGPYTIFVPNNEALNNMKDGTLDYLLSPEGSRKLLELVRYHIVPFTQLEVATLISTPHIRSMANQLIQFNTTDNGQILANDVAMEEIEITAKNGRIYTLTGVLIPPSIVPILPHRCDETKREMKLGTCVSCSLVYWSRCPANSEPTALFTHRCVYSGRFGSLKSGCARYCNATVKIPKCCKGFYGPDCNQCPGGFSNPCSGNGQCADSLGGNGTCICEEGFQGSQCQFCSDPNKYGPRCNKKCLCVHGTCNNRIDSDGACLTGTCRDGSAGRLCDKQTSACGPYVQFCHIHATCEYSNGTASCICKAGYEGDGTLCSEMDPCTGLTPGGCSRNAECIKTGTGTHTCVCQQGWTGNGRDCSEINNCLLPSAGGCHDNASCLYVGPGQNECECKKGFRGNGIDCEPITSCLEQTGKCHPLASCQSTSSGVWSCVCQEGYEGDGFLCYGNAAVELSFLSEAAIFNRWINNASLQPTLSATSNLTVLVPSQQATEDMDQDEKSFWLSQSNIPALIKYHMLLGTYRVADLQTLSSSDMLATSLQGNFLHLAKVDGNITIEGASIVDGDNAATNGVIHIINKVLVPQRRLTGSLPNLLMRLEQMPDYSIFRGYIIQYNLANAIEAADAYTVFAPNNNAIENYIREKKVLSLEEDVLRYHVVLEEKLLKNDLHNGMHRETMLGFSYFLSFFLHNDQLYVNEAPINYTNVATDKGVIHGLGKVLEIQKNRCDNNDTTIIRGRCRTCSSELTCPFGTKSLGNEKRRCIYTSYFMGRRTLFIGCQPKCVRTVITRECCAGFFGPQCQPCPGNAQNVCFGNGICLDGVNGTGVCECGEGFSGTACETCTEGKYGIHCDQACSCVHGRCNQGPLGDGSCDCDVGWRGVHCDNATTEDNCNGTCHTSANCLTNSDGTASCKCAAGFQGNGTICTAINACEISNGGCSAKADCKRTTPGRRVCTCKAGYTGDGIVCLEINPCLENHGGCDKNAECTQTGPNQAACNCLPAYTGDGKVCTLINVCLTKNGGCSEFAICNHTGQVERTCTCKPNYIGDGFTCRGSIYQELPKNPKTSQYFFQLQEHFVKDLVGPGPFTVFAPLSAAFDEEARVKDWDKYGLMPQVLRYHVVACHQLLLENLKLISNATSLQGEPIVISVSQSTVYINNKAKIISSDIISTNGIVHIIDKLLSPKNLLITPKDNSGRILQNLTTLATNNGYIKFSNLIQDSGLLSVITDPIHTPVTLFWPTDQALHALPAEQQDFLFNQDNKDKLKEYLKFHVIRDAKVLAVDLPTSTAWKTLQGSELSVKCGAGRDIGDLFLNGQTCRIVQRELLFDLGVAYGIDCLLIDPTLGGRCDTFTTFDASGECGSCVNTPSCPRWSKPKGVKQKCLYNLPFKRNLEGCRERCSLVIQIPRCCKGYFGRDCQACPGGPDAPCNNRGVCLDQYSATGECKCNTGFNGTACEMCWPGRFGPDCLPCGCSDHGQCDDGITGSGQCLCETGWTGPSCDTQAVLPAVCTPPCSAHATCKENNTCECNLDYEGDGITCTVVDFCKQDNGGCAKVARCSQKGTKVSCSCQKGYKGDGHSCTEIDPCADGLNGGCHEHATCKMTGPGKHKCECKSHYVGDGLNCEPEQLPIDRCLQDNGQCHADAKCVDLHFQDTTVGVFHLRSPLGQYKLTFDKAREACANEAATMATYNQLSYAQKAKYHLCSAGWLETGRVAYPTAFASQNCGSGVVGIVDYGPRPNKSEMWDVFCYRMKDVNCTCKVGYVGDGFSCSGNLLQVLMSFPSLTNFLTEVLAYSNSSARGRAFLEHLTDLSIRGTLFVPQNSGLGENETLSGRDIEHHLANVSMFFYNDLVNGTTLQTRLGSKLLITASQDPLQPTETRFVDGRAILQWDIFASNGIIHVISRPLKAPPAPVTLTHTGLGAGIFFAIILVTGAVALAAYSYFRINRRTIGFQHFESEEDINVAALGKQQPENISNPLYESTTSAPPEPSYDPFTDSEERQLEGNDPLRTL

SEQ ID NO: 84137 - protein, 135 aa, Homo sapiens
  Payload ID: 16741
  Gene Symbol: STAB2
  Gene Name: stabilin 2
  ENSP ID: ENSP00000446629
EDINVAALGKQQPENISNPLYESTTSAPPEPSYDPFTMKKLQPSWDDLSWATQLQAGETKTGGPTPSPSCLPTQGSSTNKHAQHIRVHSAQGESCLRPVATRKIQLGLNTQNALPPYNPLFSRTLKNGSLRAMTP

SEQ ID NO: 84138 - protein, 33 aa, Homo sapiens
  Payload ID: 16741
  Gene Symbol: STAB2
  Gene Name: stabilin 2
  ENSP ID: ENSP00000449282
QKNRCDNNDTTIIRGRCRTCSSELTCPFGTKSL

SEQ ID NO: 84139 - protein, 73 aa, Homo sapiens
  Payload ID: 16742
  Gene Symbol: SAXO1
  Gene Name: stabilizer of axonemal microtubules 1
  ENSP ID: ENSP00000369902
MKTKCICELCSCGRHHCPHLPTKIYDKTEKPCLLSEYTENYPFYHSYLPRESFKPRREYQKGPIPMEGLTTSS

SEQ ID NO: 84140 - protein, 474 aa, Homo sapiens
  Payload ID: 16742
  Gene Symbol: SAXO1
  Gene Name: stabilizer of axonemal microtubules 1
  Uniprot ID: Q8IYX7
  ENSP ID: ENSP00000369907
MKTKCICELCSCGRHHCPHLPTKIYDKTEKPCLLSEYTENYPFYHSYLPRESFKPRREYQKGPIPMEGLTTSRRDFGPHKVAPVKVHQYDQFVPSEENMDLLTTYKKDYNPYPVCRVDPIKPRDSKYPCSDKMECLPTYKADYLPWNQPRREPLRLEHKYQPASVRFDNRTTHQDDYPIKGLVKTISCKPLAMPKLCNIPLEDVTNYKMSYVAHPVEKRFVHEAEKFRPCEIPFESLTTQKQSYRGLMGEPAKSLKPLARPPGLDMPFCNTTEFRDKYQAWPMPRMFSKAPITYVPPEDRMDLLTTVQAHYTCPKGAPAQSCRPALQIKKCGRFEGSSTTKDDYKQWSSMRTEPVKPVPQLDLPTEPLDCLTTTRAHYVPHLPINTKSCKPHWSGPRGNVPVESQTTYTISFTPKEMGRCLASYPEPPGYTFEEVDALGHRIYKPVSQAGSQQSSHLSVDDSENPNQRELEVLA

SEQ ID NO: 84141 - protein, 409 aa, Homo sapiens
  Payload ID: 16742
  Gene Symbol: SAXO1
  Gene Name: stabilizer of axonemal microtubules 1
  ENSP ID: ENSP00000438823
MEGLTTSRRDFGPHKVAPVKVHQYDQFVPSEENMDLLTTYKKDYNPYPVCRVDPIKPRDSKYPCSDKMECLPTYKADYLPWNQPRREPLRLEHKYQPASVRFDNRTTHQDDYPIKGLVKTISCKPLAMPKLCNIPLEDVTNYKMSYVAHPVEKRFVHEAEKFRPCEIPFESLTTQKQSYRGLMGEPAKSLKPLARPPGLDMPFCNTTEFRDKYQAWPMPRMFSKAPITYVPPEDRMDLLTTVQAHYTCPKGAPAQSCRPALQIKKCGRFEGSSTTKDDYKQWSSMRTEPVKPVPQLDLPTEPLDCLTTTRAHYVPHLPINTKSCKPHWSGPRGNVPVESQTTYTISFTPKEMGRCLASYPEPPGYTFEEVDALGHRIYKPVSQAGSQQSSHLSVDDSENPNQRELEVLA

SEQ ID NO: 84142 - protein, 398 aa, Homo sapiens
  Payload ID: 16743
  Gene Symbol: SAXO2
  Gene Name: stabilizer of axonemal microtubules 2
  Uniprot ID: Q658L1
  ENSP ID: ENSP00000340445
MGAKSMRSWCLCQICSCGSDYCPYEIVKQPRHVPEEYKPKQGKIDLGTTYKRDLNSYKVQPVAIVRPLERQVKKGKLDTVPTYKDDYRAWDLHKSELYKPEQTYHPPTVKFGNSTTFQDDFVPQEIKPRQSFKPSSVVKRSTAPFNGITSHRLDYIPHQLELKFERPKEVYKPTDQRFEDLTTHRCDFQGLIGETAKLCRPVHTRVTQNALFEGSTEFRESFQPWEIPPPEVKKVPEYVPPTGSMLLNSTSHLDYVPYQANHVVPIRPVSQKRSNNFPFQGKSIMKEDFPAWESCRQGLIKKQQQIPNPSGKFDGLSTFRSHYVPHELIPTESCKPLNIAFKSSVPFDDVTMYSVEYTPKRQEICPASYPSPPGYIFDNTNSQGHKFFRKIIPAVKAF

SEQ ID NO: 84143 - protein, 29 aa, Homo sapiens
  Payload ID: 16743
  Gene Symbol: SAXO2
  Gene Name: stabilizer of axonemal microtubules 2
  ENSP ID: ENSP00000454320
MGAKSMRSWCLCQICSCGPGLTREPLPLP

SEQ ID NO: 84144 - protein, 30 aa, Homo sapiens
  Payload ID: 16743
  Gene Symbol: SAXO2
  Gene Name: stabilizer of axonemal microtubules 2
  ENSP ID: ENSP00000455158
MYDNVLPPQSLKAKQEIRACHGKMEGITTF

SEQ ID NO: 84145 - protein, 41 aa, Homo sapiens
  Payload ID: 16743
  Gene Symbol: SAXO2
  Gene Name: stabilizer of axonemal microtubules 2
  ENSP ID: ENSP00000455957
MGAKSMRSWCLCQICSCGFLSSQPDHIPIPVQAAVLWDPPD

SEQ ID NO: 84146 - protein, 104 aa, Homo sapiens
  Payload ID: 16743
  Gene Symbol: SAXO2
  Gene Name: stabilizer of axonemal microtubules 2
  ENSP ID: ENSP00000458067
MYDNVLPPQSLKAKQEIRACHGKMEGITTFKSDYCPYEIVKQPRHVPEEYKPKQGKIDLGTTYKRDLNSYKVQPVAIVRPLERQVKKGKLDTVPTYKGNLLFHT

SEQ ID NO: 84147 - protein, 424 aa, Homo sapiens
  Payload ID: 16744
  Gene Symbol: STAMBP
  Gene Name: STAM binding protein
  Uniprot ID: O95630
  ENSP ID: ENSP00000344742
MSDHGDVSLPPEDRVRALSQLGSAVEVNEDIPPRRYFRSGVEIIRMASIYSEEGNIEHAFILYNKYITLFIEKLPKHRDYKSAVIPEKKDTVKKLKEIAFPKAEELKAELLKRYTKEYTEYNEEKKKEAEELARNMAIQQELEKEKQRVAQQKQQQLEQEQFHAFEEMIRNQELEKERLKIVQEFGKVDPGLGGPLVPDLEKPSLDVFPTLTVSSIQPSDCHTTVRPAKPPVVDRSLKPGALSNSESIPTIDGLRHVVVPGRLCPQFLQLASANTARGVETCGILCGKLMRNEFTITHVLIPKQSAGSDYCNTENEEELFLIQDQQGLITLGWIHTHPTQTAFLSSVDLHTHCSYQMMLPESVAIVCSPKFQETGFFKLTDHGLEEISSCRQKGFHPHSKDPPLFCSCSHVTVVDRAVTITDLR

SEQ ID NO: 84148 - protein, 424 aa, Homo sapiens; identical to SEQ ID NO: 84147
  Payload ID: 16744
  Gene Symbol: STAMBP
  Gene Name: STAM binding protein
  Uniprot ID: O95630
  ENSP ID: ENSP00000377633

SEQ ID NO: 84149 - protein, 424 aa, Homo sapiens; identical to SEQ ID NO: 84147
  Payload ID: 16744
  Gene Symbol: STAMBP
  Gene Name: STAM binding protein
  Uniprot ID: O95630
  ENSP ID: ENSP00000377636

SEQ ID NO: 84150 - protein, 424 aa, Homo sapiens; identical to SEQ ID NO: 84147
  Payload ID: 16744
  Gene Symbol: STAMBP
  Gene Name: STAM binding protein
  Uniprot ID: O95630
  ENSP ID: ENSP00000386548

SEQ ID NO: 84151 - protein, 163 aa, Homo sapiens
  Payload ID: 16744
  Gene Symbol: STAMBP
  Gene Name: STAM binding protein
  ENSP ID: ENSP00000390921
MSDHGDVSLPPEDRVRALSQLGSAVEVNEDIPPRRYFRSGVEIIRMASIYSEEGNIEHAFILYNKYITLFIEKLPKHRDYKSAVIPEKKDTVKKLKEIAFPKAEELKAELLKRYTKEYTEYNEEKKKEAEELARNMAIQQELEKEKQRVAQQKQQQLEQEQFH

SEQ ID NO: 84152 - protein, 137 aa, Homo sapiens
  Payload ID: 16744
  Gene Symbol: STAMBP
  Gene Name: STAM binding protein
  ENSP ID: ENSP00000413291
MSDHGDVSLPPEDRVRALSQLGSAVEVNEDIPPRRYFRSGVEIIRMASIYSEEGNIEHAFILYNKYITLFIEKLPKHRDYKSAVIPEKKDTVKKLKEIAFPKAEELKAELLKRYTKEYTEYNEEKKKEAEELARNMA

SEQ ID NO: 84153 - protein, 318 aa, Homo sapiens
  Payload ID: 16744
  Gene Symbol: STAMBP
  Gene Name: STAM binding protein
  ENSP ID: ENSP00000413874
MSDHGDVSLPPEDRVRALSQLGSAVEVNEDIPPRRYFRSGVEIIRMASIYSEEGNIEHAFILYNKYITLFIEKLPKHRDYKSAVIPEKKDTVKKLKEIAFPKAEELKAELLKRYTKEYTEYNEEKKKEAEELARNMAIQQELEKEKQRVAQQKQQQLEQEQFHAFEEMIRNQELEKERLKIVQEFGKVDPGLGGPLVPDLEKPSLDVFPTLTVSSIQPSDCHTTVRPAKPPVVDRSLKPGALSNSESIPTIDGLRHVVVPGRLCPQFLQLASANTARGVETCGILCGKLMRNEFTITHVLIPKQSAGSDYCNTENEEE

SEQ ID NO: 84154 - protein, 209 aa, Homo sapiens
  Payload ID: 16744
  Gene Symbol: STAMBP
  Gene Name: STAM binding protein
  ENSP ID: ENSP00000443502
MSDHGDVSLPPEDRVRALSQLGSAVEVNEDIPPRRYFRSGVEIIRMASIYSEEGNIEHAFILYNKYITLFIEKLPKHRDYKSAVIPEKKDTVKKLKEIAFPKAEELKAELLKRYTKEYTEYNEEKKKEAEELARNMAIQQELEKEKQRVAQQKQQQLEQEQFHAFEEMIRNQELEKERLKIVQEFGKFPQSMDCAMWWCLGGCAHSFSS

SEQ ID NO: 84155 - protein, 270 aa, Homo sapiens
  Payload ID: 16745
  Gene Symbol: STAMBPL1
  Gene Name: STAM binding protein-like 1
  ENSP ID: ENSP00000360990
MRQQQLESEQFLFFEDQLKKQELARGQMRSQQTSGLSEQIDGSALSCFSTHQNNSLLNVFADQPNKSDATNYASHSPPVNRALTPAATLSAVQNLVVEGLRCVVLPEDLCHKFLQLAESNTVRGIETCGILCGKLTHNEFTITHVIVPKQSAGPDYCDMENVEELFNVQDQHDLLTLGWIHTHPTQTAFLSSVDLHTHCSYQLMLPEAIAIVCSPKHKDTGIFRLTNAGMLEVSACKKKGFHPHTKEPRLFSICKHVLVKDIKIIVLDLR

SEQ ID NO: 84156 - protein, 436 aa, Homo sapiens
  Payload ID: 16745
  Gene Symbol: STAMBPL1
  Gene Name: STAM binding protein-like 1
  Uniprot ID: Q96FJ0
  ENSP ID: ENSP00000360992
MDQPFTVNSLKKLAAMPDHTDVSLSPEERVRALSKLGCNITISEDITPRRYFRSGVEMERMASVYLEEGNLENAFVLYNKFITLFVEKLPNHRDYQQCAVPEKQDIMKKLKEIAFPRTDELKNDLLKKYNVEYQEYLQSKNKYKAEILKKLEHQRLIEAERKRIAQMRQQQLESEQFLFFEDQLKKQELARGQMRSQQTSGLSEQIDGSALSCFSTHQNNSLLNVFADQPNKSDATNYASHSPPVNRALTPAATLSAVQNLVVEGLRCVVLPEDLCHKFLQLAESNTVRGIETCGILCGKLTHNEFTITHVIVPKQSAGPDYCDMENVEELFNVQDQHDLLTLGWIHTHPTQTAFLSSVDLHTHCSYQLMLPEAIAIVCSPKHKDTGIFRLTNAGMLEVSACKKKGFHPHTKEPRLFSICKHVLVKDIKIIVLDLR

SEQ ID NO: 84157 - protein, 436 aa, Homo sapiens; identical to SEQ ID NO: 84156
  Payload ID: 16745
  Gene Symbol: STAMBPL1
  Gene Name: STAM binding protein-like 1
  Uniprot ID: Q96FJ0
  ENSP ID: ENSP00000360994

SEQ ID NO: 84158 - protein, 461 aa, Homo sapiens
  Payload ID: 16745
  Gene Symbol: STAMBPL1
  Gene Name: STAM binding protein-like 1
  Uniprot ID: Q96FJ0
  ENSP ID: ENSP00000360995
MDQPFTVNSLKKLAAMPDHTDVSLSPEERVRALSKLGCNITISEDITPRRYFRSGVEMERMASVYLEEGNLENAFVLYNKFITLFVEKLPNHRDYQQCAVPEKQDIMKKLKEIAFPRTDELKNDLLKKYNVEYQEYLQSKNKYKAEILKKLEHQRLIEAERKRIAQMRQQQLESEQFLFFEDQLKKQELARGQMRSQQTSGLSEQIDGSALSCFSTHQNNSLLNVFADQPNKSDATNYASHSPPVNRALTPAATLSAVQNLVVEGLRCVVLPEDLCHKFLQLAESNTVRGIETCGILCGKLTHNEFTITHVIVPKQSAGPDYCDMENVEELFNVQDQHDLLTLGWIHTHPTQTAFLSSVDLHTHCSYQLMLPEAIAIVCSPKHKDTGIFRLTNAGMLEVSACKKKGFHPHTKEPRLFSIQKFLSGIISGTALEMEPLKIGYGPNGFPLLGISRSSSPSEQL

SEQ ID NO: 84159 - protein, 88 aa, Homo sapiens
  Payload ID: 16746
  Gene Symbol: SNN
  Gene Name: stannin
  Uniprot ID: O75324
  ENSP ID: ENSP00000329287
MSIMDHSPTTGVVTVIVILIAIAALGALILGCWCYLRLQRISQSEDEESIVGDGETKEPFLLVQYSAKGPCVERKAKLMTPNGPEVHG

SEQ ID NO: 84160 - protein, 247 aa, Homo sapiens
  Payload ID: 16747
  Gene Symbol: STC1
  Gene Name: stanniocalcin 1
  Uniprot ID: P52823
  ENSP ID: ENSP00000290271
MLQNSAVLLVLVISASATHEAEQNDSVSPRKSRVAAQNSAEVVRCLNSALQVGCGAFACLENSTCDTDGMYDICKSFLYSAAKFDTQGKAFVKESLKCIANGVTSKVFLAIRRCSTFQRMIAEVQEECYSKLNVCSIAKRNPEAITEVVQLPNHFSNRYYNRLVRSLLECDEDTVSTIRDSLMEKIGPNMASLFHILQTDHCAQTHPRADFNRRRTNEPQKLKVLLRNLRGEEDSPSHIKRTSHESA

SEQ ID NO: 84161 - protein, 178 aa, Homo sapiens
  Payload ID: 16747
  Gene Symbol: STC1
  Gene Name: stanniocalcin 1
  Uniprot ID: P52823
  ENSP ID: ENSP00000427932
MYDICKSFLYSAAKFDTQGKAFVKESLKCIANGVTSKVFLAIRRCSTFQRMIAEVQEECYSKLNVCSIAKRNPEAITEVVQLPNHFSNRYYNRLVRSLLECDEDTVSTIRDSLMEKIGPNMASLFHILQTDHCAQTHPRADFNRRRTNEPQKLKVLLRNLRGEEDSPSHIKRTSHESA

SEQ ID NO: 84162 - protein, 302 aa, Homo sapiens
  Payload ID: 16748
  Gene Symbol: STC2
  Gene Name: stanniocalcin 2
  Uniprot ID: O76061
  ENSP ID: ENSP00000265087
MCAERLGQFMTLALVLATFDPARGTDATNPPEGPQDRSSQQKGRLSLQNTAEIQHCLVNAGDVGCGVFECFENNSCEIRGLHGICMTFLHNAGKFDAQGKSFIKDALKCKAHALRHRFGCISRKCPAIREMVSQLQRECYLKHDLCAAAQENTRVIVEMIHFKDLLLHEPYVDLVNLLLTCGEEVKEAITHSVQVQCEQNWGSLCSILSFCTSAIQKPPTAPPERQPQVDRTKLSRAHHGEAGHHLPEPSSRETGRGAKGERGSKSHPNAHARGRVGGLGAQGPSGSSEWEDEQSEYSDIRR

SEQ ID NO: 84163 - protein, 53 aa, Homo sapiens
  Payload ID: 16748
  Gene Symbol: STC2
  Gene Name: stanniocalcin 2
  ENSP ID: ENSP00000427816
MTFLHNAGKFDAQGKSFIKDALKCKAHALRHRFGCISRKCPAIREMVSQLQRE

SEQ ID NO: 84164 - protein, 123 aa, Homo sapiens
  Payload ID: 16748
  Gene Symbol: STC2
  Gene Name: stanniocalcin 2
  ENSP ID: ENSP00000428470
  MOD_RES (1)..(1): Any amino acid
XQNTAEIQHCLVNAGDVGCGVFECFENNSCEIRGLHGICMTFLHNAGKFDAQGKSFIKDALKCKAHALRHRFGCISRKCPAIREMVSQLQRECYLKHDLCAAAQENTRVIVEMIHFKDLLLHE

SEQ ID NO: 84165 - protein, 910 aa, Homo sapiens
  Payload ID: 16749
  Gene Symbol: SND1
  Gene Name: staphylococcal nuclease and tudor domain containing 1
  Uniprot ID: Q7KZF4
  ENSP ID: ENSP00000346762
MASSAQSGGSSGGPAVPTVQRGIIKMVLSGCAIIVRGQPRGGPPPERQINLSNIRAGNLARRAAATQPDAKDTPDEPWAFPAREFLRKKLIGKEVCFTIENKTPQGREYGMIYLGKDTNGENIAESLVAEGLATRREGMRANNPEQNRLSECEEQAKAAKKGMWSEGNGSHTIRDLKYTIENPRHFVDSHHQKPVNAIIEHVRDGSVVRALLLPDYYLVTVMLSGIKCPTFRREADGSETPEPFAAEAKFFTESRLLQRDVQIILESCHNQNILGTILHPNGNITELLLKEGFARCVDWSIAVYTRGAEKLRAAERFAKERRLRIWRDYVAPTANLDQKDKQFVAKVMQVLNADAIVVKLNSGDYKTIHLSSIRPPRLEGENTQDKNKKLRPLYDIPYMFEAREFLRKKLIGKKVNVTVDYIRPASPATETVPAFSERTCATVTIGGINIAEALVSKGLATVIRYRQDDDQRSSHYDELLAAEARAIKNGKGLHSKKEVPIHRVADISGDTQKAKQFLPFLQRAGRSEAVVEYVFSGSRLKLYLPKETCLITFLLAGIECPRGARNLPGLVQEGEPFSEEATLFTKELVLQREVEVEVESMDKAGNFIGWLHIDGANLSVLLVEHALSKVHFTAERSSYYKSLLSAEEAAKQKKEKVWAHYEEQPVEEVMPVLEEKERSASYKPVFVTEITDDLHFYVQDVETGTQLEKLMENMRNDIASHPPVEGSYAPRRGEFCIAKFVDGEWYRARVEKVESPAKIHVFYIDYGNREVLPSTRLGTLSPAFSTRVLPAQATEYAFAFIQVPQDDDARTDAVDSVVRDIQNTQCLLNVEHLSAGCPHVTLQFADSKGDVGLGLVKEGLVMVEVRKEKQFQKVITEYLNAQESAKSARLNLWRYGDFRADDADEFGYSR

SEQ ID NO: 84166 - protein, 231 aa, Homo sapiens
  Payload ID: 16749
  Gene Symbol: SND1
  Gene Name: staphylococcal nuclease and tudor domain containing 1
  ENSP ID: ENSP00000419327
EALVSKGLATVIRYRQDDDQRSSHYDELLAAEARAIKNGKGLHSKKEVPIHRVADISGDTQKAKQFLPFLQRAGRSEAVVEYVFSGSRLKLYLPKETCLITFLLAGIECPRGARNLPGLVQEGEPFSEEATLFTKELVLQREVWAHYEEQPVEEVMPVLEEKERSASYKPVFVTEITDDLHFYVQDVETGTQLEKLMENMRNDIASHPPVEGSYAPRRGEFCIAKFVDGEW

SEQ ID NO: 84167 - protein, 358 aa, Homo sapiens
  Payload ID: 16750
  Gene Symbol: STBD1
  Gene Name: starch binding domain 1
  Uniprot ID: O95210
  ENSP ID: ENSP00000237642
MGAVWSALLVGGGLAGALFVWLLRGGPGDTGKDGDAEQEKDAPLGGAAIPGGHQSGSSGLSPGPSGQELVTKPEHLQESNGHLISKTKDLGKLQAASWRLQNPSREVCDNSREHVPSGQFPDTEAPATSETSNSRSYSEVSRNESLESPMGEWGFQKGQEISAKAATCFAEKLPSSNLLKNRAKEEMSLSDLNSQDRVDHEEWEMVPRHSSWGDVGVGGSLKAPVLNLNQGMDNGRSTLVEARGQQVHGKMERVAVMPAGSQQVSVRFQVHYVTSTDVQFIAVTGDHECLGRWNTYIPLHYNKDGFWSHSIFLPADTVVEWKFVLVENGGVTRWEECSNRFLETGHEDKVVHAWWGIH

SEQ ID NO: 84168 - protein, 234 aa, Homo sapiens
  Payload ID: 16751
  Gene Symbol: STARD3NL
  Gene Name: STARD3 N-terminal like
  Uniprot ID: O95772
  ENSP ID: ENSP00000009041
MNHLPEDMENALTGSQSSHASLRNIHSINPTQLMARIESYEGREKKGISDVRRTFCLFVTFDLLFVTLLWIIELNVNGGIENTLEKEVMQYDYYSSYFDIFLLAVFRFKVLILAYAVCRLRHWWAIALTTAVTSAFLLAKVILSKLFSQGAFGYVLPIISFILAWIETWFLDFKVLPQEAEEENRLLIVQDASERAALIPGGLSDGQFYSPPESEAGSEEAEEKQDSEKPLLEL

SEQ ID NO: 84169 - protein, 234 aa, Homo sapiens; identical to SEQ ID NO: 84168
  Payload ID: 16751
  Gene Symbol: STARD3NL
  Gene Name: STARD3 N-terminal like
  Uniprot ID: O95772
  ENSP ID: ENSP00000379334

SEQ ID NO: 84170 - protein, 216 aa, Homo sapiens
  Payload ID: 16751
  Gene Symbol: STARD3NL
  Gene Name: STARD3 N-terminal like
  ENSP ID: ENSP00000394000
MNHLPEDMENALTGSQSSHASLRNIHSINPTQLMARIESYEGREKKGISDVRRTFCLFVTFDLLFVTLLWIIELNVNGGIENTLEKEVMQYDYYSSYFDIFLLAVFRFKVLILAYAVCRLRHWWAIALFSQGAFGYVLPIISFILAWIETWFLDFKVLPQEAEEENRLLIVQDASERAALIPGGLSDGQFYSPPESEAGSEEAEEKQDSEKPLLEL

SEQ ID NO: 84171 - protein, 172 aa, Homo sapiens
  Payload ID: 16751
  Gene Symbol: STARD3NL
  Gene Name: STARD3 N-terminal like
  ENSP ID: ENSP00000395455
MNHLPEDMENALTGSQSSHASLRNIHSINPTQLMARIESYEGREKKGISDVRRTFCLFVTFDLLFVTLLWIIELNVNGGIENTLEKEVMQYDYYSSYFDIFLLAVFRFKVLILAYAVCRLRHWWAIALTTAVTSAFLLAKVILSKLFSQGAFGYVLPIISFILAWIETWFLD

SEQ ID NO: 84172 - protein, 206 aa, Homo sapiens
  Payload ID: 16751
  Gene Symbol: STARD3NL
  Gene Name: STARD3 N-terminal like
  ENSP ID: ENSP00000402028
MNHLPEDMENALTGSQSSHASLRNIHSINPTQLMARIESYEGREKKGISDVRRTFCLFVTFDLLFVTLLWIIELNVNGGIENTLEKEVMQYDYYSSYFDIFLLAVFRFKVLILAYAVCRLRHWWAIALTTAVTSAFLLAKVILSKLFSQGAFGYVLPIISFILAWIETWFLDFKVLPQEAEEENRLLIVQDASERAALIPGGLSDG

SEQ ID NO: 84173 - protein, 184 aa, Homo sapiens
  Payload ID: 16751
  Gene Symbol: STARD3NL
  Gene Name: STARD3 N-terminal like
  ENSP ID: ENSP00000411933
MNHLPEDMENALTGSQSSHASLRNIHSINPTQLMARIESYEGREKKGISDVRRTFCLFVTFDLLFVTLLWIIELNVNGGIENTLEKEVMQYDYYSSYFDIFLLAVFRFKVLILAYAVCRLRHWWAIALTTAVTSAFLLAKVILSKLFSQGAFGYVLPIISFILAWIETWFLDFKVLPQEAEEEN

SEQ ID NO: 84174 - protein, 291 aa, Homo sapiens
  Payload ID: 16752
  Gene Symbol: STARD10
  Gene Name: StAR-related lipid transfer (START) domain containing 10
  Uniprot ID: Q9Y365
  ENSP ID: ENSP00000335247
MEKLAASTEPQGPRPVLGRESVQVPDDQDFRSFRSECEAEVGWNLTYSRAGVSVWVQAVEMDRTLHKIKCRMECCDVPAETLYDVLHDIEYRKKWDSNVIETFDIARLTVNADVGYYSWRCPKPLKNRDVITLRSWLPMGADYIIMNYSVKHPKYPPRKDLVRAVSIQTGYLIQSTGPKSCVITYLAQVDPKGSLPKWVVNKSSQFLAPKAMKKMYKACLKYPEWKQKHLPHFKPWLHPEQSPLPSLALSELSVQHADSLENIDESAVAESREERMGGAGGEGSDDDTSLT

SEQ ID NO: 84175 - protein, 169 aa, Homo sapiens
  Payload ID: 16752
  Gene Symbol: STARD10
  Gene Name: StAR-related lipid transfer (START) domain containing 10
  ENSP ID: ENSP00000438357
CRMECCDVPAETLYDVLHDIEYRKKWDSNVIETFDIARLTVNADVGYYSWRCPKPLKNRDVITLRSWLPMGADYIIMNYSVKHPKYPPRKDLVRAVSIQTGYLIQSTGPKSCVITYLAQVDPKGSLPKWVVNKSSQFLAPKPWLHPEQSPLPSLALSELSVQHADSLEN

SEQ ID NO: 84176 - protein, 291 aa, Homo sapiens; identical to SEQ ID NO: 84174
  Payload ID: 16752
  Gene Symbol: STARD10
  Gene Name: StAR-related lipid transfer (START) domain containing 10
  Uniprot ID: Q9Y365
  ENSP ID: ENSP00000438792

SEQ ID NO: 84177 - protein, 131 aa, Homo sapiens
  Payload ID: 16752
  Gene Symbol: STARD10
  Gene Name: StAR-related lipid transfer (START) domain containing 10
  ENSP ID: ENSP00000438924
MEKLAASTEPQGPRPVLGRESVQVPDDQDFRSFRSECEAEVGWNLTYSRAGVSVWVQAVEMDRTLHKIKPPAGTQDCGWQILKAGLQYPCLAQSQATGQAWGLGPWERISPRGPDGAGAREDSGLRASIAA

SEQ ID NO: 84178 - protein, 245 aa, Homo sapiens
  Payload ID: 16752
  Gene Symbol: STARD10
  Gene Name: StAR-related lipid transfer (START) domain containing 10
  ENSP ID: ENSP00000440016
MEKLAASTEPQGPRPVLGRESVQCRMECCDVPAETLYDVLHDIEYRKKWDSNVIETFDIARLTVNADVGYYSWRCPKPLKNRDVITLRSWLPMGADYIIMNYSVKHPKYPPRKDLVRAVSIQTGYLIQSTGPKSCVITYLAQVDPKGSLPKWVVNKSSQFLAPKAMKKMYKACLKYPEWKQKHLPHFKPWLHPEQSPLPSLALSELSVQHADSLENIDESAVAESREERMGGAGGEGSDDDTSLT

SEQ ID NO: 84179 - protein, 11 aa, Homo sapiens
  Payload ID: 16752
  Gene Symbol: STARD10
  Gene Name: StAR-related lipid transfer (START) domain containing 10
  ENSP ID: ENSP00000440302
MEKLAASTEPQ

SEQ ID NO: 84180 - protein, 58 aa, Homo sapiens
  Payload ID: 16752
  Gene Symbol: STARD10
  Gene Name: StAR-related lipid transfer (START) domain containing 10
  ENSP ID: ENSP00000440924
MEKLAASTEPQGPRPVLGRESVQCRMECCDVPAETLYDVLHDIEYRKKWDSNVIETFD

SEQ ID NO: 84181 - protein, 82 aa, Homo sapiens
  Payload ID: 16752
  Gene Symbol: STARD10
  Gene Name: StAR-related lipid transfer (START) domain containing 10
  ENSP ID: ENSP00000441589
MEKLAASTEPQGPRPVLGRESVQVPDDQDFRSFRSECEAECRMECCDVPAETLYDVLHDIEYRKKWDSNVIETFDIARLTVN

SEQ ID NO: 84182 - protein, 150 aa, Homo sapiens
  Payload ID: 16752
  Gene Symbol: STARD10
  Gene Name: StAR-related lipid transfer (START) domain containing 10
  ENSP ID: ENSP00000442414
CRMECCDVPAETLYDVLHDIEYRKKWDSNVIETFDIARLTVNADVGYYSWRCPKPLKNRDVITLRSWLPMGADYIIMNYSVKHPKYPPRKDLVRAVSIQTGYLIQSTGPKSCVITYLAQVDPKGHEEDVQGVPQVPRVETEAPASLQAVA

SEQ ID NO: 84183 - protein, 89 aa, Homo sapiens
  Payload ID: 16752
  Gene Symbol: STARD10
  Gene Name: StAR-related lipid transfer (START) domain containing 10
  ENSP ID: ENSP00000443523
MEKLAASTEPQGPRPVLGRESVQVPDDQDFRSFRSECEAEVGWNLTYSRAGVSVWVQAVEMDRTLHKIKCRMECCDVPAETLYDVLHDI

SEQ ID NO: 84184 - protein, 262 aa, Homo sapiens
  Payload ID: 16752
  Gene Symbol: STARD10
  Gene Name: StAR-related lipid transfer (START) domain containing 10
  ENSP ID: ENSP00000443548
MEKLAASTEPQGPRPVLGRESVQVPDDQDFRSFRSECEAECRMECCDVPAETLYDVLHDIEYRKKWDSNVIETFDIARLTVNADVGYYSWRCPKPLKNRDVITLRSWLPMGADYIIMNYSVKHPKYPPRKDLVRAVSIQTGYLIQSTGPKSCVITYLAQVDPKGSLPKWVVNKSSQFLAPKAMKKMYKACLKYPEWKQKHLPHFKPWLHPEQSPLPSLALSELSVQHADSLENIDESAVAESREERMGGAGGEGSDDDTSLT

SEQ ID NO: 84185 - protein, 191 aa, Homo sapiens
  Payload ID: 16752
  Gene Symbol: STARD10
  Gene Name: StAR-related lipid transfer (START) domain containing 10
  ENSP ID: ENSP00000443597
MEKLAASTEPQGPRPVLGRESVQVPDDQDFRSFRSECEAEVGWNLTYSRAGVSVWVQAVEMDRTLHKIKCRMECCDVPAETLYDVLHDIEYRKKWDSNVIETFDIARLTVNADVGYYSWRCPKPLKNRDVITLRSWLPMGADYIIMNYSVKHPKYPPRKDLVRAVSIQTGYLIQSTGPKSCVITYLAQVDP

SEQ ID NO: 84186 - protein, 121 aa, Homo sapiens
  Payload ID: 16752
  Gene Symbol: STARD10
  Gene Name: StAR-related lipid transfer (START) domain containing 10
  ENSP ID: ENSP00000444027
  MOD_RES (1)..(1): Any amino acid
XYPPRKDLVRAVSIQTGYLIQSTGPKSCVITYLAQVDPKGSLPKWVVNKSSQFLAPKVSGLGILGRGVEDWKEDYGMRWVESSLEPEGQAWWLMPVIPALWEALAGGLPEVGSSRPAWPTW

SEQ ID NO: 84187 - protein, 252 aa, Homo sapiens
  Payload ID: 16752
  Gene Symbol: STARD10
  Gene Name: StAR-related lipid transfer (START) domain containing 10
  ENSP ID: ENSP00000445657
MEKLAASTEPQGPRPVLGRESVQVPDDQDFRSFRSECEAEVGWNLTYSRAGVSVWVQAVEMDRTLHKIKCRMECCDVPAETLYDVLHDIEYRKKWDSNVIETFDIARLTVNADVGYYSWRCPKPLKNRDVITLRSWLPMGADYIIMNYSVKHPKYPPRKDLVRAVSIQTGYLIQSTGPKSCVITYLAQVDPKGSLPKWVVNKSSQFLAPKAMKKMYKACLKYPEWKQKHLPHFKPWLHPEQSPLPSLALSEL

SEQ ID NO: 84188 - protein, 142 aa, Homo sapiens
  Payload ID: 16752
  Gene Symbol: STARD10
  Gene Name: StAR-related lipid transfer (START) domain containing 10
  ENSP ID: ENSP00000445708
KWDSNVIETFDIARLTVNADVGYYSWRCPKPLKNRDVITLRSWLPMGADYIIMNYSVKHPKYPPRKDLVRAVSIQTGYLIQSTGPKSCVITYLAQVDPKGSLPKWVVNKSSQFLAPKAMKKMYKAGAAAWLDRAPINDPTAS

SEQ ID NO: 84189 - protein, 137 aa, Homo sapiens
  Payload ID: 16752
  Gene Symbol: STARD10
  Gene Name: StAR-related lipid transfer (START) domain containing 10
  ENSP ID: ENSP00000445886
MEKLAASTEPQGPRPVLGRESVQVPDDQDFRSFRSECEAEVGWNLTYSRAGVSVWVQAVEMDRTLHKIKCRMECCDVPAETLYDVLHDIEYRKKWDSNVIETFDIARLTVNADVGYYSWRCPKPLKNRDVITLRSWL

SEQ ID NO: 84190 - protein, 359 aa, Homo sapiens
  Payload ID: 16752
  Gene Symbol: STARD10
  Gene Name: StAR-related lipid transfer (START) domain containing 10
  ENSP ID: ENSP00000481224
MSTRAKKLRRIWRILEEEESVAGAVQTLLLRSQEGGVASAAASTLSEPPRRTQESRTRTRALGLPTLPMEKLAASTEPQGPRPVLGRESVQVPDDQDFRSFRSECEAEVGWNLTYSRAGVSVWVQAVEMDRTLHKIKCRMECCDVPAETLYDVLHDIEYRKKWDSNVIETFDIARLTVNADVGYYSWRCPKPLKNRDVITLRSWLPMGADYIIMNYSVKHPKYPPRKDLVRAVSIQTGYLIQSTGPKSCVITYLAQVDPKGSLPKWVVNKSSQFLAPKAMKKMYKACLKYPEWKQKHLPHFKPWLHPEQSPLPSLALSELSVQHADSLENIDESAVAESREERMGGAGGEGSDDDTSLT

SEQ ID NO: 84191 - protein, 1105 aa, Homo sapiens
  Payload ID: 16753
  Gene Symbol: STARD13
  Gene Name: StAR-related lipid transfer (START) domain containing 13
  Uniprot ID: Q9Y3M8
  ENSP ID: ENSP00000255486
MLEPSSVLHANVNQAPLWCLVLRWCRECKDTVCGGKQKSRVNHTFQRREIEAKEACDWLRAAGFPQYAQLYEDSQFPINIVAVKNDHDFLEKDLVEPLCRRLNTLNKCASMKLDVNFQRKKGDDSDEEDLCISNKWTFQRTSRRWSRVDDLYTLLPRGDRNGSPGGTGMRNTTSSESVLTDLSEPEVCSIHSESSGGSDSRSQPGQCCTDNPVMLDAPLVSSSLPQPPRDVLNHPFHPKNEKPTRARAKSFLKRMETLRGKGAHGRHKGSGRTGGLVISGPMLQQEPESFKAMQCIQIPNGDLQNSPPPACRKGLPCSGKSSGESSPSEHSSSGVSTPCLKERKCHEANKRGGMYLEDLDVLAGTALPDAGDQSRMHEFHSQENLVVHIPKDHKPGTFPKALSIESLSPTDSSNGVNWRTGSISLGREQVPGAREPRLMASCHRASRVSIYDNVPGSHLYASTGDLLDLEKDDLFPHLDDILQHVNGLQEVVDDWSKDVLPELQTHDTLVGEPGLSTFPSPNQITLDFEGNSVSEGRTTPSDVERDVTSLNESEPPGVRDRRDSGVGASLTRPNRRLRWNSFQLSHQPRPAPASPHISSQTASQLSLLQRFSLLRLTAIMEKHSMSNKHGWTWSVPKFMKRMKVPDYKDKAVFGVPLIVHVQRTGQPLPQSIQQALRYLRSNCLDQVGLFRKSGVKSRIHALRQMNENFPENVNYEDQSAYDVADMVKQFFRDLPEPLFTNKLSETFLHIYQYVSKEQRLQAVQAAILLLADENREVLQTLLCFLNDVVNLVEENQMTPMNLAVCLAPSLFHLNLLKKESSPRVIQKKYATGKPDQKDLNENLAAAQGLAHMIMECDRLFEVPHELVAQSRNSYVEAEIHVPTLEELGTQLEESGATFHTYLNHLIQGLQKEAKEKFKGWVTCSSTDNTDLAFKKVGDGNPLKLWKASVEVEAPPSVVLNRVLRERHLWDEDFVQWKVVETLDRQTEIYQYVLNSMAPHPSRDFVVLRTWKTDLPKGMCTLVSLSVEHEEAQLLGGVRAVVMDSQYLIEPCGSGKSRLTHICRIDLKGHSPEWYSKGFGHLCAAEVARIRNSFQPLIAEGPETKI

SEQ ID NO: 84192 - protein, 1113 aa, Homo sapiens
  Payload ID: 16753
  Gene Symbol: STARD13
  Gene Name: StAR-related lipid transfer (START) domain containing 13
  Uniprot ID: Q9Y3M8
  ENSP ID: ENSP00000338785
MFSQVPRTPASGCYYLNSMTPEGQEMYLRFDQTTRRSPYRMSRILARHQLVTKIQQEIEAKEACDWLRAAGFPQYAQLYEDSQFPINIVAVKNDHDFLEKDLVEPLCRRLNTLNKCASMKLDVNFQRKKGDDSDEEDLCISNKWTFQRTSRRWSRVDDLYTLLPRGDRNGSPGGTGMRNTTSSESVLTDLSEPEVCSIHSESSGGSDSRSQPGQCCTDNPVMLDAPLVSSSLPQPPRDVLNHPFHPKNEKPTRARAKSFLKRMETLRGKGAHGRHKGSGRTGGLVISGPMLQQEPESFKAMQCIQIPNGDLQNSPPPACRKGLPCSGKSSGESSPSEHSSSGVSTPCLKERKCHEANKRGGMYLEDLDVLAGTALPDAGDQSRMHEFHSQENLVVHIPKDHKPGTFPKALSIESLSPTDSSNGVNWRTGSISLGREQVPGAREPRLMASCHRASRVSIYDNVPGSHLYASTGDLLDLEKDDLFPHLDDILQHVNGLQEVVDDWSKDVLPELQTHDTLVGEPGLSTFPSPNQITLDFEGNSVSEGRTTPSDVERDVTSLNESEPPGVRDRRDSGVGASLTRPNRRLRWNSFQLSHQPRPAPASPHISSQTASQLSLLQRFSLLRLTAIMEKHSMSNKHGWTWSVPKFMKRMKVPDYKDKAVFGVPLIVHVQRTGQPLPQSIQQALRYLRSNCLDQVGLFRKSGVKSRIHALRQMNENFPENVNYEDQSAYDVADMVKQFFRDLPEPLFTNKLSETFLHIYQYVSKEQRLQAVQAAILLLADENREVLQTLLCFLNDVVNLVEENQMTPMNLAVCLAPSLFHLNLLKKESSPRVIQKKYATGKPDQKDLNENLAAAQGLAHMIMECDRLFEVPHELVAQSRNSYVEAEIHVPTLEELGTQLEESGATFHTYLNHLIQGLQKEAKEKFKGWVTCSSTDNTDLAFKKVGDGNPLKLWKASVEVEAPPSVVLNRVLRERHLWDEDFVQWKVVETLDRQTEIYQYVLNSMAPHPSRDFVVLRTWKTDLPKGMCTLVSLSVEHEEAQLLGGVRAVVMDSQYLIEPCGSGKSRLTHICRIDLKGHSPEWYSKGFGHLCAAEVARIRNSFQPLIAEGPETKI

SEQ ID NO: 84193 - protein, 995 aa, Homo sapiens
  Payload ID: 16753
  Gene Symbol: STARD13
  Gene Name: StAR-related lipid transfer (START) domain containing 13
  Uniprot ID: Q9Y3M8
  ENSP ID: ENSP00000382300
MKLDVNFQRKKGDDSDEEDLCISNKWTFQRTSRRWSRVDDLYTLLPRGDRNGSPGGTGMRNTTSSESVLTDLSEPEVCSIHSESSGGSDSRSQPGQCCTDNPVMLDAPLVSSSLPQPPRDVLNHPFHPKNEKPTRARAKSFLKRMETLRGKGAHGRHKGSGRTGGLVISGPMLQQEPESFKAMQCIQIPNGDLQNSPPPACRKGLPCSGKSSGESSPSEHSSSGVSTPCLKERKCHEANKRGGMYLEDLDVLAGTALPDAGDQSRMHEFHSQENLVVHIPKDHKPGTFPKALSIESLSPTDSSNGVNWRTGSISLGREQVPGAREPRLMASCHRASRVSIYDNVPGSHLYASTGDLLDLEKDDLFPHLDDILQHVNGLQEVVDDWSKDVLPELQTHDTLVGEPGLSTFPSPNQITLDFEGNSVSEGRTTPSDVERDVTSLNESEPPGVRDRRDSGVGASLTRPNRRLRWNSFQLSHQPRPAPASPHISSQTASQLSLLQRFSLLRLTAIMEKHSMSNKHGWTWSVPKFMKRMKVPDYKDKAVFGVPLIVHVQRTGQPLPQSIQQALRYLRSNCLDQVGLFRKSGVKSRIHALRQMNENFPENVNYEDQSAYDVADMVKQFFRDLPEPLFTNKLSETFLHIYQYVSKEQRLQAVQAAILLLADENREVLQTLLCFLNDVVNLVEENQMTPMNLAVCLAPSLFHLNLLKKESSPRVIQKKYATGKPDQKDLNENLAAAQGLAHMIMECDRLFEVPHELVAQSRNSYVEAEIHVPTLEELGTQLEESGATFHTYLNHLIQGLQKEAKEKFKGWVTCSSTDNTDLAFKKVGDGNPLKLWKASVEVEAPPSVVLNRVLRERHLWDEDFVQWKVVETLDRQTEIYQYVLNSMAPHPSRDFVVLRTWKTDLPKGMCTLVSLSVEHEEAQLLGGVRAVVMDSQYLIEPCGSGKSRLTHICRIDLKGHSPEWYSKGFGHLCAAEVARIRNSFQPLIAEGPETKI

SEQ ID NO: 84194 - protein, 606 aa, Homo sapiens
  Payload ID: 16753
  Gene Symbol: STARD13
  Gene Name: StAR-related lipid transfer (START) domain containing 13
  ENSP ID: ENSP00000456233
MTSKRKPCQTQLRRSISEQLRDSTARAWDLLWKNVRERRLAEIEAKEACDWLRAAGFPQYAQLYEDSQFPINIVAVKNDHDFLEKDLVEPLCRRLNTLNKCASMKLDVNFQRKKGDDSDEEDLCISNKWTFQRTSRRWSRVDDLYTLLPRGDRNGSPGGTGMRNTTSSESVLTDLSEPEVCSIHSESSGGSDSRSQPGQCCTDNPVMLDAPLVSSSLPQPPRDVLNHPFHPKNEKPTRARAKSFLKRMETLRGKGAHGRHKGSGRTGGLVISGPMLQQEPESFKAMQCIQIPNGDLQNSPPPACRKGLPCSGKSSGESSPSEHSSSGVSTPCLKERKCHEANKRGGMYLEDLDVLAGTALPDAGDQSRMHEFHSQENLVVHIPKDHKPGTFPKALSIESLSPTDSSNGVNWRTGSISLGREQVPGAREPRLMASCHRASRVSIYDNVPGSHLYASTGDLLDLEKDDLFPHLDDILQHVNGLQEVVDDWSKDVLPELQTHDTLVGEPGLSTFPSPNQITLDFEGNSVSEGRTTPSDVERDVTSLNESEPPGVRDRRDSGVGASLTRPNRRLRWNSFQLSHQPRPAPASPHISSQTASQLSLLQRFSL

SEQ ID NO: 84195 - protein, 63 aa, Homo sapiens
  Payload ID: 16753
  Gene Symbol: STARD13
  Gene Name: StAR-related lipid transfer (START) domain containing 13
  ENSP ID: ENSP00000457840
MTSKRKPCQTQLRRSISEQLRDSTARAWDLLWKNVRERRLAGLSLELGSDHHMGQKKVLEKKV

SEQ ID NO: 84196 - protein, 445 aa, Homo sapiens
  Payload ID: 16754
  Gene Symbol: STARD3
  Gene Name: StAR-related lipid transfer (START) domain containing 3
  Uniprot ID: Q14849
  ENSP ID: ENSP00000337446
MSKLPRELTRDLERSLPAVASLGSSLSHSQSLSSHLLPPPEKRRAISDVRRTFCLFVTFDLLFISLLWIIELNTNTGIRKNLEQEIIQYNFKTSFFDIFVLAFFRFSGLLLGYAVLRLRHWWVIAVTTLVSSAFLIVKVILSELLSKGAFGYLLPIVSFVLAWLETWFLDFKVLPQEAEEERWYLAAQVAVARGPLLFSGALSEGQFYSPPESFAGSDNESDEEVAGKKSFSAQEREYIRQGKEATAVVDQILAQEENWKFEKNNEYGDTVYTIEVPFHGKTFILKTFLPCPAELVYQEVILQPERMVLWNKTVTACQILQRVEDNTLISYDVSAGAAGGVVSPRDFVNVRRIERRRDRYLSSGIATSHSAKPPTHKYVRGENGPGGFIVLKSASNPRVCTFVWILNTDLKGRLPRYLIHQSLAATMFEFAFHLRQRISELGARA

SEQ ID NO: 84197 - protein, 427 aa, Homo sapiens
  Payload ID: 16754
  Gene Symbol: STARD3
  Gene Name: StAR-related lipid transfer (START) domain containing 3
  Uniprot ID: Q14849
  ENSP ID: ENSP00000377794
MSKLPRELTRDLERSLPAVASLGSSLSHSQSLSSHLLPPPEKRRAISDVRRTFCLFVTFDLLFISLLWIIELNTNTGIRKNLEQEIIQYNFKTSFFDIFVLAFFRFSGLLLGYAVLRLRHWWVIALLSKGAFGYLLPIVSFVLAWLETWFLDFKVLPQEAEEERWYLAAQVAVARGPLLFSGALSEGQFYSPPESFAGSDNESDEEVAGKKSFSAQEREYIRQGKEATAVVDQILAQEENWKFEKNNEYGDTVYTIEVPFHGKTFILKTFLPCPAELVYQEVILQPERMVLWNKTVTACQILQRVEDNTLISYDVSAGAAGGVVSPRDFVNVRRIERRRDRYLSSGIATSHSAKPPTHKYVRGENGPGGFIVLKSASNPRVCTFVWILNTDLKGRLPRYLIHQSLAATMFEFAFHLRQRISELGARA

SEQ ID NO: 84198 - protein, 196 aa, Homo sapiens
  Payload ID: 16754
  Gene Symbol: STARD3
  Gene Name: StAR-related lipid transfer (START) domain containing 3
  ENSP ID: ENSP00000411710
MSKLPRELTRDLERSLPAVASLGSSLSHSQSLSSHLLPPPEKRRAISDVRRTFCLFVTFDLLFISLLWIIELNTNTGIRKNLEQEIIQYNFKTSFFDIFVLAFFRFSGLLLGYAVLRLRHWWVIAVTTLVSSAFLIVKVILSELLSKGAFGYLLPIVSFVLAWLETWFLDFKVLPQEAEEERWYLAAQVAVARGPL

SEQ ID NO: 84199 - protein, 445 aa, Homo sapiens
  Payload ID: 16754
  Gene Symbol: STARD3
  Gene Name: StAR-related lipid transfer (START) domain containing 3
  Uniprot ID: Q14849
  ENSP ID: ENSP00000439869
MSKLPRELTRDLERSLPAVASLGSSLSHSQSLSSHLLPPPEKRRAISDVRRTFCLFVTFDLLFISLLWIIELNTNTGIRKNLEQEIIQYNFKTSFFDIFVLAFFRFSGLLLGYAVLRLRHWSRRWCPVHSSLSRSSSLSCSAKGHLATCSPSSLLSSPGWRPGSLTSKSYPRKLKRSDSAPPGYLAAQVAVARGPLLFSGALSEGQFYSPPESFAGSDNESDEEVAGKKSFSAQEREYIRQGKEATAVVDQILAQEENWKFEKNNEYGDTVYTIEVPFHGKTFILKTFLPCPAELVYQEVILQPERMVLWNKTVTACQILQRVEDNTLISYDVSAGAAGGVVSPRDFVNVRRIERRRDRYLSSGIATSHSAKPPTHKYVRGENGPGGFIVLKSASNPRVCTFVWILNTDLKGRLPRYLIHQSLAATMFEFAFHLRQRISELGARA

SEQ ID NO: 84200 - protein, 111 aa, Homo sapiens
  Payload ID: 16754
  Gene Symbol: STARD3
  Gene Name: StAR-related lipid transfer (START) domain containing 3
  ENSP ID: ENSP00000462483
MSKLPRELTRDLERSLPAVASLGSSLSHSQSLSSHLLPPPEKRRAISDVRRTFCLFVTFDLLFISLLWIIELNTNTGIRKNLEQEIIQYNFKTSFFDIFVLAFFRFSGLLL

SEQ ID NO: 84201 - protein, 88 aa, Homo sapiens
  Payload ID: 16754
  Gene Symbol: STARD3
  Gene Name: StAR-related lipid transfer (START) domain containing 3
  ENSP ID: ENSP00000462541
MSKLPRELTRDLERSLPAVASLGSSLSHSQSLSSHLLPPPEKRRAISDVRRTFCLFVTFDLLFISLLWIIELNTNTGIRKNLEQEIIQ

SEQ ID NO: 84202 - protein, 118 aa, Homo sapiens
  Payload ID: 16754
  Gene Symbol: STARD3
  Gene Name: StAR-related lipid transfer (START) domain containing 3
  ENSP ID: ENSP00000462859
MSKLPRELTRDLERSLPAVASLGSSLSHSQSLSSHLLPPPEKRRAISDVRRTFCLFVTFDLLFISLLWIIELNTNTGIRKNLEQEIIQYNFKTSFFDIFVLAFFRFSGLLLGYAVLRL

SEQ ID NO: 84203 - protein, 156 aa, Homo sapiens
  Payload ID: 16754
  Gene Symbol: STARD3
  Gene Name: StAR-related lipid transfer (START) domain containing 3
  ENSP ID: ENSP00000463460
MSKLPRELTRDLERSLPAVASLGSSLSHSQSLSSHLLPPPEKRRAISDVRRTFCLFVTFDLLFISLLWIIELNTNTGIRKNLEQEIIQYNFKTSFFDIFVLAFFRFSGLLLGYAVLRLRHWSRRWCPVHSSLSRSSSLSCSAKGHLATCSPSSLLS

SEQ ID NO: 84204 - protein, 475 aa, Homo sapiens
  Payload ID: 16754
  Gene Symbol: STARD3
  Gene Name: StAR-related lipid transfer (START) domain containing 3
  ENSP ID: ENSP00000463613
MSKLPRELTRDLERSLPAVASLGSSLSHSQSLSSHLLPPPEKRRAISDVRRTFCLFVTFDLLFISLLWIIELNVLAFFRFSGLLLGYAVLRLRHWWVIAVTTLVSSAFLIVKVILSELLSKGAFGYLLPIVSFVLAWLETWFLDFKVLPQEAEEERWYLAAQVAVARGPLLFSGALSEGQFYSPPESFAGSDNESDEEVAGKKSFSAQEREYIRQGKEATAVVDQILAQEENWKFEKNNEYGDTVYTIEVPFHGKTFILKTFLPCPAELVYQEVILQPERMVLWNKTVTACQILQRVEDNTLISYDVSAGAAGGVVSPRDFVNVRRIERRRDRYLSSGIATSHSAKPPTHKYVRGENGPGGFIVLKSASNPRVCTFVWILNTDLKVGCWGAARAACPGTSSTRASRPPCLNLPFTCDSASASWGPGRDCAPSHPAGQGPVATTSRARKGASWARTAHMGPGPRLSPSTEPRSAWS

SEQ ID NO: 84205 - protein, 161 aa, Homo sapiens
  Payload ID: 16754
  Gene Symbol: STARD3
  Gene Name: StAR-related lipid transfer (START) domain containing 3
  ENSP ID: ENSP00000463681
MSKLPRELTRDLERSLPAVASLGSSLSHSQSLSSHLLPPPEKRRAISDVRRTFCLFVTFDLLFISLLWIIELNTNTGIRKNLEQEIIQYNFKTSFFDIFVLAFFRFSGLLLGYAVLRLRHWWVIAVTTLVSSAFLIVKVILSELLSKGAFGYLLPIVSFVL

SEQ ID NO: 84206 - protein, 117 aa, Homo sapiens
  Payload ID: 16754
  Gene Symbol: STARD3
  Gene Name: StAR-related lipid transfer (START) domain containing 3
  ENSP ID: ENSP00000464204
MSKLPRELTRDLERSLPAVASLGSSLSHSQSLSSHLLPPPEKRRAISDVRRTFCLFVTFDLLFISLLWIIELNTNTGIRKNLEQEIIQYNFKTSFFDIFVLAFFRFSGLLLGYAVLR

SEQ ID NO: 84207 - protein, 62 aa, Homo sapiens
  Payload ID: 16754
  Gene Symbol: STARD3
  Gene Name: StAR-related lipid transfer (START) domain containing 3
  ENSP ID: ENSP00000464288
  MOD_RES (1)..(1): Any amino acid
XSDEEVAGKKSFSAQEREYIRQGKEATAVVDQILAQEENWKFEKNNPTPCLHSPPCHLLSLP

SEQ ID NO: 84208 - protein, 262 aa, Homo sapiens
  Payload ID: 16754
  Gene Symbol: STARD3
  Gene Name: StAR-related lipid transfer (START) domain containing 3
  ENSP ID: ENSP00000464472
MSKLPRELTRDLERSLPAVASLGSSLSHSQSLSSHLLPPPEKRRAISDVRRTFCLFVTFDLLFISLLWIIELNTNTGIRKNLEQEIIQYNFKTSFFDIFVLAFFRFSGLLLGYAVLRLRHCCSAKGHLATCSPSSLLSSPGWRPGSLTSKSYPRKLKRSDGILPPRLLLPVDPCCSPVLCPRDSSIHPQNPLQGLTMNQMKKLLGRKVSLLRSGSTSARGRRPRQWWTRSWPRKRTGSLRRIMNMGTPCTPLKFPFTARRLS

SEQ ID NO: 84209 - protein, 205 aa, Homo sapiens
  Payload ID: 16755
  Gene Symbol: STARD4
  Gene Name: StAR-related lipid transfer (START) domain containing 4
  Uniprot ID: Q96DR4
  ENSP ID: ENSP00000296632
MEGLSDVASFATKLKNTLIQYHSIEEDKWRVAKKTKDVTVWRKPSEEFNGYLYKAQGVIDDLVYSIIDHIRPGPCRLDWDSLMTSLDILENFEENCCVMRYTTAGQLWNIISPREFVDFSYTVGYKEGLLSCGISLDWDEKRPEFVRGYNHPCGWFCVPLKDNPNQSLLTGYIQTDLRGMIPQSAVDTAMASTLTNFYGDLRKAL

SEQ ID NO: 84210 - protein, 68 aa, Homo sapiens
  Payload ID: 16755
  Gene Symbol: STARD4
  Gene Name: StAR-related lipid transfer (START) domain containing 4
  ENSP ID: ENSP00000407063
MEGLSDVASFATKLKNTLIQYHSIEEDKWRVAKKTKDVTVWRKPSEEFNGYLVLKGYVIKRATKPKVL

SEQ ID NO: 84211 - protein, 55 aa, Homo sapiens
  Payload ID: 16755
  Gene Symbol: STARD4
  Gene Name: StAR-related lipid transfer (START) domain containing 4
  ENSP ID: ENSP00000425014
MEGLSDVASFATKLKNTLIQYHSIEEDKWRVAKKTKDVTVWRKPSEEFNGYLIAV

SEQ ID NO: 84212 - protein, 55 aa, Homo sapiens; identical to SEQ ID NO: 84211
  Payload ID: 16755
  Gene Symbol: STARD4
  Gene Name: StAR-related lipid transfer (START) domain containing 4
  ENSP ID: ENSP00000425308

SEQ ID NO: 84213 - protein, 55 aa, Homo sapiens; identical to SEQ ID NO: 84211
  Payload ID: 16755
  Gene Symbol: STARD4
  Gene Name: StAR-related lipid transfer (START) domain containing 4
  ENSP ID: ENSP00000426148

SEQ ID NO: 84214 - protein, 205 aa, Homo sapiens; identical to SEQ ID NO: 84209
  Payload ID: 16755
  Gene Symbol: STARD4
  Gene Name: StAR-related lipid transfer (START) domain containing 4
  Uniprot ID: Q96DR4
  ENSP ID: ENSP00000427478

SEQ ID NO: 84215 - protein, 159 aa, Homo sapiens
  Payload ID: 16755
  Gene Symbol: STARD4
  Gene Name: StAR-related lipid transfer (START) domain containing 4
  Uniprot ID: Q96DR4
  ENSP ID: ENSP00000427639
MEGLSDVASFATKLKNTLIQYHSIEEDKWRVAKKTKDVTVWRKPSEEFNGYLYKAQGVIDDLVYSIIDHIRPGPCRLDWDSLMTSLDILENFEENCCVMRYTTAGQLWNIISPREFVDFSYTVGYKEGLLSCGNNLNMLCFFSVWFKYLCFLGWMSLSL

SEQ ID NO: 84216 - protein, 213 aa, Homo sapiens
  Payload ID: 16756
  Gene Symbol: STARD5
  Gene Name: StAR-related lipid transfer (START) domain containing 5
  Uniprot ID: Q9NSY2
  ENSP ID: ENSP00000304032
MDPALAAQMSEAVAEKMLQYRRDTAGWKICREGNGVSVSWRPSVEFPGNLYRGEGIVYGTLEEVWDCVKPAVGGLRVKWDENVTGFEIIQSITDTLCVSRTSTPSAAMKLISPRDFVDLVLVKRYEDGTISSNATHVEHPLCPPKPGFVRGFNHPCGCFCEPLPGEPTKTNLVTFFHTDLSGYLPQNVVDSFFPRSMTRFYANLQKAVKQFHE

SEQ ID NO: 84217 - protein, 63 aa, Homo sapiens
  Payload ID: 16756
  Gene Symbol: STARD5
  Gene Name: StAR-related lipid transfer (START) domain containing 5
  Uniprot ID: Q9NSY2
  ENSP ID: ENSP00000317519
MDPALAAQMSEAVAEKMLQYRRDTAGWKICREGVPRRRHCIWDTRGGVGLCEASCWRPTSEVG

SEQ ID NO: 84218 - protein, 110 aa, Homo sapiens
  Payload ID: 16756
  Gene Symbol: STARD5
  Gene Name: StAR-related lipid transfer (START) domain containing 5
  ENSP ID: ENSP00000453368
MDPALAAQMSEAVAEKMLQYRRDTAGWKICREGVSEELGGKGSRRRLRGARVPRSPQAPPLPVVFCSPIPWTRLRGIPMGIVFFFKKKIGPVMLTMTSGGTEEKALYMGH

SEQ ID NO: 84219 - protein, 220 aa, Homo sapiens
  Payload ID: 16757
  Gene Symbol: STARD6
  Gene Name: StAR-related lipid transfer (START) domain containing 6
  Uniprot ID: P59095
  ENSP ID: ENSP00000310814
MDFKAIAQQTAQEVLGYNRDTSGWKVVKTSKKITVSSKASRKFHGNLYRVEGIIPESPAKLSDFLYQTGDRITWDKSLQVYNMVHRIDSDTFICHTITQSFAVGSISPRDFIDLVYIKRYEGNMNIISSKSVDFPEYPPSSNYIRGYNHPCGFVCSPMEENPAYSKLVMFVQTEMRGKLSPSIIEKTMPSNLVNFILNAKDGIKAHRTPSRRGFHHNSHS

SEQ ID NO: 84220 - protein, 220 aa, Homo sapiens; identical to SEQ ID NO: 84219
  Payload ID: 16757
  Gene Symbol: STARD6
  Gene Name: StAR-related lipid transfer (START) domain containing 6
  Uniprot ID: P59095
  ENSP ID: ENSP00000462349

SEQ ID NO: 84221 - protein, 75 aa, Homo sapiens
  Payload ID: 16757
  Gene Symbol: STARD6
  Gene Name: StAR-related lipid transfer (START) domain containing 6
  ENSP ID: ENSP00000464377
MDFKAIAQQTAQEVLGYNRDTSGWKVVKTSVQWCAPIVPATQEANTGGLLEHRSLRLSCTMIVPVNSQYTTDWAT

SEQ ID NO: 84222 - protein, 75 aa, Homo sapiens; identical to SEQ ID NO: 84221
  Payload ID: 16757
  Gene Symbol: STARD6
  Gene Name: StAR-related lipid transfer (START) domain containing 6
  ENSP ID: ENSP00000464406

SEQ ID NO: 84223 - protein, 370 aa, Homo sapiens
  Payload ID: 16758
  Gene Symbol: STARD7
  Gene Name: StAR-related lipid transfer (START) domain containing 7
  Uniprot ID: Q9NQZ5
  ENSP ID: ENSP00000338030
MLPRRLLAAWLAGTRGGGLLALLANQCRFVTGLRVRRAQQIAQLYGRLYSESSRRVLLGRLWRRLHGRPGHASALMAALAGVFVWDEERIQEEELQRSINEMKRLEEMSNMFQSSGVQHHPPEPKAQTEGNEDSEGKEQRWEMVMDKKHFKLWRRPITGTHLYQYRVFGTYTDVTPRQFFNVQLDTEYRKKWDALVIKLEVIERDVVSGSEVLHWVTHFPYPMYSRDYVYVRRYSVDQENNMMVLVSRAVEHPSVPESPEFVRVRSYESQMVIRPHKSFDENGFDYLLTYSDNPQTVFPRYCVSWMVSSGMPDFLEKLHMATLKAKNMEIKVKDYISAKPLEMSSEAKATSQSSERKNEGSCGPARIEYA

SEQ ID NO: 84224 - protein, 147 aa, Homo sapiens
  Payload ID: 16758
  Gene Symbol: STARD7
  Gene Name: StAR-related lipid transfer (START) domain containing 7
  ENSP ID: ENSP00000409410
MKRLEEMSNMFQSSGVQHHPPEPKAQTEGNEDSEGKEQRWEMVMDKKHFKLWRRPITGTHLYQYRVFGTYTDVTPRQFFNVQLDTEYRKKWDALVIKLEVIERDVVSGSEVLHWVTHFPYPMYSRDYVYVRRYSVDQENNMMVLVSR

SEQ ID NO: 84225 - protein, 1023 aa, Homo sapiens
  Payload ID: 16759
  Gene Symbol: STARD8
  Gene Name: StAR-related lipid transfer (START) domain containing 8
  Uniprot ID: Q92502
  ENSP ID: ENSP00000252336
MTLNNCASMKLEVHFQSKQNEDSEEEEQCTISSHWAFQQESKCWSPMGSSDLLAPPSPGLPATSSCESVLTELSATSLPVITVSLPPEPADLPLPGRAPSSSDRPLLSPTQGQEGPQDKAKKRHRNRSFLKHLESLRRKEKSGSQQAEPKHSPATSEKVSKASSFRSCRGFLSAGFYRAKNWAATSAGGSGANTRKAWEAWPVASFRHPQWTHRGDCLVHVPGDHKPGTFPRSLSIESLCPEDGHRLADWQPGRRWGCEGRRGSCGSTGSHASTYDNLPELYPAEPVMVGAEAEDEDDEESGGSYAHLDDILQHVWGLQQRVELWSRAMYPDLGPGDEEEEEATSSVEIATVEVKCQAEALSQMEVPAHGESPAWAQAEVQPAVLAPAQAPAEAEPVAQEEAEAPAPAPAPAPAQDSEQEAHSGGEPTFASSLSVEEGHSISDTVASSSELDSSGNSMNEAEAAGPLAGLQASMPRERRDSGVGASLTRPCRKLRWHSFQNSHRPSLNSESLEINRQFAGQINLLHKGSLLRLTAFMEKYTVPHKQGWVWSMPKFMRRNKTPDYRGQHVFGVPPLIHVQRTGQPLPQSIQQAMRYLRSQCLDQVGIFRKSGVKSRIQNLRQMNETSPDNVCYEGQSAYDVADLLKQYFRDLPEPIFTSKLTTTFLQIYQLLPKDQWLAAAQAATLLLPDENREVLQTLLYFLSDIASAEENQMTAGNLAVCLAPSIFHLNVSKKDSPSPRIKSKRSLIGRPGPRDLSDNMAATQGLSHMISDCKKLFQVPQDMVLQLCSSYSAAELSPPGPALAELRQAQAAGVSLSLYMEENIQDLLRDAAERFKGWMSVPGPQHTELACRKAPDGHPLRLWKASTEVAAPPAVVLHRVLRERALWDEDLLRAQVLEALMPGVELYHYVTDSMAPHPCRDFVVLRMWRSDLPRGGCLLVSQSLDPEQPVPESGVRALMLTSQYLMEPCGLGRSRLTHICRADLRGRSPDWYNKVFGHLCAMEVAKIRDSFPTLQAAGPETKL

SEQ ID NO: 84226 - protein, 1023 aa, Homo sapiens; identical to SEQ ID NO: 84225
  Payload ID: 16759
  Gene Symbol: STARD8
  Gene Name: StAR-related lipid transfer (START) domain containing 8
  Uniprot ID: Q92502
  ENSP ID: ENSP00000363725

SEQ ID NO: 84227 - protein, 1103 aa, Homo sapiens
  Payload ID: 16759
  Gene Symbol: STARD8
  Gene Name: StAR-related lipid transfer (START) domain containing 8
  Uniprot ID: Q92502
  ENSP ID: ENSP00000363727
MPLLDVFWSCFRKVKCFPLLQVKKNAEAEAKRACEWLQATGFPQYVQLFEEGSFPLDIGSVKKNHGFLDEDSLGALCRRLMTLNNCASMKLEVHFQSKQNEDSEEEEQCTISSHWAFQQESKCWSPMGSSDLLAPPSPGLPATSSCESVLTELSATSLPVITVSLPPEPADLPLPGRAPSSSDRPLLSPTQGQEGPQDKAKKRHRNRSFLKHLESLRRKEKSGSQQAEPKHSPATSEKVSKASSFRSCRGFLSAGFYRAKNWAATSAGGSGANTRKAWEAWPVASFRHPQWTHRGDCLVHVPGDHKPGTFPRSLSIESLCPEDGHRLADWQPGRRWGCEGRRGSCGSTGSHASTYDNLPELYPAEPVMVGAEAEDEDDEESGGSYAHLDDILQHVWGLQQRVELWSRAMYPDLGPGDEEEEEATSSVEIATVEVKCQAEALSQMEVPAHGESPAWAQAEVQPAVLAPAQAPAEAEPVAQEEAEAPAPAPAPAPAQDSEQEAHSGGEPTFASSLSVEEGHSISDTVASSSELDSSGNSMNEAEAAGPLAGLQASMPRERRDSGVGASLTRPCRKLRWHSFQNSHRPSLNSESLEINRQFAGQINLLHKGSLLRLTAFMEKYTVPHKQGWVWSMPKFMRRNKTPDYRGQHVFGVPPLIHVQRTGQPLPQSIQQAMRYLRSQCLDQVGIFRKSGVKSRIQNLRQMNETSPDNVCYEGQSAYDVADLLKQYFRDLPEPIFTSKLTTTFLQIYQLLPKDQWLAAAQAATLLLPDENREVLQTLLYFLSDIASAEENQMTAGNLAVCLAPSIFHLNVSKKDSPSPRIKSKRSLIGRPGPRDLSDNMAATQGLSHMISDCKKLFQVPQDMVLQLCSSYSAAELSPPGPALAELRQAQAAGVSLSLYMEENIQDLLRDAAERFKGWMSVPGPQHTELACRKAPDGHPLRLWKASTEVAAPPAVVLHRVLRERALWDEDLLRAQVLEALMPGVELYHYVTDSMAPHPCRDFVVLRMWRSDLPRGGCLLVSQSLDPEQPVPESGVRALMLTSQYLMEPCGLGRSRLTHICRADLRGRSPDWYNKVFGHLCAMEVAKIRDSFPTLQAAGPETKL

SEQ ID NO: 84228 - protein, 52 aa, Homo sapiens
  Payload ID: 16759
  Gene Symbol: STARD8
  Gene Name: StAR-related lipid transfer (START) domain containing 8
  ENSP ID: ENSP00000428031
MPLLDVFWSCFRKVKCFPLLQVKKNAEAEAKRACEWLQATGFPQYVQLFEGG

SEQ ID NO: 84229 - protein, 4700 aa, Homo sapiens
  Payload ID: 16760
  Gene Symbol: STARD9
  Gene Name: StAR-related lipid transfer (START) domain containing 9
  Uniprot ID: Q9P2P6
  ENSP ID: ENSP00000290607
MANVQVAVRVRPLSKRETKEGGRIIVEVDGKVAKIRNLKVDNRPDGFGDSREKVMAFGFDYCYWSVNPEDPQYASQDVVFQDLGMEVLSGVAKGYNICLFAYGQTGSGKTYTMLGTPASVGLTPRICEGLFVREKDCASLPSSCRIKVSFLEIYNERVRDLLKQSGQKKSYTLRVREHPEMGPYVQGLSQHVVTNYKQVIQLLEEGIANRITAATHVHEASSRSHAIFTIHYTQAILENNLPSEMASKINLVDLAGSERADPSYCKDRIAEGANINKSLVTLGIVISTLAQNSQVFSSCQSLNSSVSNGGDSGILSSPSGTSSGGAPSRRQSYIPYRDSVLTWLLKDSLGGNSKTIMVATVSPAHTSYSETMSTLRYASSAKNIINKPRVNEDANLKLIRELREEIERLKALLLSFELRNFSSLSDENLKELVLQNELKIDQLTKDWTQKWNDWQALMEHYSVDINRRRAGVVIDSSLPHLMALEDDVLSTGVVLYHLKEGTTKIGRIDSDQEQDIVLQGQWIERDHCTITSACGVVVLRPARGARCTVNGREVTASCRLTQGAVITLGKAQKFRFNHPAEAAVLRQRRQVGEAAAGRGSLEWLDLDGDLAASRLGLSPLLWKERRALEEQCDEDHQTPRDGETSHRAQIQQQQSYVEDLRHQILAEEIRAAKELEFDQAWISQQIKENQQCLLREETWLASLQQQQQEDQVAEKELEASVALDAWLQTDPEIQPSPFVQSQKRVVHLQLLRRHTLRAAERNVRRKKVSFQLERIIKKQRLLEAQKRLEKLTTLCWLQDDSTQEPPYQVLSPDATVPRPPCRSKLTSCSSLSPQRLCSKHMPQLHSIFLSWDPSTTLPPRPDPTHQTSEKTSSEEHLPQAASYPARTGCLRKNGLHSSGHGQPCTARAALARKGASAPDACLTMSPNSVGIQEMEMGVKQPHQMVSQGLASLRKSANKLKPRHEPKIFTSTTQTRGAKGLADPSHTQAGWRKEGNLGTHKAAKGASCNSLYPHGPRQTAGHGKAVKTFWTEYKPPSPSRASKRHQRVLATRVRNITKKSSHLPLGSPLKRQQNTRDPDTMVPLTDFSPVMDHSREKDNDLSDTDSNYSLDSLSCVYAKALIEPLKPEERKWDFPEPENSESDDSQLSEDSLAEKRYQSPKNRLGGNRPTNNRGQPRTRTRASVRGFTAASDSDLLAQTHRSFSLDSLIDAEEELGEDQQEEPFPGSADEIPTETFWHLEDSSLPVMDQEAICRLGPINYRTAARLDAVLPMSSSFYLDPQFQPHCELQPHCELQPHCELQPHCEQAESQVEPSYSEQADSLQGMQLSRESPLMSMDSWFSCDSKINPSSPPGIVGSLCPSPDMQEFHSCKGERPGYWPNTEELKPSDAETVLPYSSKLHQGSTELLCSARDEHTASAADTSRLSLWGIQRLIQPGADGTFQGRCIPDMTQQGSSEASHNSSVSNVLAASATTLTHVGSTHERDWSALQQKYLLELSCPVLEAIGAPKPAYPYLEEDSGSLAQASSKGGDTLLPVGPRVSSNLNLNNFPVHLSRIRRLRAEKEQDSLNAKLEGVSDFFSTSEKEASYDETYSADLESLSASRSTNAQVFATENAIPDSMTEACEVKQNNLEECLQSCRKPGLMTSSDEDFFQKNACHSNVTTATKADHWSQGWAPLRKNSAVQPGQLSPDSHYPLEEEKTDCQESSKEAVRRHINVSFALPSGPELYLHSAPWNPLSSSLQPPLLETFYVTKSRDALTETALEIPACREVRVPSPPPREAWGFGHNHQALQGAYLKNNLPVLLQNQNSKIASSQQVTAEIPVDLNTREVIRESGKCPGNITEESHDSVYSSVTQNRHFLPSTSTKVCEFENQVVILNKKHSFPALEGGEVTAQSCCGASSDSTESGKSLLFRESEAREEEELDQNTVLRQTINVSLEKDMPGESAVSLKSRSVDRRVSSPVMVAQGGGPTPKWEGKNETGLLEKGLRPKDSSEEFKLPGTKPAYERFQLVACPQERNPSECKSQEMLNPNREPSGKKQNKRVNNTDEMARLIRSVMQLENGILEIESKQNKQVHASHTPGTDKELVFQDQKEQEKTDHAFRPDSSGNPLPSKDQPSSPRQTDDTVFRDSEAGAMEVNSIGNHPQVQKITPNPFRSREGVRESEPVREHTHPAGSDRPARDICDSLGKHTTCREFTNTSLHPQRMKALARALPLQPRLERSSKNNGQFVKASASLKGQPWGLGSLEELETVKGFQESQVAEHVSSSNQEEPKAQGKVEEMPMQRGGSLQEENKVTQKFPSLSQLCRDTFFRQETVSPLLSRTEFCTAPLHQDLSNTLPLNSPRWPRRCLHVPVALGISSLDCVLDLTMLKIHNSPLVTGVEHQDQSTETRSHSPEGNVRGRSSEAHTAWCGSVRSMAMGSHSQSGVPESIPLGTEDRISASTSPQDHGKDLRITLLGFSTSEDFASEAEVAVQKEIRVSSLNKVSSQPEKRVSFSLEEDSDQASKPRQKAEKETEDVGLTSGVSLAPVSLPRVPSPEPRLLEPSDHASMCLAILEEIRQAKAQRKQLHDFVARGTVLSYCETLLEPECSSRVAGRPQCKQIDQSSSDQTRNEGEAPGFHVASLSAEAGQIDLLPDERKVQATSLSADSFESLPNTETDREPWDPVQAFSHAAPAQDRKRRTGELRQFAGASEPFICHSSSSEIIEKKKDATRTPSSADPLAPDSPRSSAPVEEVRRVVSKKVVAALPSQAPYDDPRVTLHELSQSVPQETAEGIPPGSQDSSPEHQEPRTLDTTYGEVSDNLLVTAQGEKTAHFESQSVTCDVQNSTSASGPKQDHVQCPEASTGFEEGRASPKQDTILPGALTRVALEAPTQQCVQCKESVGSGLTEVCRAGSKHSRPIPLPDQRPSANPGGIGEEAPCRHPREALDGPVFSRNPEGSRTLSPSRGKESRTLPCRQPCSSQPVATHAYSSHSSTLLCFRDGDLGKEPFKAAPHTIHPPCVVPSRAYEMDETGEISRGPDVHLTHGLEPKDVNREFRLTESSTCEPSTVAAVLSRAQGCRSPSAPDVRTGSFSHSATDGSVGLIGVPEKKVAEKQASTELEAASFPAGMYSEPLRQFRDSSVGDQNAQVCQTNPEPPATTQGPHTLDLSEGSAESKLVVEPQHECLENTTRCFLEKPQFSTELRDHNRLDSQAKFVARLKHTCSPQEDSPWQEEEQHRDQASGGGEGFAQGVNPLPDEDGLDGCQILDAGREEVAVAKPPVSKILSQGFKDPATVSLRQNETPQPAAQRSGHLYTGREQPAPNHRGSLPVTTIFSGPKHSRSSPTPQFSVVGSSRSLQELNLSVEPPSPTDEDTQGPNRLWNPHLRGYSSGKSVARTSLQAEDSNQKASSRLDDGTTDHRHLKPATPPYPMPSTLSHMPTPDFTTSWMSGTLEQAQQGKREKLGVQVRPENWCSQMDKGMLHFGSSDISPYALPWRPEEPARISWKQYMSGSAVDVSCSQKPQGLTLSNVARCSSMDNGLEDQNSPFHSHLSTYANICDLSTTHSSTENAQGSNEAWEVFRGSSSIALGDPHIPTSPEGVAPTSGHDRRPQFRGPSGEADCLRSKPPLAKGSAAGPVDEIMLLYPSEAGCPVGQTRTNTFEQGTQTLGSRRHWSSTDISFAQPEASAVSAFDLASWTSMHNLSLHLSQLLHSTSELLGSLSQPDVARREQNTKRDIPDKAPQALMMDGSTQTTVDEGSQTDLTLPTLCLQTSEAEPQGANVILEGLGSDTSTVSQEEGDVPGVPQKREAEETAQKMAQLLYLQEESTPYKPQSPSIPSSHLRFQKAPVGQHLPSVSPSVSDAFLPPSSQPEESYCLVVSSPSPSSPHSPGLFPSTSEYPGDSRVQKKLGPTSALFVDRASSPILTLSASTQEPGLSPGSLTLSAPSTHPVEGHQKLDSSPDPVDAPRTPMDNYSQTTDELGGSQRGRSSLQRSNGRSFLELHSPHSPQQSPKLQFSFLGQHPQQLQPRTTIGVQSRLLPPPLRHRSQRLGNSFVPEKVASPEHCPLSGREPSQWQSRTENGGESSASPGEPQRTLDRPSSWGGLQHLSPCPVSELTDTAGLRGSALGLPQACQPEELLCFSCQMCMAPEHQHHSLRDLPVHNKFSNWCGVQKGSPGGLDMTEEELGASGDLSSEKQEQSPPQPPNDHSQDSEWSKREQIPLQVGAQNLSLSVELTEAKLHHGFGEADALLQVLQSGTGEALAADEPVTSTWKELYARQKKAIETLRRERAERLGNFCRTRSLSPQKQLSLLPNKDLFIWDLDLPSRRREYLQQLRKDVVETTRSPESVSRSAHTPSDIELMLQDYQQAHEEAKVEIARARDQLRERTEQEKLRIHQKIISQLLKEEDKLHTLANSSSLCTSSNGSLSSGMTSGYNSSPALSGQLQFPENMGHTNLPDSRDVWIGDERGGHSAVRKNSAYSHRASLGSCCCSPSSLSSLGTCFSSSYQDLAKHVVDTSMADVMAACSDNLHNLFSCQATAGWNYQGEEQAVQLYYKVFSPTRHGFLGAGVVSQPLSRVWAAVSDPTVWPLYYKPIQTARLHQRVTNSISLVYLVCNTTLCALKQPRDFCCVCVEAKEGHLSVMAAQSVYDTSMPRPSRKMVRGEILPSAWILQPITVEGKEVTRVIYLAQVELGAPGFPPQLLSSFIKRQPLVIARLASFLGR

SEQ ID NO: 84230 - protein, 222 aa, Homo sapiens
  Payload ID: 16760
  Gene Symbol: STARD9
  Gene Name: StAR-related lipid transfer (START) domain containing 9
  ENSP ID: ENSP00000454594
DENLKELVLQNELKIDQLTKDWTQKWNDWQALMEHYSVDINRRRAGVVIDSSLPHLMALEDDVLSTGVVLYHLKNLVSVKLHLRTKKEGTTKIGRIDSDQEQDIGAVITLGKAQKFRFNHPAEAAVLRQRRQVGEAAAGRGSLEWLDLDGDLAASRLGLSPLLWKERRALEEQCDEDHQTPRDGETSHRAQIQQQQSYVEDLRHQILAEEIRAAKELEFDQA

SEQ ID NO: 84231 - protein, 1586 aa, Homo sapiens
  Payload ID: 16760
  Gene Symbol: STARD9
  Gene Name: StAR-related lipid transfer (START) domain containing 9
  ENSP ID: ENSP00000454648
QDRKRRTGELRQFAGASEPFICHSSSSEIIEKKKDATRTPSSADPLAPDSPRSSAPVEEVRRVVSKKVVAALPSQAPYDDPRVTLHELSQSVPQETAEGIPPGSQDSSPEHQEPRTLDTTYGEVSDNLLVTAQGEKTAHFESQSVTCDVQNSTSASGPKQDHVQCPEASTGFEEGRASPKQDTILPGALTRVALEAPTQQCVQCKESVGSGLTEVCRAGSKHSRPIPLPDQRPSANPGGIGEEAPCRHPREALDGPVFSRNPEGSRTLSPSRGKESRTLPCRQPCSSQPVATHAYSSHSSTLLCFRDGDLGKEPFKAAPHTIHPPCVVPSRAYEMDETGEISRGPDVHLTHGLEPKDVNREFRLTESSTCEPSTVAAVLSRAQGCRSPSAPDVRTGSFSHSATDGSVGLIGVPEKKVAEKQASTELEAASFPAGMYSEPLRQFRDSSVGDQNAQVCQTNPEPPATTQGPHTLDLSEGSAESKLVVEPQHECLENTTRCFLEKPQFSTELRDHNRLDSQAKFVARLKHTCSPQEDSPWQEEEQHRDQASGGGEGFAQGVNPLPDEDGLDGCQILDAGREEVAVAKPPVSKILSQGFKDPATVSLRQNETPQPAAQRSGHLYTGREQPAPNHRGSLPVTTIFSGPKHSRSSPTPQFSVVGSSRSLQELNLSVEPPSPTDEDTQGPNRLWNPHLRGYSSGKSVARTSLQAEDSNQKASSRLDDGTTDHRHLKPATPPYPMPSTLSHMPTPDFTTSWMSGTLEQAQQGKREKLGVQVRPENWCSQMDKGMLHFGSSDISPYALPWRPEEPARISWKQYMSGSAVDVSCSQKPQGLTLSNVARCSSMDNGLEDQNSPFHSHLSTYANICDLSTTHSSTENAQGSNEAWEVFRGSSSIALGDPHIPTSPEGVAPTSGHDRRPQFRGPSGEADCLRSKPPLAKGSAAGPVDEIMLLYPSEAGCPVGQTRTNTFEQGTQTLGSRRHWSSTDISFAQPEASAVSAFDLASWTSMHNLSLHLSQLLHSTSELLGSLSQPDVARREQNTKRDIPDKAPQALMMDGSTQTTVDEGSQTDLTLPTLCLQTSEAEPQGANVILEGLGSDTSTVSQEEGDVPGVPQKREAEETAQKMAQLLYLQEESTPYKPQSPSIPSSHLRFQKAPVGQHLPSVSPSVSDAFLPPSSQPEESYCLVVSSPSPSSPHSPGLFPSTSEYPGDSRVQKKLGPTSALFVDRASSPILTLSASTQEPGLSPGSLTLSAPSTHPVEGHQKLDSSPDPVDAPRTPMDNYSQTTDELGGSQRGRSSLQRSNGRSFLELHSPHSPQQSPKLQFSFLGQHPQQLQPRTTIGVQSRLLPPPLRHRSQRLGNSFVPEKVASPEHCPLSGREPSQWQSRTENGGESSASPGEPQRTLDRPSSWGGLQHLSPCPVSELTDTAGLRGSALGLPQACQPEELLCFSCQMCMAPEHQHHSLRDLPVHNKFSNWCGVQKGSPGGLDMTEEELGASGDLSSEKQEQSPPQPPNDHSQDSEWSKREQIPLQVGAQNLSLSVELTEAKLHHGFGEADALLQVLQSGTGEALAADEPVTSTWKELYARGQR

SEQ ID NO: 84232 - protein, 62 aa, Homo sapiens
  Payload ID: 16761
  Gene Symbol: STATH
  Gene Name: statherin
  Uniprot ID: P02808
  ENSP ID: ENSP00000246895
MKFLVFAFILALMVSMIGADSSEEKFLRRIGRFGYGYGPYQPVPEQPLYPQPYQPQYQQYTF

SEQ ID NO: 84233 - protein, 52 aa, Homo sapiens
  Payload ID: 16761
  Gene Symbol: STATH
  Gene Name: statherin
  Uniprot ID: P02808
  ENSP ID: ENSP00000370448
MKFLVFAFILALMVSMIGADSSEEYGYGPYQPVPEQPLYPQPYQPQYQQYTF

SEQ ID NO: 84234 - protein, 62 aa, Homo sapiens; identical to SEQ ID NO: 84232
  Payload ID: 16761
  Gene Symbol: STATH
  Gene Name: statherin
  Uniprot ID: P02808
  ENSP ID: ENSP00000484341

SEQ ID NO: 84235 - protein, 52 aa, Homo sapiens; identical to SEQ ID NO: 84233
  Payload ID: 16761
  Gene Symbol: STATH
  Gene Name: statherin
  ENSP ID: ENSP00000489107

SEQ ID NO: 84236 - protein, 62 aa, Homo sapiens; identical to SEQ ID NO: 84232
  Payload ID: 16761
  Gene Symbol: STATH
  Gene Name: statherin
  ENSP ID: ENSP00000489243

SEQ ID NO: 84237 - protein, 62 aa, Homo sapiens; identical to SEQ ID NO: 84232
  Payload ID: 16761
  Gene Symbol: STATH
  Gene Name: statherin
  ENSP ID: ENSP00000489569

SEQ ID NO: 84238 - protein, 149 aa, Homo sapiens
  Payload ID: 16762
  Gene Symbol: STMN1
  Gene Name: stathmin 1
  Uniprot ID: P16949
  ENSP ID: ENSP00000350531
MASSDIQVKELEKRASGQAFELILSPRSKESVPEFPLSPPKKKDLSLEEIQKKLEAAEERRKSHEAEVLKQLAEKREHEKEVLQKAIEENNNFSKMAEEKLTHKMEANKENREAQMAAKLERLREKDKHIEEVRKNKESKDPADETEAD

SEQ ID NO: 84239 - protein, 149 aa, Homo sapiens; identical to SEQ ID NO: 84238
  Payload ID: 16762
  Gene Symbol: STMN1
  Gene Name: stathmin 1
  Uniprot ID: P16949
  ENSP ID: ENSP00000363409

SEQ ID NO: 84240 - protein, 149 aa, Homo sapiens; identical to SEQ ID NO: 84238
  Payload ID: 16762
  Gene Symbol: STMN1
  Gene Name: stathmin 1
  Uniprot ID: P16949
  ENSP ID: ENSP00000382633

SEQ ID NO: 84241 - protein, 149 aa, Homo sapiens; identical to SEQ ID NO: 84238
  Payload ID: 16762
  Gene Symbol: STMN1
  Gene Name: stathmin 1
  Uniprot ID: P16949
  ENSP ID: ENSP00000387858

SEQ ID NO: 84242 - protein, 85 aa, Homo sapiens
  Payload ID: 16762
  Gene Symbol: STMN1
  Gene Name: stathmin 1
  ENSP ID: ENSP00000407567
MASSDIQVKELEKRASGQAFELILSPRSKESVPEFPLSPPKKKDLSLEEIQKKLEAAEERRKSHEAEVLKQLAEKREHEKEVLQK

SEQ ID NO: 84243 - protein, 174 aa, Homo sapiens
  Payload ID: 16762
  Gene Symbol: STMN1
  Gene Name: stathmin 1
  Uniprot ID: P16949
  ENSP ID: ENSP00000410452
MASSDIQVKELEKRASGQAFELILSPRSKESVPEFPLSPPKKKDLSLEEIQKKLEAAEERRKSHEAEVLKQLAEKREHEKEVLQKAIEENNNFSKMAEEKLTHKMEANKENREAQMAAKLERLREKMYFWTHGPGAHPAQISAEQSCLHSVPALCPALGLQSALITWSDLSHHH

SEQ ID NO: 84244 - protein, 179 aa, Homo sapiens
  Payload ID: 16763
  Gene Symbol: STMN2
  Gene Name: stathmin 2
  Uniprot ID: Q93045
  ENSP ID: ENSP00000220876
MAKTAMAYKEKMKELSMLSLICSCFYPEPRNINIYTYDDMEVKQINKRASGQAFELILKPPSPISEAPRTLASPKKKDLSLEEIQKKLEAAEERRKSQEAQVLKQLAEKREHEREVLQKALEENNNFSKMAEEKLILKMEQIKENREANLAAIIERLQEKERHAAEVRRNKELQVELSG

SEQ ID NO: 84245 - protein, 187 aa, Homo sapiens
  Payload ID: 16763
  Gene Symbol: STMN2
  Gene Name: stathmin 2
  Uniprot ID: Q93045
  ENSP ID: ENSP00000429243
MAKTAMAYKEKMKELSMLSLICSCFYPEPRNINIYTYDDMEVKQINKRASGQAFELILKPPSPISEAPRTLASPKKKDLSLEEIQKKLEAAEERRKSQEAQVLKQLAEKREHEREVLQKALEENNNFSKMAEEKLILKMEQIKENREANLAAIIERLQEKLVKFISSELKESIESQFLELQREGEKQ

SEQ ID NO: 84246 - protein, 168 aa, Homo sapiens
  Payload ID: 16763
  Gene Symbol: STMN2
  Gene Name: stathmin 2
  ENSP ID: ENSP00000430102
MKELSMLSLICSCFYPEPRNINIYTYDDMEVKQINKRASGQAFELILKPPSPISEAPRTLASPKKKDLSLEEIQKKLEAAEERRKSQEAQVLKQLAEKREHEREVLQKALEENNNFSKMAEEKLILKMEQIKENREANLAAIIERLQEKERHAAEVRRNKELQVELSG

SEQ ID NO: 84247 - protein, 200 aa, Homo sapiens
  Payload ID: 16764
  Gene Symbol: STMND1
  Gene Name: stathmin domain containing 1
  ENSP ID: ENSP00000454363
MHVFFVFLSLLETLRRLPVADVSVPHTGENCSPRMEAALTKNTVDIAEGLEQVQMGSLPGTISENSPSPSERNRRVNSDLVTNGLINKPQSLESRERQKSSDILEELIVQGIIQSHSKVFRNGESYDVTLTTTEKPLRKPPSRLKKLKIKKQVKDFTMKDIEEKMEAAEERRKTKEEEIRKRLRSDRLLPSANHSDSAEL

SEQ ID NO: 84248 - protein, 276 aa, Homo sapiens
  Payload ID: 16764
  Gene Symbol: STMND1
  Gene Name: stathmin domain containing 1
  Uniprot ID: H3BQB6
  ENSP ID: ENSP00000455698
MGCGPSQPAEDRRRVRAPKKGWKEEFKADVSVPHTGENCSPRMEAALTKNTVDIAEGLEQVQMGSLPGTISENSPSPSERNRRVNSDLVTNGLINKPQSLESRERQKSSDILEELIVQGIIQSHSKVFRNGESYDVTLTTTEKPLRKPPSRLKKLKIKKQVKDFTMKDIEEKMEAAEERRKTKEEEIRKRLRSDRLLPSANHSDSAELDGAEVAFAKGLQRVRSAGFEPSDLQGGKPLKRKKSKCDATLIDRNESDESFGVVESDMSYNQADDIVY

SEQ ID NO: 84249 - protein, 180 aa, Homo sapiens
  Payload ID: 16765
  Gene Symbol: STMN3
  Gene Name: stathmin-like 3
  Uniprot ID: Q9NZ72
  ENSP ID: ENSP00000359070
MASTISAYKEKMKELSVLSLICSCFYTQPHPNTVYQYGDMEVKQLDKRASGQSFEVILKSPSDLSPESPMLSSPPKKKDTSLEELQKRLEAAEERRKTQEAQVLKQLAERREHEREVLHKALEENNNFSRQAEEKLNYKMELSKEIREAHLAALRERLREKELHAAEVRRNKEQREEMSG

SEQ ID NO: 84250 - protein, 169 aa, Homo sapiens
  Payload ID: 16765
  Gene Symbol: STMN3
  Gene Name: stathmin-like 3
  Uniprot ID: Q9NZ72
  ENSP ID: ENSP00000439840
MKELSVLSLICSCFYTQPHPNTVYQYGDMEVKQLDKRASGQSFEVILKSPSDLSPESPMLSSPPKKKDTSLEELQKRLEAAEERRKTQEAQVLKQLAERREHEREVLHKALEENNNFSRQAEEKLNYKMELSKEIREAHLAALRERLREKELHAAEVRRNKEQREEMSG

SEQ ID NO: 84251 - protein, 86 aa, Homo sapiens
  Payload ID: 16765
  Gene Symbol: STMN3
  Gene Name: stathmin-like 3
  ENSP ID: ENSP00000487639
MKELSVLSLICSCFYTQPHPNTVYQYGDMEVKQLDKRASGQSFEVILKSPSDLSPESPMLSSPPKKKDTSLEELQKRLEAAEERRK

SEQ ID NO: 84252 - protein, 239 aa, Homo sapiens
  Payload ID: 16765
  Gene Symbol: STMN3
  Gene Name: stathmin-like 3
  ENSP ID: ENSP00000487795
  MOD_RES (1)..(1): Any amino acid
XHRCGLGDHPLRRPRHLLWPEKPLPFAPRGLDGGGATAIPKPSGDQRAPPLPPLHLPRGGPTAFEAYKEKMKELSVLSLICSCFYTQPHPNTVYQYGDMEVKQLDKRASGQSFEVILKSPSDLSPESPMLSSPPKKKDTSLEELQKRLEAAEERRKTQEAQVLKQLAERREHEREVLHKALEENNNFSRQAEEKLNYKMELSKEIREAHLAALRERLREKELHAAEVRRNKEQREEMSG

SEQ ID NO: 84253 - protein, 86 aa, Homo sapiens; identical to SEQ ID NO: 84251
  Payload ID: 16765
  Gene Symbol: STMN3
  Gene Name: stathmin-like 3
  ENSP ID: ENSP00000488604

SEQ ID NO: 84254 - protein, 189 aa, Homo sapiens
  Payload ID: 16766
  Gene Symbol: STMN4
  Gene Name: stathmin-like 4
  Uniprot ID: Q9H169
  ENSP ID: ENSP00000265770
MTLAAYKEKMKELPLVSLFCSCFLADPLNKSSYKYEADTVDLNWCVISDMEVIELNKCTSGQSFEVILKPPSFDGVPEFNASLPRRRDPSLEEIQKKLEAAEERRKYQEAELLKHLAEKREHEREVIQKAIEENNNFIKMAKEKLAQKMESNKENREAHLAAMLERLQEKDKHAEEVRKNKELKEEASR

SEQ ID NO: 84255 - protein, 216 aa, Homo sapiens
  Payload ID: 16766
  Gene Symbol: STMN4
  Gene Name: stathmin-like 4
  Uniprot ID: Q9H169
  ENSP ID: ENSP00000342538
MTLAAYKEKMKELPLVSLFCSCFLADPLNKSSYKYEGWCGRQCRRKDESQRKDSADWRERRAQADTVDLNWCVISDMEVIELNKCTSGQSFEVILKPPSFDGVPEFNASLPRRRDPSLEEIQKKLEAAEERRKYQEAELLKHLAEKREHEREVIQKAIEENNNFIKMAKEKLAQKMESNKENREAHLAAMLERLQEKDKHAEEVRKNKELKEEASR

SEQ ID NO: 84256 - protein, 203 aa, Homo sapiens
  Payload ID: 16766
  Gene Symbol: STMN4
  Gene Name: stathmin-like 4
  Uniprot ID: Q9H169
  ENSP ID: ENSP00000428428
MTLAAYKEKMKELPLVSLFCSCFLADPLNKSSYKYEGWCGRQCRRKDESQRKDSADWRERRAQADTVDLNWCVISDMEVIELNKCTSGQSFEVILKPPSFDGVPEFNASLPRRRDPSLEEIQKKLEAAEERRKYQEAELLKHLAEKREHEREVIQKAIEENNNFIKMAKEKLAQKMESNKENREAHLAAMLERLQEKEPPAAR

SEQ ID NO: 84257 - protein, 167 aa, Homo sapiens
  Payload ID: 16766
  Gene Symbol: STMN4
  Gene Name: stathmin-like 4
  Uniprot ID: Q9H169
  ENSP ID: ENSP00000428474
MKELPLVSLFCSCFLADPLNKSSYKYEADTVDLNWCVISDMEVIELNKCTSGQSFEVILKPPSFDGVPEFNASLPRRRDPSLEEIQKKLEAAEERRKYQEAELLKHLAEKREHEREVIQKAIEENNNFIKMAKEKLAQKMESNKENREAHLAAMLERLQEKEPPAAR

SEQ ID NO: 84258 - protein, 258 aa, Homo sapiens
  Payload ID: 16766
  Gene Symbol: STMN4
  Gene Name: stathmin-like 4
  ENSP ID: ENSP00000430389
MTLAAYKEKMKELPLVSLFCSCFLADPLNKSSYKYEGWCGRQCRRKDESQRKDSADWRERRAQADTVDLNWCVISDMEVIELNKCTSGQSFEVILKPPSFDGVPEFNASLPRRRDPSLEEIQKKLEAAEERRKYQEAELLKHLAEKREHEREVIQKAIEENNNFIKMAKEKLAQKMESNKENREAHLAAMLERLQEKVRGPWLERSFLGHAVFLLQQVCGDLLIISGRKQPQAKIRIFFLGRIFREFRRMIREVRGKK

SEQ ID NO: 84259 - protein, 231 aa, Homo sapiens
  Payload ID: 16766
  Gene Symbol: STMN4
  Gene Name: stathmin-like 4
  ENSP ID: ENSP00000430699
MTLAAYKEKMKELPLVSLFCSCFLADPLNKSSYKYEADTVDLNWCVISDMEVIELNKCTSGQSFEVILKPPSFDGVPEFNASLPRRRDPSLEEIQKKLEAAEERRKYQEAELLKHLAEKREHEREVIQKAIEENNNFIKMAKEKLAQKMESNKENREAHLAAMLERLQEKVRGPWLERSFLGHAVFLLQQVCGDLLIISGRKQPQAKIRIFFLGRIFREFRRMIREVRGKK

SEQ ID NO: 84260 - protein, 496 aa, Homo sapiens
  Payload ID: 16767
  Gene Symbol: STAU1
  Gene Name: staufen double-stranded RNA binding protein 1
  Uniprot ID: O95793
  ENSP ID: ENSP00000323443
MKLGKKPMYKPVDPYSRMQSTYNYNMRGGAYPPRYFYPFPVPPLLYQVELSVGGQQFNGKGKTRQAAKHDAAAKALRILQNEPLPERLEVNGRESEEENLNKSEISQVFEIALKRNLPVNFEVARESGPPHMKNFVTKVSVGEFVGEGEGKSKKISKKNAAIAVLEELKKLPPLPAVERVKPRIKKKTKPIVKPQTSPEYGQGINPISRLAQIQQAKKEKEPEYTLLTERGLPRRREFVMQVKVGNHTAEGTGTNKKVAKRNAAENMLEILGFKVPQAQPTKPALKSEEKTPIKKPGDGRKVTFFEPGSGDENGTSNKEDEFRMPYLSHQQLPAGILPMVPEVAQAVGVSQGHHTKDFTRAAPNPAKATVTAMIARELLYGGTSPTAETILKNNISSGHVPHGPLTRPSEQLDYLSRVQGFQVEYKDFPKNNKNEFVSLINCSSQPPLISHGIGKDVESCHDMAALNILKLLSELDQQSTEMPRTGNGPMSVCGRC

SEQ ID NO: 84261 - protein, 496 aa, Homo sapiens; identical to SEQ ID NO: 84260
  Payload ID: 16767
  Gene Symbol: STAU1
  Gene Name: staufen double-stranded RNA binding protein 1
  Uniprot ID: O95793
  ENSP ID: ENSP00000345425

SEQ ID NO: 84262 - protein, 496 aa, Homo sapiens; identical to SEQ ID NO: 84260
  Payload ID: 16767
  Gene Symbol: STAU1
  Gene Name: staufen double-stranded RNA binding protein 1
  Uniprot ID: O95793
  ENSP ID: ENSP00000353604

SEQ ID NO: 84263 - protein, 494 aa, Homo sapiens
  Payload ID: 16767
  Gene Symbol: STAU1
  Gene Name: staufen double-stranded RNA binding protein 1
  ENSP ID: ENSP00000360857
MKLGKKPMYKPVDPYSRMQSTYNYNMRGGAYPPRYFYPFPVPPLLYQVELSVGGQQFNGKGKTRQAAKHDAAAKALRILQNEPLPERLEVNGRESEEENLNKSEISQVFEIALKRNLPVNFEVARESGPPHMKNFVTKVSVGEFVGEGEGKSKKISKKNAAIAVLEELKKLPPLPAVERVKPRIKKKTKPIVKTSPEYGQGINPISRLAQIQQAKKEKEPEYTLLTERGLPRRREFVMQVKVGNHTAEGTGTNKKVAKRNAAENMLEILGFKVPQAQPTKPALKSEEKTPIKKPGDGRKVTFFEPGSGDENGTSNKEDEFRMPYLSHQQLPAGILPMVPEVAQAVGVSQGHHTKDFTRAAPNPAKATVTAMIARELLYGGTSPTAETILKNNISSGHVPHGPLTRPSEQLDYLSRVQGFQVEYKDFPKNNKNEFVSLINCSSQPPLISHGIGKDVESCHDMAALNILKLLSELDQQSTEMPRTGNGPMSVCGRC

SEQ ID NO: 84264 - protein, 502 aa, Homo sapiens
  Payload ID: 16767
  Gene Symbol: STAU1
  Gene Name: staufen double-stranded RNA binding protein 1
  Uniprot ID: O95793
  ENSP ID: ENSP00000360867
MKLGKKPMYKPVDPYSRMQSTYNYNMRGGAYPPRYFYPFPVPPLLYQVELSVGGQQFNGKGKTRQAAKHDAAAKALRILQNEPLPERLEVNGRESEEENLNKSEISQVFEIALKRNLPVNFESFPLKQVARESGPPHMKNFVTKVSVGEFVGEGEGKSKKISKKNAAIAVLEELKKLPPLPAVERVKPRIKKKTKPIVKPQTSPEYGQGINPISRLAQIQQAKKEKEPEYTLLTERGLPRRREFVMQVKVGNHTAEGTGTNKKVAKRNAAENMLEILGFKVPQAQPTKPALKSEEKTPIKKPGDGRKVTFFEPGSGDENGTSNKEDEFRMPYLSHQQLPAGILPMVPEVAQAVGVSQGHHTKDFTRAAPNPAKATVTAMIARELLYGGTSPTAETILKNNISSGHVPHGPLTRPSEQLDYLSRVQGFQVEYKDFPKNNKNEFVSLINCSSQPPLISHGIGKDVESCHDMAALNILKLLSELDQQSTEMPRTGNGPMSVCGRC

SEQ ID NO: 84265 - protein, 502 aa, Homo sapiens; identical to SEQ ID NO: 84264
  Payload ID: 16767
  Gene Symbol: STAU1
  Gene Name: staufen double-stranded RNA binding protein 1
  Uniprot ID: O95793
  ENSP ID: ENSP00000360893

SEQ ID NO: 84266 - protein, 577 aa, Homo sapiens
  Payload ID: 16767
  Gene Symbol: STAU1
  Gene Name: staufen double-stranded RNA binding protein 1
  Uniprot ID: O95793
  ENSP ID: ENSP00000360922
MSQVQVQVQNPSAALSGSQILNKNQSLLSQPLMSIPSTTSSLPSENAGRPIQNSALPSASITSTSAAAESITPTVELNALCMKLGKKPMYKPVDPYSRMQSTYNYNMRGGAYPPRYFYPFPVPPLLYQVELSVGGQQFNGKGKTRQAAKHDAAAKALRILQNEPLPERLEVNGRESEEENLNKSEISQVFEIALKRNLPVNFEVARESGPPHMKNFVTKVSVGEFVGEGEGKSKKISKKNAAIAVLEELKKLPPLPAVERVKPRIKKKTKPIVKPQTSPEYGQGINPISRLAQIQQAKKEKEPEYTLLTERGLPRRREFVMQVKVGNHTAEGTGTNKKVAKRNAAENMLEILGFKVPQAQPTKPALKSEEKTPIKKPGDGRKVTFFEPGSGDENGTSNKEDEFRMPYLSHQQLPAGILPMVPEVAQAVGVSQGHHTKDFTRAAPNPAKATVTAMIARELLYGGTSPTAETILKNNISSGHVPHGPLTRPSEQLDYLSRVQGFQVEYKDFPKNNKNEFVSLINCSSQPPLISHGIGKDVESCHDMAALNILKLLSELDQQSTEMPRTGNGPMSVCGRC

SEQ ID NO: 84267 - protein, 129 aa, Homo sapiens
  Payload ID: 16767
  Gene Symbol: STAU1
  Gene Name: staufen double-stranded RNA binding protein 1
  ENSP ID: ENSP00000398785
MCEVSRGWKPCTEGILKVRPTRKISYEESITPTVELNALCMKLGKKPMYKPVDPYSRMQSTYNYNMRGGAYPPRYFYPFPVPPLLYQVELSVGGQQFNGKGKTRQAAKHDAAAKALRILQNEPLPERLE

SEQ ID NO: 84268 - protein, 199 aa, Homo sapiens
  Payload ID: 16767
  Gene Symbol: STAU1
  Gene Name: staufen double-stranded RNA binding protein 1
  ENSP ID: ENSP00000416779
MKLGKKPMYKPVDPYSRMQSTYNYNMRGGAYPPRYFYPFPVPPLLYQVELSVGGQQFNGKGKTRQAAKHDAAAKALRILQNEPLPERLEVNGRESEEENLNKSEISQVFEIALKRNLPVNFESFPLKQVARESGPPHMKNFVTKVSVGEFVGEGEGKSKKISKKNAAIAVLEELKKLPPLPAVERVKPRIKKKTKPIVK

SEQ ID NO: 84269 - protein, 493 aa, Homo sapiens [sequence omitted]

SEQ ID NO: 84270 - protein, 479 aa, Homo sapiens
  Payload ID: 16768
  Gene Symbol: STAU2
  Gene Name: staufen double-stranded RNA binding protein 2
  ENSP ID: ENSP00000348026
MLQINQMFSVQLSLGEQTWESEGSSIKKAQQAVANKALTESTLPKPVQKPPKSNVNNNPGSITPTVELNGLAMKRGEPAIYRPLDPKPFPNYRANYNFRGMYNQRYHCPVPKIFYVQLTVGNNEFFGEGKTRQAARHNAAMKALQALQNEPIPERSPQNGESGKDVDDDKDANKSEISLVFEIALKRNMPVSFEVIKESGPPHMKSFVTRVSVGEFSAEGEGNSKKLSKKRAATTVLQELKKLPPLPVVEKPKLFFKKRPKTIVKAGPEYGQGMNPISRLAQIQQAKKEKEPDYVLLSERGMPRRREFVMQVKVGNEVATGTGPNKKIAKKNAAEAMLLQLGYKASTNLQDQLEKTGENKGWSGPKPGFPEPTNNTPKGILHLSPDVYQEMEASRHKVISGTTLGYLSPKDMNQPSSSFFSISPTSNSSATIARELLMNGTSSTAEAIGLKGSSPTPPCSPVQPSKQLEYLARIQGFQV

SEQ ID NO: 84271 - protein, 479 aa, Homo sapiens; identical to SEQ ID NO: 84270
  Payload ID: 16768
  Gene Symbol: STAU2
  Gene Name: staufen double-stranded RNA binding protein 2
  ENSP ID: ENSP00000427977

SEQ ID NO: 84272 - protein, 135 aa, Homo sapiens
  Payload ID: 16768
  Gene Symbol: STAU2
  Gene Name: staufen double-stranded RNA binding protein 2
  ENSP ID: ENSP00000428284
MLQINQVKVGNEVATGTGPNKKIAKKNAAEAMLLQLGYKASTNLQDQLEKTGENKGWSGPKPGFPEPTNNTPKGILHLSPDVYQEMEASRHKVISGTTLGYLSPKDMNQPSSSFFSISPTSNSSATIARELLMNG

SEQ ID NO: 84273 - protein, 538 aa, Homo sapiens
  Payload ID: 16768
  Gene Symbol: STAU2
  Gene Name: staufen double-stranded RNA binding protein 2
  ENSP ID: ENSP00000428456
MLQINQMFSVQLSLGEQTWESEGSSIKKAQQAVANKALTESTLPKPVQKPPKSNVNNNPGSITPTVELNGLAMKRGEPAIYRPLDPKPFPNYRANYNFRGMYNQRYHCPVPKIFYVQLTVGNNEFFGEGKTRQAARHNAAMKALQALQNEPIPERSPQNGESGKDVDDDKDANKSEISLVFEIALKRNMPVSFEVIKESGPPHMKSFVTRVSVGEFSAEGEGNSKKLSKKRAATTVLQELKKLPPLPVVEKPKLFFKKRPKTIVKAGPEYGQGMNPISRLAQIQQAKKEKEPDYVLLSERGMPRRREFVMQVKVGNEVATGTGPNKKIAKKNAAEAMLLQLGYKASTNLQDQLEKTGENKGWSGPKPGFPEPTNNTPKGILHLSPDVYQEMEASRHKVISGTTLGYLSPKDMNQPSSSFFSISPTSNSSATIARELLMNGTSSTAEAIGLKGSSPTPPCSPVQPSKQLEYLARIQGFQAALSALKQFSEQGLDPIDGAMNIEKGSLEKQAKHLREKADNNQAPPGSIAQDCKKSNSAV

SEQ ID NO: 84274 - protein, 291 aa, Homo sapiens
  Payload ID: 16768
  Gene Symbol: STAU2
  Gene Name: staufen double-stranded RNA binding protein 2
  ENSP ID: ENSP00000428476
MPVSFEVIKESGPPHMKSFVTRVSVGEFSAEGEGNSKKLSKKRAATTVLQELKKLPPLPVVEKPKLFFKKRPKTIVKAGPEYGQGMNPISRLAQIQQAKKEKEPDYVLLSERGMPRRREFVMQVKVGNEVATGTGPNKKIAKKNAAEAMLLQLGYKASTNLQDQLEKTGENKGWSGPKPGFPEPTNNTPKGILHLSPDVYQEMEASRHKVISGTTLGYLSPKDMNQPSSSFFSISPTSNSSATIARELLMNGTSSTAEAIGLKGSSPTPPCSPVQPSKQLEYLARIQGFQV

SEQ ID NO: 84275 - protein, 390 aa, Homo sapiens
  Payload ID: 16768
  Gene Symbol: STAU2
  Gene Name: staufen double-stranded RNA binding protein 2
  ENSP ID: ENSP00000428664
MVARPLHSTEGQPESLGKMFSVQLSLGEQTWESEGSSIKKAQQAVANKALTESTLPKPVQKPPKSNVNNNPGSITPTVELNGLAMKRGEPAIYRPLDPKPFPNYRANYNFRGMYNQRYHCPVPKIFYVQLTVGNNEFFGEGKTRQAARHNAAMKALQALQNEPIPERSPQNGESGKDVDDDKDANKSEISLVFEIALKRNMPVSFEVIKESGPPHMKSFVTRVSVGEFSAEGEGNSKKLSKKRAATTVLQELKKLPPLPVVEKPKLFFKKRPKTIVKAGPEYGQGMNPISRLAQIQQAKKEKEPDYVLLSERGMPRRREFVMQVKVGNEVATGTGPNKKIAKKNAAEAMLLQLGYKASTNLQDQLEKTGENKGWSGPKPGFPEPTNNRKS

SEQ ID NO: 84276 - protein, 125 aa, Homo sapiens
  Payload ID: 16768
  Gene Symbol: STAU2
  Gene Name: staufen double-stranded RNA binding protein 2
  ENSP ID: ENSP00000428681
MFSVQLSLGEQTWESEGSSIKKAQQAVANKALTESTLPKPVQKPPKSNVNNNPGSITPTVELNGLAMKRGEPAIYRPLDPKPFPNYRANYNFRGMYNQRWQHLNGLQGLWSQRSKEMSFPCQNPD

SEQ ID NO: 84277 - protein, 63 aa, Homo sapiens
  Payload ID: 16768
  Gene Symbol: STAU2
  Gene Name: staufen double-stranded RNA binding protein 2
  ENSP ID: ENSP00000428737
MLQINQMFSVQLSLGEQTWESEGSSIKKAQQAVANKALTESTLPKPVQKPPKSNVNNNPGSIT

SEQ ID NO: 84278 - protein, 398 aa, Homo sapiens
  Payload ID: 16768
  Gene Symbol: STAU2
  Gene Name: staufen double-stranded RNA binding protein 2
  ENSP ID: ENSP00000428741
MKALQALQNEPIPERSPQNGESGKDVDDDKDANKSEISLVFEIALKRNMPVSFEVIKESGPPHMKSFVTRVSVGEFSAEGEGNSKKLSKKRAATTVLQELKKLPPLPVVEKPKLFFKKRPKTIVKAGPEYGQGMNPISRLAQIQQAKKEKEPDYVLLSERGMPRRREFVMQVKVGNEVATGTGPNKKIAKKNAAEAMLLQLGYKASTNLQDQLEKTGENKGWSGPKPGFPEPTNNTPKGILHLSPDVYQEMEASRHKVISGTTLGYLSPKDMNQPSSSFFSISPTSNSSATIARELLMNGTSSTAEAIGLKGSSPTPPCSPVQPSKQLEYLARIQGFQAALSALKQFSEQGLDPIDGAMNIEKGSLEKQAKHLREKADNNQAPPGSIAQDCKKSNSAV

SEQ ID NO: 84279 - protein, 570 aa, Homo sapiens
  Payload ID: 16768
  Gene Symbol: STAU2
  Gene Name: staufen double-stranded RNA binding protein 2
  ENSP ID: ENSP00000428756
MANPKEKTAMCLVNELARFNRVQPQYKLLNERGPAHSKMFSVQLSLGEQTWESEGSSIKKAQQAVANKALTESTLPKPVQKPPKSNVNNNPGSITPTVELNGLAMKRGEPAIYRPLDPKPFPNYRANYNFRGMYNQRYHCPVPKIFYVQLTVGNNEFFGEGKTRQAARHNAAMKALQALQNEPIPERSPQNGESGKDVDDDKDANKSEISLVFEIALKRNMPVSFEVIKESGPPHMKSFVTRVSVGEFSAEGEGNSKKLSKKRAATTVLQELKKLPPLPVVEKPKLFFKKRPKTIVKAGPEYGQGMNPISRLAQIQQAKKEKEPDYVLLSERGMPRRREFVMQVKVGNEVATGTGPNKKIAKKNAAEAMLLQLGYKASTNLQDQLEKTGENKGWSGPKPGFPEPTNNTPKGILHLSPDVYQEMEASRHKVISGTTLGYLSPKDMNQPSSSFFSISPTSNSSATIARELLMNGTSSTAEAIGLKGSSPTPPCSPVQPSKQLEYLARIQGFQAALSALKQFSEQGLDPIDGAMNIEKGSLEKQAKHLREKADNNQAPPGSIAQDCKKSNSAV

SEQ ID NO: 84280 - protein, 204 aa, Homo sapiens
  Payload ID: 16768
  Gene Symbol: STAU2
  Gene Name: staufen double-stranded RNA binding protein 2
  ENSP ID: ENSP00000428829
MLQINQMFSVQLSLGEQTWESEGSSIKKAQQAVANKALTESTLPKPVQKPPKSNVNNNPGSITPTVELNGLAMKRGEPAIYRPLDPKPFPNYRANYNFRGMYNQRYHCPVPKIFYVQLTVGNNEFFGEGKTRQAARHNAAMKALQALQNEPIPERSPQNGESGKDVDDDKDANKSEISLVFEIALKRNMPVSFEVIKESGPPHM

SEQ ID NO: 84281 - protein, 320 aa, Homo sapiens
  Payload ID: 16768
  Gene Symbol: STAU2
  Gene Name: staufen double-stranded RNA binding protein 2
  ENSP ID: ENSP00000429005
MKALQALQNEPIPERSPQNGESGKDVDDDKDANKSEISLVFEIALKRNMPVSFEVIKESGPPHMKSFVTRVSVGEFSAEGEGNSKKLSKKRAATTVLQELKKLPPLPVVEKPKLFFKKRPKTIVKAGPEYGQGMNPISRLAQIQQAKKEKEPDYVLLSERGMPRRREFVMQVKVGNEVATGTGPNKKIAKKNAAEAMLLQLGYKASTNLQDQLEKTGENKGWSGPKPGFPEPTNNTPKGILHLSPDVYQEMEASRHKVISGTTLGYLSPKDMNQPSSSFFSISPTSNSSATIARELLMNGTSSTAEAIGLKGSSPTPPCS

SEQ ID NO: 84282 - protein, 504 aa, Homo sapiens
  Payload ID: 16768
  Gene Symbol: STAU2
  Gene Name: staufen double-stranded RNA binding protein 2
  ENSP ID: ENSP00000429173
MKRGEPAIYRPLDPKPFPNYRANYNFRGMYNQRYHCPVPKIFYVQLTVGNNEFFGEGKTRQAARHNAAMKALQALQNEPIPERSPQNGESGKDVDDDKDANKSEISLVFEIALKRNMPVSFEVIKESGPPHMKSFVTRVSVGEFSAEGEGNSKKLSKKRAATTVLQELKKLPPLPVVEKPKLFFKKRPKTIVKAGPEYGQGMNPISRLAQIQQAKKEKEPDYVLLSERGMPRRREFVMQVKVGNEVATGTGPNKKIAKKNAAEAMLLQLGYKASTNLQDQLEKTGENKGWSGPKPGFPEPTNNTPKGILHLSPDVYQEMEASRHKVISGTTLGYLSPKDMNQPSSSFFSISPTSNSSATIARELLMNGTSSTAEAIGLKGSSPTPPCSPVQPSKQLEYLARIQGFQVHYCDRQSGKECVTCLTLAPVQMTFHAIGSSIEASHDQAALSALKQFSEQGLDPIDGAMNIEKGSLEKQAKHLREKADNNQAPPGSIAQDCKKSNSAV

SEQ ID NO: 84283 - protein, 491 aa, Homo sapiens
  Payload ID: 16768
  Gene Symbol: STAU2
  Gene Name: staufen double-stranded RNA binding protein 2
  ENSP ID: ENSP00000429973
MVARPLHSTEGQPESLGKMFSVQLSLGEQTWESEGSSIKKAQQAVANKALTESTLPKPVQKPPKSNVNNNPGSITPTVELNGLAMKRGEPAIYRPLDPKPFPNYRANYNFRGMYNQRYHCPVPKIFYVQLTVGNNEFFGEGKTRQAARHNAAMKALQALQNEPIPERSPQNGESGKDVDDDKDANKSEISLVFEIALKRNMPVSFEVIKESGPPHMKSFVTRVSVGEFSAEGEGNSKKLSKKRAATTVLQELKKLPPLPVVEKPKLFFKKRPKTIVKAGPEYGQGMNPISRLAQIQQAKKEKEPDYVLLSERGMPRRREFVMQVKVGNEVATGTGPNKKIAKKNAAEAMLLQLGYKASTNLQDQLEKTGENKGWSGPKPGFPEPTNNTPKGILHLSPDVYQEMEASRHKVISGTTLGYLSPKDMNQPSSSFFSISPTSNSSATIARELLMNGTSSTAEAIGLKGSSPTPPCSPVQPSKQLEYLARIQGFQV

SEQ ID NO: 84284 - protein, 162 aa, Homo sapiens
  Payload ID: 16768
  Gene Symbol: STAU2
  Gene Name: staufen double-stranded RNA binding protein 2
  ENSP ID: ENSP00000430511
TGENKGWSGPKPGFPEPTNNTPKGILHLSPDVYQEMEASRHKVISGTTLGYLSPKDMNQPSSSFFSISPTSNSSATIARELLMNGTSSTAEAIGLKGSSPTPPCSPVQPSKQLEYLARIQGFQVHYCDRQSGKECVTCLTLAPVQMTFHAIGSSIEASHDQV

SEQ ID NO: 84285 - protein, 105 aa, Homo sapiens
  Payload ID: 16768
  Gene Symbol: STAU2
  Gene Name: staufen double-stranded RNA binding protein 2
  Uniprot ID: Q9NUL3
  ENSP ID: ENSP00000430611
MLQINQMFSVQLSLGEQTWESEGSSIKKAQQAVANKALTESTLPKPVQKPPKSNVNNNPGSITPTVELNGLAMKRGEPAIYRPLDPKPFPNYRANYNFRGMYNQR

SEQ ID NO: 84286 - protein, 511 aa, Homo sapiens
  Payload ID: 16768
  Gene Symbol: STAU2
  Gene Name: staufen double-stranded RNA binding protein 2
  ENSP ID: ENSP00000430907
MANPKEKTAMCLVNELARFNRVQPQYKLLNERGPAHSKMFSVQLSLGEQTWESEGSSIKKAQQAVANKALTESTLPKPVQKPPKSNVNNNPGSITPTVELNGLAMKRGEPAIYRPLDPKPFPNYRANYNFRGMYNQRYHCPVPKIFYVQLTVGNNEFFGEGKTRQAARHNAAMKALQALQNEPIPERSPQNGESGKDVDDDKDANKSEISLVFEIALKRNMPVSFEVIKESGPPHMKSFVTRVSVGEFSAEGEGNSKKLSKKRAATTVLQELKKLPPLPVVEKPKLFFKKRPKTIVKAGPEYGQGMNPISRLAQIQQAKKEKEPDYVLLSERGMPRRREFVMQVKVGNEVATGTGPNKKIAKKNAAEAMLLQLGYKASTNLQDQLEKTGENKGWSGPKPGFPEPTNNTPKGILHLSPDVYQEMEASRHKVISGTTLGYLSPKDMNQPSSSFFSISPTSNSSATIARELLMNGTSSTAEAIGLKGSSPTPPCSPVQPSKQLEYLARIQGFQV

SEQ ID NO: 84287 - protein, 473 aa, Homo sapiens
  Payload ID: 16768
  Gene Symbol: STAU2
  Gene Name: staufen double-stranded RNA binding protein 2
  ENSP ID: ENSP00000431111
MFSVQLSLGEQTWESEGSSIKKAQQAVANKALTESTLPKPVQKPPKSNVNNNPGSITPTVELNGLAMKRGEPAIYRPLDPKPFPNYRANYNFRGMYNQRYHCPVPKIFYVQLTVGNNEFFGEGKTRQAARHNAAMKALQALQNEPIPERSPQNGESGKDVDDDKDANKSEISLVFEIALKRNMPVSFEVIKESGPPHMKSFVTRVSVGEFSAEGEGNSKKLSKKRAATTVLQELKKLPPLPVVEKPKLFFKKRPKTIVKAGPEYGQGMNPISRLAQIQQAKKEKEPDYVLLSERGMPRRREFVMQVKVGNEVATGTGPNKKIAKKNAAEAMLLQLGYKASTNLQDQLEKTGENKGWSGPKPGFPEPTNNTPKGILHLSPDVYQEMEASRHKVISGTTLGYLSPKDMNQPSSSFFSISPTSNSSATIARELLMNGTSSTAEAIGLKGSSPTPPCSPVQPSKQLEYLARIQGFQV

SEQ ID NO: 84288 - protein, 1204 aa, Homo sapiens
  Payload ID: 16769
  Gene Symbol: SLK
  Gene Name: STE20-like kinase
  Uniprot ID: Q9H2G2
  ENSP ID: ENSP00000336824
MSFFNFRKIFKLGSEKKKKQYEHVKRDLNPEDFWEIIGELGDGAFGKVYKAQNKETSVLAAAKVIDTKSEEELEDYMVEIDILASCDHPNIVKLLDAFYYENNLWILIEFCAGGAVDAVMLELERPLTESQIQVVCKQTLDALNYLHDNKIIHRDLKAGNILFTLDGDIKLADFGVSAKNTRTIQRRDSFIGTPYWMAPEVVMCETSKDRPYDYKADVWSLGITLIEMAEIEPPHHELNPMRVLLKIAKSEPPTLAQPSRWSSNFKDFLKKCLEKNVDARWTTSQLLQHPFVTVDSNKPIRELIAEAKAEVTEEVEDGKEEDEEEETENSLPIPASKRASSDLSIASSEEDKLSQNACILESVSEKTERSNSEDKLNSKILNEKPTTDEPEKAVEDINEHITDAQLEAMTELHDRTAVIKENEREKRPKLENLPDTEDQETVDINSVSEGKENNIMITLETNIEHNLKSEEEKDQEKQQMFENKLIKSEEIKDTILQTVDLVSQETGEKEANIQAVDSEVGLTKEDTQEKLGEDDKTQKDVISNTSDVIGTCEAADVAQKVDEDSAEDTQSNDGKEVVEVGQKLINKPMVGPEAGGTKEVPIKEIVEMNEIEEGKNKEQAINSSENIMDINEEPGTTEGEEITESSSTEEMEVRSVVADTDQKALGSEVQDASKVTTQIDKEKKEIPVSIKKEPEVTVVSQPTEPQPVLIPSININSDSGENKEEIGSLSKTETILPPESENPKENDNDSGTGSTADTSSIDLNLSISSFLSKTKDSGSISLQETRRQKKTLKKTRKFIVDGVEVSVTTSKIVTDSDSKTEELRFLRRQELRELRFLQKEEQRAQQQLNSKLQQQREQIFRRFEQEMMSKKRQYDQEIENLEKQQKQTIERLEQEHTNRLRDEAKRIKGEQEKELSKFQNMLKNRKKEEQEFVQKQQQELDGSLKKIIQQQKAELANIERECLNNKQQLMRAREAAIWELEERHLQEKHQLLKQQLKDQYFMQRHQLLKRHEKETEQMQRYNQRLIEELKNRQTQERARLPKIQRSEAKTRMAMFKKSLRINSTATPDQDRDKIKQFAAQEEKRQKNERMAQHQKHENQMRDLQLQCEANVRELHQLQNEKCHLLVEHETQKLKELDEEHSQELKEWREKLRPRKKTLEEEFARKLQEQEVFFKMTGESECLNPSTQSRISKFYPIPSLHSTGS

SEQ ID NO: 84289 - protein, 1235 aa, Homo sapiens
  Payload ID: 16769
  Gene Symbol: SLK
  Gene Name: STE20-like kinase
  Uniprot ID: Q9H2G2
  ENSP ID: ENSP00000358770
MSFFNFRKIFKLGSEKKKKQYEHVKRDLNPEDFWEIIGELGDGAFGKVYKAQNKETSVLAAAKVIDTKSEEELEDYMVEIDILASCDHPNIVKLLDAFYYENNLWILIEFCAGGAVDAVMLELERPLTESQIQVVCKQTLDALNYLHDNKIIHRDLKAGNILFTLDGDIKLADFGVSAKNTRTIQRRDSFIGTPYWMAPEVVMCETSKDRPYDYKADVWSLGITLIEMAEIEPPHHELNPMRVLLKIAKSEPPTLAQPSRWSSNFKDFLKKCLEKNVDARWTTSQLLQHPFVTVDSNKPIRELIAEAKAEVTEEVEDGKEEDEEEETENSLPIPASKRASSDLSIASSEEDKLSQNACILESVSEKTERSNSEDKLNSKILNEKPTTDEPEKAVEDINEHITDAQLEAMTELHDRTAVIKENEREKRPKLENLPDTEDQETVDINSVSEGKENNIMITLETNIEHNLKSEEEKDQEKQQMFENKLIKSEEIKDTILQTVDLVSQETGEKEANIQAVDSEVGLTKEDTQEKLGEDDKTQKDVISNTSDVIGTCEAADVAQKVDEDSAEDTQSNDGKEVVEVGQKLINKPMVGPEAGGTKEVPIKEIVEMNEIEEGKNKEQAINSSENIMDINEEPGTTEGEEITESSSTEEMEVRSVVADTDQKALGSEVQDASKVTTQIDKEKKEIPVSIKKEPEVTVVSQPTEPQPVLIPSININSDSGENKEEIGSLSKTETILPPESENPKENDNDSGTGSTADTSSIDLNLSISSFLSKTKDSGSISLQETRRQKKTLKKTRKFIVDGVEVSVTTSKIVTDSDSKTEELRFLRRQELRELRFLQKEEQRAQQQLNSKLQQQREQIFRRFEQEMMSKKRQYDQEIENLEKQQKQTIERLEQEHTNRLRDEAKRIKGEQEKELSKFQNMLKNRKKEVINEVEKAPKELRKELMKRRKEELAQSQHAQEQEFVQKQQQELDGSLKKIIQQQKAELANIERECLNNKQQLMRAREAAIWELEERHLQEKHQLLKQQLKDQYFMQRHQLLKRHEKETEQMQRYNQRLIEELKNRQTQERARLPKIQRSEAKTRMAMFKKSLRINSTATPDQDRDKIKQFAAQEEKRQKNERMAQHQKHENQMRDLQLQCEANVRELHQLQNEKCHLLVEHETQKLKELDEEHSQELKEWREKLRPRKKTLEEEFARKLQEQEVFFKMTGESECLNPSTQSRISKFYPIPSLHSTGS

SEQ ID NO: 84290 - protein, 234 aa, Homo sapiens
  Payload ID: 16770
  Gene Symbol: STRADA
  Gene Name: STE20-related kinase adaptor alpha
  ENSP ID: ENSP00000245865
MSSFLPEGGCYELLTVIGKGFEDLMTVNLARYKPTGEYVTVRRINLEACSNEMVTFLQGELHVSKLFNHPNIVPYRATFIADNELWVVTSFMAYGSAKDLICTHFMDGMNELAIAYILQGVLKALDYIHHMGYVHRSVKASHILISVDGKVYLSGLRSNLSMISHGQRQRVVHDFPKYSVKVLPWLSPEVLQQGYDAKSDIYSVGITACELANGHVPFKDMPATQGEDSTVKGI

SEQ ID NO: 84291 - protein, 431 aa, Homo sapiens
  Payload ID: 16770
  Gene Symbol: STRADA
  Gene Name: STE20-related kinase adaptor alpha
  Uniprot ID: Q7RTN6
  ENSP ID: ENSP00000336655
MSFLVSKPERIRRWVSEKFIVEGLRDLELFGEQPPGDTRRKTNDASSESIASFSKQEVMSSFLPEGGCYELLTVIGKGFEDLMTVNLARYKPTGEYVTVRRINLEACSNEMVTFLQGELHVSKLFNHPNIVPYRATFIADNELWVVTSFMAYGSAKDLICTHFMDGMNELAIAYILQGVLKALDYIHHMGYVHRSVKASHILISVDGKVYLSGLRSNLSMISHGQRQRVVHDFPKYSVKVLPWLSPEVLQQNLQGYDAKSDIYSVGITACELANGHVPFKDMPATQMLLEKLNGTVPCLLDTSTIPAEELTMSPSRSVANSGLSDSLTTSTPRPSNGDSPSHPYHRTFSPHFHHFVEQCLQRNPDARPSASTLLNHSFFKQIKRRASEALPELLRPVTPITNFEGSQSQDHSGIFGLVTNLEELEVDDWEF

SEQ ID NO: 84292 - protein, 373 aa, Homo sapiens
  Payload ID: 16770
  Gene Symbol: STRADA
  Gene Name: STE20-related kinase adaptor alpha
  Uniprot ID: Q7RTN6
  ENSP ID: ENSP00000365000
MSSFLPEGGCYELLTVIGKGFEDLMTVNLARYKPTGEYVTVRRINLEACSNEMVTFLQGELHVSKLFNHPNIVPYRATFIADNELWVVTSFMAYGSAKDLICTHFMDGMNELAIAYILQGVLKALDYIHHMGYVHRSVKASHILISVDGKVYLSGLRSNLSMISHGQRQRVVHDFPKYSVKVLPWLSPEVLQQNLQGYDAKSDIYSVGITACELANGHVPFKDMPATQMLLEKLNGTVPCLLDTSTIPAEELTMSPSRSVANSGLSDSLTTSTPRPSNGDSPSHPYHRTFSPHFHHFVEQCLQRNPDARPSASTLLNHSFFKQIKRRASEALPELLRPVTPITNFEGSQSQDHSGIFGLVTNLEELEVDDWEF

SEQ ID NO: 84293 - protein, 348 aa, Homo sapiens
  Payload ID: 16770
  Gene Symbol: STRADA
  Gene Name: STE20-related kinase adaptor alpha
  Uniprot ID: Q7RTN6
  ENSP ID: ENSP00000376677
MSFLTNDASSESIASFSKQEVMSSFLPEGGCYELLTVIGKGFEDLMTVNLARYKPTGEYVTVRRINLEACSNEMVTFLQGELHVSKLFNHPNIVPYRATFIADNELWVVTSFMAYGSAKDLICTHFMDGMNELAIAYILQGVLKALDYIHHMGYVHRSVKASHILISVDGKVYLSGLRSNLSMISHGQRQRVVHDFPKYSVKVLPWLSPEVLQQNLQGYDAKSDIYSVGITACELANGHVPFKDMPATQMLLEKLNGTVPCLLDTSTIPAEELTMSPSRSVANSGLSDSLTTSTPRPSNGDSPSHPYHRTFSPHFHHFVEQCLQRNPDARYPCWPGPGLRESRGCSGG

SEQ ID NO: 84294 - protein, 299 aa, Homo sapiens
  Payload ID: 16770
  Gene Symbol: STRADA
  Gene Name: STE20-related kinase adaptor alpha
  Uniprot ID: Q7RTN6
  ENSP ID: ENSP00000398841
MSFLVSKPERIRRWVSEKFIVEGLRDLELFGGKGFEDLMTVNLARYKPTGEYVTVRRINLEACSNEMVTFLQGELHVSKLFNHPNIVPYRATFIADNELWVVTSFMAYGSAKDLICTHFMDGMNELAIAYILQGVLKALDYIHHMGYVHRSVKASHILISVDGKVYLSGLRSNLSMISHGQRQRVVHDFPKYSVKVLPWLSPEVLQQNLQGYDAKSDIYSVGITACELANGHVPFKDMPATQMLLEKLNGTVPCLLDTSTIPAEELTMSPSRSVANSGLSDSLTTSTPRPSNGPVPAPS

SEQ ID NO: 84295 - protein, 72 aa, Homo sapiens
  Payload ID: 16770
  Gene Symbol: STRADA
  Gene Name: STE20-related kinase adaptor alpha
  ENSP ID: ENSP00000462384
MSFLTNDASSESIASFSKQEVMSSFLPEGGCYELLTVIGKGFEDLMTVNLARYKPTGEYVTVRRINLEACSN

SEQ ID NO: 84296 - protein, 10 aa, Homo sapiens
  Payload ID: 16770
  Gene Symbol: STRADA
  Gene Name: STE20-related kinase adaptor alpha
  ENSP ID: ENSP00000462496
MSSFLPEGGC

SEQ ID NO: 84297 - protein, 173 aa, Homo sapiens
  Payload ID: 16770
  Gene Symbol: STRADA
  Gene Name: STE20-related kinase adaptor alpha
  ENSP ID: ENSP00000462530
MSSFLPEGGCYELLTVIGKGFEDLMTVNLARYKPTGEYVTVRRINLEACSNEMVTFLQGELHVSKLFNHPNIVPYRATFIADNELWVVTSFMAYGSAKDLICTHFMDGMNELAIAYILQGVLKALDYIHHMGYVHRISRVMMPSLTSTVWESQPVNWPTAMSPLRICLPPRCC

SEQ ID NO: 84298 - protein, 314 aa, Homo sapiens
  Payload ID: 16770
  Gene Symbol: STRADA
  Gene Name: STE20-related kinase adaptor alpha
  Uniprot ID: Q7RTN6
  ENSP ID: ENSP00000462922
MSFLVSKPERIRTNDASSESIASFSKQEVMSSFLPEGGCYELLTVIGKGFEDLMTVNLARYKPTGEYVTVRRINLEACSNEMVTFLQGELHVSKLFNHPNIVPYRATFIADNELWVVTSFMAYGSAKDLICTHFMDGMNELAIAYILQGVLKALDYIHHMGYVHRSVKASHILISVDGKVYLSGLRSNLSMISHGQRQRVVHDFPKYSVKVLPWLSPEVLQQNLQGYDAKSDIYSVGITACELANGHVPFKDMPATQMLLEKLNGTVPCLLDTSTIPAEELTMSPSRSVANSGLSDSLTTSTPRPSNGPVPAPS

SEQ ID NO: 84299 - protein, 78 aa, Homo sapiens
  Payload ID: 16770
  Gene Symbol: STRADA
  Gene Name: STE20-related kinase adaptor alpha
  ENSP ID: ENSP00000463203
MSSFLPEGGCYELLTVIGKGFEDLMTVNLARYKPTGEYVTVRRINLEACSNEMVTFLQGELHVSKLFNHPNIVPYRAT

SEQ ID NO: 84300 - protein, 45 aa, Homo sapiens
  Payload ID: 16770
  Gene Symbol: STRADA
  Gene Name: STE20-related kinase adaptor alpha
  ENSP ID: ENSP00000463238
MSFLVSKPERIRRWVSEKFIVEGLRDLELFGEQPPGDTRRKTNDA

SEQ ID NO: 84301 - protein, 131 aa, Homo sapiens
  Payload ID: 16770
  Gene Symbol: STRADA
  Gene Name: STE20-related kinase adaptor alpha
  ENSP ID: ENSP00000463872
LEACSNEMVTFLQGELHVSKLFNHPNIVPYRATFIADNELWVVTSFMAYGSAKDLICTHFMDGMNELAIAYILQGVLKALDYIHHMGYVHRISRVMMPSLTSTVWESQPVNWPTAMSPLRICLPPRVKTLR

SEQ ID NO: 84302 - protein, 40 aa, Homo sapiens
  Payload ID: 16770
  Gene Symbol: STRADA
  Gene Name: STE20-related kinase adaptor alpha
  ENSP ID: ENSP00000464085
MSFLVSKPERIRRWVSEKFIVEGLRDLELFGGESPKSREQ

SEQ ID NO: 84303 - protein, 50 aa, Homo sapiens
  Payload ID: 16770
  Gene Symbol: STRADA
  Gene Name: STE20-related kinase adaptor alpha
  ENSP ID: ENSP00000464139
MSSFLPEGGCYELLTVIGKGFEDLMTVNLARYKPTGEYVTVRRINLEACS

SEQ ID NO: 84304 - protein, 55 aa, Homo sapiens
  Payload ID: 16770
  Gene Symbol: STRADA
  Gene Name: STE20-related kinase adaptor alpha
  ENSP ID: ENSP00000464213
  MOD_RES (1)..(1): Any amino acid
XSTPRPSNGDSPSHPYHRTFSPHFHHFVEQCLQRNPDARPSASTLLNHSFFKQVS

SEQ ID NO: 84305 - protein, 167 aa, Homo sapiens
  Payload ID: 16770
  Gene Symbol: STRADA
  Gene Name: STE20-related kinase adaptor alpha
  ENSP ID: ENSP00000464547
NIVPYRATFIADNELWVVTSFMAYGSAKDLICTHFMDGMNELAIAYILQGVLKALDYIHHMGYVHRSVKASHILISVDGKVYLSGLRSNLSMISHGQRQRVVHDFPKYSVKVLPWLSPEVLQQNLQGYDAKSDIYSVGITACELANGHVPFKDMPATQGEDSTVKGI

SEQ ID NO: 84306 - protein, 234 aa, Homo sapiens; identical to SEQ ID NO: 84290
  Payload ID: 16770
  Gene Symbol: STRADA
  Gene Name: STE20-related kinase adaptor alpha
  ENSP ID: ENSP00000481505

SEQ ID NO: 84307 - protein, 418 aa, Homo sapiens
  Payload ID: 16771
  Gene Symbol: STRADB
  Gene Name: STE20-related kinase adaptor beta
  Uniprot ID: Q9C0K7
  ENSP ID: ENSP00000194530
MSLLDCFCTSRTQVESLRPEKQSETSIHQYLVDEPTLSWSRPSTRASEVLCSTNVSHYELQVEIGRGFDNLTSVHLARHTPTGTLVTIKITNLENCNEERLKALQKAVILSHFFRHPNITTYWTVFTVGSWLWVISPFMAYGSASQLLRTYFPEGMSETLIRNILFGAVRGLNYLHQNGCIHRSIKASHILISGDGLVTLSGLSHLHSLVKHGQRHRAVYDFPQFSTSVQPWLSPELLRQDLHGYNVKSDIYSVGITACELASGQVPFQDMHRTQMLLQKLKGPPYSPLDISIFPQSESRMKNSQSGVDSGIGESVLVSSGTHTVNSDRLHTPSSKTFSPAFFSLVQLCLQQDPEKRPSASSLLSHVFFKQMKEESQDSILSLLPPAYNKPSISLPPVLPWTEPECDFPDEKDSYWEF

SEQ ID NO: 84308 - protein, 377 aa, Homo sapiens
  Payload ID: 16771
  Gene Symbol: STRADB
  Gene Name: STE20-related kinase adaptor beta
  Uniprot ID: Q9C0K7
  ENSP ID: ENSP00000376080
MSLLDCFCTSRTQVESLRPEKQSETSIHQYLVDEPTLSWSRPSTRASEVLCSTNVSHYELQVEIGRGFDNLTSVHLARHTPTGTLVTIKITNLENCNEERLKALQKAVILSHFFRHPNITTYWTVFTVGSWLWVISPFMAYGSASQLLRTYFPEGMSETLIRNILFGAVRGLNYLHQNGCIHRSIKASHILISGDGLVTLSGLSHLHSLVKHGQRHRAVYDFPQFSTSVQPWLSPELLRQDLHGYNVKSDIYSVGITACELASGQVPFQDMHRTQMLLQKLKGPPYSPLDISIFPQSESRMKNSQSGVDSGIGESVLVSSGTHTVNSDRLHTPSSKTFSPAFFSLVQLCLQQDPEKRPSASSLLSHVFFKQPYFEFL

SEQ ID NO: 84309 - protein, 37 aa, Homo sapiens
  Payload ID: 16771
  Gene Symbol: STRADB
  Gene Name: STE20-related kinase adaptor beta
  ENSP ID: ENSP00000404359
MSLLDCFCTSRTQVESLRPEKQSETSIHQYLEEDLTT

SEQ ID NO: 84310 - protein, 194 aa, Homo sapiens
  Payload ID: 16771
  Gene Symbol: STRADB
  Gene Name: STE20-related kinase adaptor beta
  ENSP ID: ENSP00000409552
MTQTSPFYNGRGFDNLTSVHLARHTPTGTLVTIKITNLENCNEERLKALQKAVILSHFFRHPNITTYWTVFTVGSWLWVISPFMAYGSASQLLRTYFPEGMSETLIRNILFGAVRGLNYLHQNGCIHRSIKASHILISGDGLVTLSGLSHLHSLVKHGQRHRAVYDFPQFSTSVQPWLSPELLRQDLHGYNVKS

SEQ ID NO: 84311 - protein, 89 aa, Homo sapiens
  Payload ID: 16771
  Gene Symbol: STRADB
  Gene Name: STE20-related kinase adaptor beta
  ENSP ID: ENSP00000413574
  MOD_RES (1)..(1): Any amino acid
XPVGRCLSRTCIELSLVQLCLQQDPEKRPSASSLLSHVFFKQMKEESQDSILSLLPPAYNKPSISLPPVLPWTEPECDFPDEKDSYWEF

SEQ ID NO: 84312 - protein, 342 aa, Homo sapiens
  Payload ID: 16772
  Gene Symbol: STEAP1B
  Gene Name: STEAP family member 1B
  Uniprot ID: Q6NZ63
  ENSP ID: ENSP00000384370
MESRKDITNQEEIWKMKPRRNLEDNDYLHEDTGETSMLKRPVLLHLQQTAHADEFDCPSELQHAQELFPQWHLPIKIAAVMASLTFLYTLLREVIHPLATSHQQYFYKIPILVINKVLPMVSITLLALVYLPGVIAAIVQVHNGTKYKKFPHWLDKWMLTRKQFGLLSLFFAVLHAIYTLSYAMRRSYRYKLLNWAYQQVQQNKEDAWIEHDVWRMEIYVSLGIVGLAILALLAVTSIPSVSDSLTWREFHYIQAILTGSLVALCNFQATKLAKTQLVGTPNFWQEQQCGIHFPPPSKTRSYIYFILSAASPSKGNVSSHMFQLHLENLNKKDKLLLIIFQI

SEQ ID NO: 84313 - protein, 245 aa, Homo sapiens
  Payload ID: 16772
  Gene Symbol: STEAP1B
  Gene Name: STEAP family member 1B
  Uniprot ID: Q6NZ63
  ENSP ID: ENSP00000385239
MESRKDITNQEEIWKMKPRRNLEDNDYLQTAHADEFDCPSELQHAQELFPQWHLPIKIAAVMASLTFLYTLLREVIHPLATSHQQYFYKIPILVINKVLPMVSITLLALVYLPGVIAAIVQVHNGTKYKKFPHWLDKWMLTRKQFGLLSLFFAVLHAIYTLSYAMRRSYRYKLLNWAYQQVQQNKEDAWIEHDVWRMEIYVSLGIVGLAILALLAVTSIPSVSDSLTWREFHYIQVHGRINFLTL

SEQ ID NO: 84314 - protein, 216 aa, Homo sapiens
  Payload ID: 16772
  Gene Symbol: STEAP1B
  Gene Name: STEAP family member 1B
  ENSP ID: ENSP00000408954
MESRKDITNQEEIWKMKPRRNLEDNDYLHEDTGETSMLKRPVLLHLQQTAHADEFDCPSELQHAQELFPQWHLPIKIAAVMASLTFLYTLLREVIHPLATSHQQYFYKIPILVINKVLPMVSITLLALVYLPGVIAAIVQVHNGTKYKKFPHWLDKWMLTRKQFGLLSLFFAVLHAIYTLSYAMRRSYRYKLLNWAYQQVQQNKEDAWIEHDVWRM

SEQ ID NO: 84315 - protein, 254 aa, Homo sapiens
  Payload ID: 16772
  Gene Symbol: STEAP1B
  Gene Name: STEAP family member 1B
  ENSP ID: ENSP00000416608
MESRKDITNQEEIWKMKPRRNLEDNDYLHEDTGETSMLKRPVLLHLQQTAHADEFDCPSELQHAQELFPQWHLPIKIAAVMASLTFLYTLLREVIHPLATSHQQYFYKIPILVINKVLPMVSITLLALVYLPGVIAAIVQVHNGTKYKKFPHWLDKWMLTRKQFGLLSLFFAVLHAIYTLSYAMRRSYRYKLLNWAYQQVQQNKEDAWIEHDVWRMEIYVSLGIVGLAILALLAVTSIPSVSDSLTWREFHYIQ

SEQ ID NO: 84316 - protein, 490 aa, Homo sapiens
  Payload ID: 16773
  Gene Symbol: STEAP2
  Gene Name: STEAP family member 2, metalloreductase
  Uniprot ID: Q8NFT2
  ENSP ID: ENSP00000287908
MESISMMGSPKSLSETFLPNGINGIKDARKVTVGVIGSGDFAKSLTIRLIRCGYHVVIGSRNPKFASEFFPHVVDVTHHEDALTKTNIIFVAIHREHYTSLWDLRHLLVGKILIDVSNNMRINQYPESNAEYLASLFPDSLIVKGFNVVSAWALQLGPKDASRQVYICSNNIQARQQVIELARQLNFIPIDLGSLSSAREIENLPLRLFTLWRGPVVVAISLATFFFLYSFVRDVIHPYARNQQSDFYKIPIEIVNKTLPIVAITLLSLVYLAGLLAAAYQLYYGTKYRRFPPWLETWLQCRKQLGLLSFFFAMVHVAYSLCLPMRRSERYLFLNMAYQQVHANIENSWNEEEVWRIEMYISFGIMSLGLLSLLAVTSIPSVSNALNWREFSFIQSTLGYVALLISTFHVLIYGWKRAFEEEYYRFYTPPNFVLALVLPSIVILGKIILFLPCISRKLKRIKKGWEKSQFLEEGMGGTIPHVSPERVTVM

SEQ ID NO: 84317 - protein, 490 aa, Homo sapiens; identical to SEQ ID NO: 84316
  Payload ID: 16773
  Gene Symbol: STEAP2
  Gene Name: STEAP family member 2, metalloreductase
  Uniprot ID: Q8NFT2
  ENSP ID: ENSP00000378119

SEQ ID NO: 84318 - protein, 490 aa, Homo sapiens; identical to SEQ ID NO: 84316
  Payload ID: 16773
  Gene Symbol: STEAP2
  Gene Name: STEAP family member 2, metalloreductase
  Uniprot ID: Q8NFT2
  ENSP ID: ENSP00000378120

SEQ ID NO: 84319 - protein, 454 aa, Homo sapiens
  Payload ID: 16773
  Gene Symbol: STEAP2
  Gene Name: STEAP family member 2, metalloreductase
  Uniprot ID: Q8NFT2
  ENSP ID: ENSP00000378123
MESISMMGSPKSLSETFLPNGINGIKDARKVTVGVIGSGDFAKSLTIRLIRCGYHVVIGSRNPKFASEFFPHVVDVTHHEDALTKTNIIFVAIHREHYTSLWDLRHLLVGKILIDVSNNMRINQYPESNAEYLASLFPDSLIVKGFNVVSAWALQLGPKDASRQVYICSNNIQARQQVIELARQLNFIPIDLGSLSSAREIENLPLRLFTLWRGPVVVAISLATFFFLYSFVRDVIHPYARNQQSDFYKIPIEIVNKTLPIVAITLLSLVYLAGLLAAAYQLYYGTKYRRFPPWLETWLQCRKQLGLLSFFFAMVHVAYSLCLPMRRSERYLFLNMAYQQVHANIENSWNEEEVWRIEMYISFGIMSLGLLSLLAVTSIPSVSNALNWREFSFIQSTLGYVALLISTFHVLIYGWKRAFEEEYYRFYTPPNFVLALVLPSIVILDLLQLCRYPD

SEQ ID NO: 84320 - protein, 454 aa, Homo sapiens; identical to SEQ ID NO: 84319
  Payload ID: 16773
  Gene Symbol: STEAP2
  Gene Name: STEAP family member 2, metalloreductase
  Uniprot ID: Q8NFT2
  ENSP ID: ENSP00000378125

SEQ ID NO: 84321 - protein, 419 aa, Homo sapiens
  Payload ID: 16773
  Gene Symbol: STEAP2
  Gene Name: STEAP family member 2, metalloreductase
  Uniprot ID: Q8NFT2
  ENSP ID: ENSP00000378128
MESISMMGSPKSLSETFLPNGINGIKDARKVTVGVIGSGDFAKSLTIRLIRCGYHVVIGSRNPKFASEFFPHVVDVTHHEDALTKTNIIFVAIHREHYTSLWDLRHLLVGKILIDVSNNMRINQYPESNAEYLASLFPDSLIVKGFNVVSAWALQLGPKDASRQVYICSNNIQARQQVIELARQLNFIPIDLGSLSSAREIENLPLRLFTLWRGPVVVAISLATFFFLYSFVRDVIHPYARNQQSDFYKIPIEIVNKTLPIVAITLLSLVYLAGLLAAAYQLYYGTKYRRFPPWLETWLQCRKQLGLLSFFFAMVHVAYSLCLPMRRSERYLFLNMAYQQVHANIENSWNEEEVWRIEMYISFGIMSLGLLSLLAVTSIPSVSNALNWREFSFIQIFCSFADTQTELELEFVFLLTLLL

SEQ ID NO: 84322 - protein, 403 aa, Homo sapiens
  Payload ID: 16773
  Gene Symbol: STEAP2
  Gene Name: STEAP family member 2, metalloreductase
  ENSP ID: ENSP00000384191
MESISMMGSPKSLSETFLPNGINGIKDARKVTVGVIGSGDFAKSLTIRLIRCGYHVVIGSRNPKFASEFFPHVVDVTHHEDALTKTNIIFVAIHREHYTSLWDLRHLLVGKILIDVSNNMRINQYPESNAEYLASLFPDSLIVKGFNVVSAWALQLGPKDASRQVYICSNNIQARQQVIELARQLNFIPIDLGSLSSAREIENLPLRLFTLWRGPVVVAISLATFFFLYSFVRDVIHPYARNQQSDFYKIPIEIVNKTLPIVAITLLSLVYLAGLLAAAYQLYYGTKYRRFPPWLETWLQCRKQLGLLSFFFAMVHVAYSLCLPMRRSERYLFLNMAYQQVHANIENSWNEEEVWRIEMYISFGIMSLGLLSLLAVTSIPSVSNALNWREFSFIQWPSATLLS

SEQ ID NO: 84323 - protein, 181 aa, Homo sapiens
  Payload ID: 16773
  Gene Symbol: STEAP2
  Gene Name: STEAP family member 2, metalloreductase
  ENSP ID: ENSP00000401783
MESISMMGSPKSLSETFLPNGINGIKDARKVTVGVIGSGDFAKSLTIRLIRCGYHVVIGSRNPKFASEFFPHVVDVTHHEDALTKTNIIFVAIHREHYTSLWDLRHLLVGKILIDVSNNMRINQYPESNAEYLASLFPDSLIVKGFNVVSAWALQLGPKDASRQVYICSNNIQARQQVIEL

SEQ ID NO: 84324 - protein, 88 aa, Homo sapiens
  Payload ID: 16773
  Gene Symbol: STEAP2
  Gene Name: STEAP family member 2, metalloreductase
  ENSP ID: ENSP00000415931
MESISMMGSPKSLSETFLPNGINGIKDARKVTVGVIGSGDFAKSLTIRLIRCGYHVVIGSRNPKFASEFFPHVVDVTHHEDALTKTNI

SEQ ID NO: 84325 - protein, 488 aa, Homo sapiens
  Payload ID: 16774
  Gene Symbol: STEAP3
  Gene Name: STEAP family member 3, metalloreductase
  Uniprot ID: Q658P3
  ENSP ID: ENSP00000376818
MPEEMDKPLISLHLVDSDSSLAKVPDEAPKVGILGSGDFARSLATRLVGSGFKVVVGSRNPKRTARLFPSAAQVTFQEEAVSSPEVIFVAVFREHYSSLCSLSDQLAGKILVDVSNPTEQEHLQHRESNAEYLASLFPTCTVVKAFNVISAWTLQAGPRDGNRQVPICGDQPEAKRAVSEMALAMGFMPVDMGSLASAWEVEAMPLRLLPAWKVPTLLALGLFVCFYAYNFVRDVLQPYVQESQNKFFKLPVSVVNTTLPCVAYVLLSLVYLPGVLAAALQLRRGTKYQRFPDWLDHWLQHRKQIGLLSFFCAALHALYSFCLPLRRAHRYDLVNLAVKQVLANKSHLWVEEEVWRMEIYLSLGVLALGTLSLLAVTSLPSIANSLNWREFSFVQSSLGFVALVLSTLHTLTYGWTRAFEESRYKFYLPPTFTLTLLVPCVVILAKALFLLPCISRRLARIRRGWERESTIKFTLPTDHALAEKTSHV

SEQ ID NO: 84326 - protein, 488 aa, Homo sapiens; identical to SEQ ID NO: 84325
  Payload ID: 16774
  Gene Symbol: STEAP3
  Gene Name: STEAP family member 3, metalloreductase
  Uniprot ID: Q658P3
  ENSP ID: ENSP00000376819

SEQ ID NO: 84327 - protein, 498 aa, Homo sapiens
  Payload ID: 16774
  Gene Symbol: STEAP3
  Gene Name: STEAP family member 3, metalloreductase
  Uniprot ID: Q658P3
  ENSP ID: ENSP00000376822
MSHQPAVATKMPEEMDKPLISLHLVDSDSSLAKVPDEAPKVGILGSGDFARSLATRLVGSGFKVVVGSRNPKRTARLFPSAAQVTFQEEAVSSPEVIFVAVFREHYSSLCSLSDQLAGKILVDVSNPTEQEHLQHRESNAEYLASLFPTCTVVKAFNVISAWTLQAGPRDGNRQVPICGDQPEAKRAVSEMALAMGFMPVDMGSLASAWEVEAMPLRLLPAWKVPTLLALGLFVCFYAYNFVRDVLQPYVQESQNKFFKLPVSVVNTTLPCVAYVLLSLVYLPGVLAAALQLRRGTKYQRFPDWLDHWLQHRKQIGLLSFFCAALHALYSFCLPLRRAHRYDLVNLAVKQVLANKSHLWVEEEVWRMEIYLSLGVLALGTLSLLAVTSLPSIANSLNWREFSFVQSSLGFVALVLSTLHTLTYGWTRAFEESRYKFYLPPTFTLTLLVPCVVILAKALFLLPCISRRLARIRRGWERESTIKFTLPTDHALAEKTSHV

SEQ ID NO: 84328 - protein, 457 aa, Homo sapiens
  Payload ID: 16774
  Gene Symbol: STEAP3
  Gene Name: STEAP family member 3, metalloreductase
  ENSP ID: ENSP00000386510
MPEEMDKPLISLHLVDSDSSLAKVPDEAPKVGILGSGDFARSLATRLVGSGFKVVVGSRNPKRTARLFPSAAQVTFQEEAVSSPEVIFVAVFREHYSSLCSLSDQLAGKILVDVSNPTEQEHLQHRESNAEYLASLFPTCTVVKAFNVISAWTLQAGPRDGNRQVPICGDQPEAKRAVSEMALAMGFMPVDMGSLASAWEVEAMPLRLLPAWKVPTLLALGLFVCFYAYNFVRDVLQPYVQESQNKFFKLPVSVVNTTLPCVAYVLLSLVYLPGVLAAALQLRRGTKYQRFPDWLDHWLQHRKQIGLLSFFCAALHALYSFCLPLRRAHRYDLVNLAVKQVLANKSHLWVEEEVWRMEIYLSLGVLALGTLSLLAVTSLPSIANSLNWREFSFVQCVATSSAGNTGSGTRRPESQSQDPHLPAPHHQTSFLGPRSFCCSLVPVSTPYGHQEDLSWTR

SEQ ID NO: 84329 - protein, 283 aa, Homo sapiens
  Payload ID: 16775
  Gene Symbol: STEAP4
  Gene Name: STEAP family member 4
  Uniprot ID: Q687X5
  ENSP ID: ENSP00000305545
MEKTCIDALPLTMNSSEKQETVCIFGTGDFGRSLGLKMLQCGYSVVFGSRNPQKTTLLPSGAEVLSYSEAAKKSGIIIIAIHREHYDFLTELTEVLNGKILVDISNNLKINQYPESNAEYLAHLVPGAHVVKAFNTISAWALQSGALDASRQAILKKENPFSTSSAWLSDSYVALGILGFFLFVLLGITSLPSVSNAVNWREFRFVQSKLGYLTLILCTAHTLVYGGKRFLSPSNLRWYLPAAYVLGLIIPCTVLVIKFVLIMPCVDNTLTRIRQGWERNSKH

SEQ ID NO: 84330 - protein, 459 aa, Homo sapiens
  Payload ID: 16775
  Gene Symbol: STEAP4
  Gene Name: STEAP family member 4
  Uniprot ID: Q687X5
  ENSP ID: ENSP00000369419
MEKTCIDALPLTMNSSEKQETVCIFGTGDFGRSLGLKMLQCGYSVVFGSRNPQKTTLLPSGAEVLSYSEAAKKSGIIIIAIHREHYDFLTELTEVLNGKILVDISNNLKINQYPESNAEYLAHLVPGAHVVKAFNTISAWALQSGALDASRQVFVCGNDSKAKQRVMDIVRNLGLTPMDQGSLMAAKEIEKYPLQLFPMWRFPFYLSAVLCVFLFFYCVIRDVIYPYVYEKKDNTFRMAISIPNRIFPITALTLLALVYLPGVIAAILQLYRGTKYRRFPDWLDHWMLCRKQLGLVALGFAFLHVLYTLVIPIRYYVRWRLGNLTVTQAILKKENPFSTSSAWLSDSYVALGILGFFLFVLLGITSLPSVSNAVNWREFRFVQSKLGYLTLILCTAHTLVYGGKRFLSPSNLRWYLPAAYVLGLIIPCTVLVIKFVLIMPCVDNTLTRIRQGWERNSKH

SEQ ID NO: 84331 - protein, 339 aa, Homo sapiens
  Payload ID: 16775
  Gene Symbol: STEAP4
  Gene Name: STEAP family member 4
  ENSP ID: ENSP00000394399
MEKTCIDALPLTMNSSEKQETVCIFGTGDFGRSLGLKMLQCGYSVVFGSRNPQKTTLLPSGAEVLSYSEAAKKSGIIIIAIHREHYDFLTELTEVLNGKILVDISNNLKINQYPESNAEYLAHLVPGAHVVKAFNTISAWALQSGALDASRQVFVCGNDSKAKQRVMDIVRNLGLTPMDQGSLMAAKEIEKYPLQLFPMWRFPFYLSAVLCVFLFFYCVIRDVIYPYVYEKKDNTFRMAISIPNRIFPITALTLLALVYLPGVIAAILQLYRGTKYRRFPDWLDHWMLCRKQLGLVALGFAFLHVLYTLVIPIRYYVRWRLGNLTVTQVNLFLYIFFCS

SEQ ID NO: 84332 - protein, 359 aa, Homo sapiens
  Payload ID: 16776
  Gene Symbol: SCD
  Gene Name: stearoyl-CoA desaturase (delta-9-desaturase)
  Uniprot ID: O00767
  ENSP ID: ENSP00000359380
MPAHLLQDDISSSYTTTTTITAPPSRVLQNGGDKLETMPLYLEDDIRPDIKDDIYDPTYKDKEGPSPKVEYVWRNIILMSLLHLGALYGITLIPTCKFYTWLWGVFYYFVSALGITAGAHRLWSHRSYKARLPLRLFLIIANTMAFQNDVYEWARDHRAHHKFSETHADPHNSRRGFFFSHVGWLLVRKHPAVKEKGSTLDLSDLEAEKLVMFQRRYYKPGLLMMCFILPTLVPWYFWGETFQNSVFVATFLRYAVVLNATWLVNSAAHLFGYRPYDKNISPRENILVSLGAVGEGFHNYHHSFPYDYSASEYRWHINFTTFFIDCMAALGLAYDRKKVSKAAILARIKRTGDGNYKSG

SEQ ID NO: 84333 - protein, 256 aa, Homo sapiens
  Payload ID: 16777
  Gene Symbol: SCD5
  Gene Name: stearoyl-CoA desaturase 5
  Uniprot ID: Q86SK9
  ENSP ID: ENSP00000273908
MPGPATDAGKIPFCDAKEEIRAGLESSEGGGGPERPGARGQRQNIVWRNVVLMSLLHLGAVYSLVLIPKAKPLTLLWAYFCFLLAALGVTAGAHRLWSHRSYRAKLPLRIFLAVANSMAFQNDIFEWSRDHRAHHKYSETDADPHNARRGFFFSHIGWLFVRKHRDVIEKGRKLDVTDLLADPVVRIQRNTQHIQKEGRALNQEAACEMLREWHQGHILKVTLPGLHILALLHTHCNHSEKCCLMLRALSVSLEVF

SEQ ID NO: 84334 - protein, 330 aa, Homo sapiens
  Payload ID: 16777
  Gene Symbol: SCD5
  Gene Name: stearoyl-CoA desaturase 5
  Uniprot ID: Q86SK9
  ENSP ID: ENSP00000316329
MPGPATDAGKIPFCDAKEEIRAGLESSEGGGGPERPGARGQRQNIVWRNVVLMSLLHLGAVYSLVLIPKAKPLTLLWAYFCFLLAALGVTAGAHRLWSHRSYRAKLPLRIFLAVANSMAFQNDIFEWSRDHRAHHKYSETDADPHNARRGFFFSHIGWLFVRKHRDVIEKGRKLDVTDLLADPVVRIQRKYYKISVVLMCFVVPTLVPWYIWGESLWNSYFLASILRYTISLNISWLVNSAAHMYGNRPYDKHISPRQNPLVALGAIGEGFHNYHHTFPFDYSASEFGLNFNPTTWFIDFMCWLGLATDRKRATKPMIEARKARTGDSSA

SEQ ID NO: 84335 - protein, 277 aa, Homo sapiens
  Payload ID: 16778
  Gene Symbol: SLBP
  Gene Name: stem-loop binding protein
  ENSP ID: ENSP00000316490
MACRPRSPPRHQSRCDGDASPPSPARWSLGRKRRADGRRWRPEDAEEAEHRGAERRPESFTTPEGPKPRSRCSDWASAVEEDEMRTRVNKEMASNIYFALRYKRKLLINDFGRERKSSSGSSDSKESMSTVPADFETDESVLMRRQKQINYGKNTIAYDRYIKEVPRHLRQPGIHPKTPNKFKKYSRRSWDQQIKLWKVALHFWDPPAEEGCDLQEIHPVDLESAESSSEPQTSSQDDFDVYSGTPTKVRHMDSQVEDEFDLEACLTEPLRDFSAMS

SEQ ID NO: 84336 - protein, 231 aa, Homo sapiens
  Payload ID: 16778
  Gene Symbol: SLBP
  Gene Name: stem-loop binding protein
  Uniprot ID: Q14493
  ENSP ID: ENSP00000406322
MACRPRSPPRHQSRCDGDASFTTPEGPKPRSRCSDWASAVEEDEMRTRVNKEMARYKRKLLINDFGRERKSSSGSSDSKESMSTVPADFETDESVLMRRQKQINYGKNTIAYDRYIKEVPRHLRQPGIHPKTPNKFKKYSRRSWDQQIKLWKVALHFWDPPAEEGCDLQEIHPVDLESAESSSEPQTSSQDDFDVYSGTPTKVRHMDSQVEDEFDLEACLTEPLRDFSAMS

SEQ ID NO: 84337 - protein, 186 aa, Homo sapiens
  Payload ID: 16778
  Gene Symbol: SLBP
  Gene Name: stem-loop binding protein
  ENSP ID: ENSP00000417359
  MOD_RES (1)..(1): Any amino acid
XKAVGGGARRARERRRGDAGFCLRPCPALLCALCPRRRRLSLGPALRARPEDAEEAEHRGAERRPESFTTPEGPKPRSRCSDWASAVEEDEMRTRVNKEMARYKRKLLINDFGRERKSSSGSSDSKESMSTVPADFETDESVLMRRQKQINYGKNTIAYDRYIKEVPRHLRQPGIHPKTPNKFKKY

SEQ ID NO: 84338 - protein, 270 aa, Homo sapiens
  Payload ID: 16778
  Gene Symbol: SLBP
  Gene Name: stem-loop binding protein
  Uniprot ID: Q14493
  ENSP ID: ENSP00000417686
MACRPRSPPRHQSRCDGDASPPSPARWSLGRKRRADGRRWRPEDAEEAEHRGAERRPESFTTPEGPKPRSRCSDWASAVEEDEMRTRVNKEMARYKRKLLINDFGRERKSSSGSSDSKESMSTVPADFETDESVLMRRQKQINYGKNTIAYDRYIKEVPRHLRQPGIHPKTPNKFKKYSRRSWDQQIKLWKVALHFWDPPAEEGCDLQEIHPVDLESAESSSEPQTSSQDDFDVYSGTPTKVRHMDSQVEDEFDLEACLTEPLRDFSAMS

SEQ ID NO: 84339 - protein, 235 aa, Homo sapiens
  Payload ID: 16778
  Gene Symbol: SLBP
  Gene Name: stem-loop binding protein
  ENSP ID: ENSP00000418658
MACRPRSPPRHQSRCDGDASPPSPARWSLGRKRRADGRRWRPEDAEEAEHRGAERRPERYKRKLLINDFGRERKSSSGSSDSKESMSTVPADFETDESVLMRRQKQINYGKNTIAYDRYIKEVPRHLRQPGIHPKTPNKFKKYSRRSWDQQIKLWKVALHFWDPPAEEGCDLQEIHPVDLESAESSSEPQTSSQDDFDVYSGTPTKVRHMDSQVEDEFDLEACLTEPLRDFSAMS

SEQ ID NO: 84340 - protein, 225 aa, Homo sapiens
  Payload ID: 16778
  Gene Symbol: SLBP
  Gene Name: stem-loop binding protein
  ENSP ID: ENSP00000426891
  MOD_RES (1)..(1): Any amino acid
XPADRVPPRSPPSPARWSLGRKRRADGRRWRPEDAEEAEHRGAERRPERYKRKLLINDFGRERKSSSGSSDSKESMSTVPADFETDESVLMRRQKQINYGKNTIAYDRYIKEVPRHLRQPGIHPKTPNKFKKYSRRSWDQQIKLWKVALHFWDPPAEEGCDLQEIHPVDLESAESSSEPQTSSQDDFDVYSGTPTKVRHMDSQVEDEFDLEACLTEPLRDFSAMS

SEQ ID NO: 84341 - protein, 119 aa, Homo sapiens
  Payload ID: 16779
  Gene Symbol: STRC
  Gene Name: stereocilin
  ENSP ID: ENSP00000394755
  MOD_RES (1)..(1): Any amino acid
XSLAAIRDYSPGMRPEQKEALAKRLLAPELFGEVPAWPQELLWAVLPLLPHLPLENFLQLSPHQIQALEDSWPAAGLGPGHARHVLRSLVNQSVQDGEEQVRRWHMNFWVCCAHLEERC

SEQ ID NO: 84342 - protein, 351 aa, Homo sapiens
  Payload ID: 16779
  Gene Symbol: STRC
  Gene Name: stereocilin
  ENSP ID: ENSP00000394866
MALSLWPLLLLLLLLLLLSFAVTLAPTGPHSLDPGLSFLKSLLSTLDQAPQGSLSRSRFFTFLANISSSFEPGRMGEGPVGEPPPLQPPALRLHDFLVTLRGSPDWEPMLGLLGDMLALLGQEQTPRDFLVHQAGVLGGLVEVLLGALVPGGPPTPTRPPCTRDGPSDCVLAADWLPSLLLLLEGTRWQALVQVQPSVDPTNATGLDGREAAPHFLQGLLGLLTPTGELGSKEALWGGLLRTVGAPLYAAFQEGLLRVTHSLQDEVFSILGQPEPDTNGQCQGGNLQQLLLWGVRHNLSWDVQALGFLSGSPPPPPALLHCLSTGVPLPRASQPSAHISPRQRRAITVEAL

SEQ ID NO: 84343 - protein, 1775 aa, Homo sapiens
  Payload ID: 16779
  Gene Symbol: STRC
  Gene Name: stereocilin
  Uniprot ID: Q7RTU9
  ENSP ID: ENSP00000401513
MALSLWPLLLLLLLLLLLSFAVTLAPTGPHSLDPGLSFLKSLLSTLDQAPQGSLSRSRFFTFLANISSSFEPGRMGEGPVGEPPPLQPPALRLHDFLVTLRGSPDWEPMLGLLGDMLALLGQEQTPRDFLVHQAGVLGGLVEVLLGALVPGGPPTPTRPPCTRDGPSDCVLAADWLPSLLLLLEGTRWQALVQVQPSVDPTNATGLDGREAAPHFLQGLLGLLTPTGELGSKEALWGGLLRTVGAPLYAAFQEGLLRVTHSLQDEVFSILGQPEPDTNGQCQGGNLQQLLLWGVRHNLSWDVQALGFLSGSPPPPPALLHCLSTGVPLPRASQPSAHISPRQRRAITVEALCENHLGPAPPYSISNFSIHLLCQHTKPATPQPHPSTTAICQTAVWYAVSWAPGAQGWLQACHDQFPDEFLDAICSNLSFSALSGSNRRLVKRLCAGLLPPPTSCPEGLPPVPLTPDIFWGCFLENETLWAERLCGEASLQAVPPSNQAWVQHVCQGPTPDVTASPPCHIGPCGERCPDGGSFLVMVCANDTMYEVLVPFWPWLAGQCRISRGGNDTCFLEGLLGPLLPSLPPLGPSPLCLTPGPFLLGMLSQLPRCQSSVPALAHPTRLHYLLRLLTFLLGPGAGGAEAQGMLGRALLLSSLPDNCSFWDAFRPEGRRSVLRTIGEYLEQDEEQPTPSGFEPTVNPSSGISKMELLACFSPVLWDLLQREKSVWALQILVQAYLHMPPENLQQLVLSAEREAAQGFLTLMLQGKLQGKLQVPPSEEQALGRLTALLLQRYPRLTSQLFIDLSPLIPFLAVSDLMRFPPSLLANDSVLAAIRDYSPGMRPEQKEALAKRLLAPELFGEVPAWPQELLWAVLPLLPHLPLENFLQLSPHQIQALEDSWPAAGLGPGHARHVLRSLVNQSVQDGEEQVRRLGPLACFLSPEELQSLVPLSDPTGPVERGLLECAANGTLSPEGRVAYELLGVLRSSGGAVLSPRELRVWAPLFSQLGLRFLQELSEPQLRAMLPVLQGTSVTPAQAVLLLGRLLPRHDLSLEELCSLHLLLPGLSPQTLQAIPRRVLVGACSCLAPELSRLSACQTAALLQTFRVKDGVKNMGTTGAGPAVCIPGQPIPTTWPDCLLPLLPLKLLQLDSLALLANRRRYWELPWSEQQAQFLWKKMQVPTNLTLRNLQALGTLAGGMSCEFLQQINSMVDFLEVVHMIYQLPTRVRGSLRACIWAELQRRMAMPEPEWTTVGPELNGLDSKLLLDLPIQLMDRLSNESIMLVVELVQRAPEQLLALTPLHQAALAERALQNLAPKETPVSGEVLETLGPLVGFLGTESTRQIPLQILLSHLSQLQGFCLGETFATELGWLLLQESVLGKPELWSQDEVEQAGRLVFTLSTEAISLIPREALGPETLERLLEKQQSWEQSRVGQLCREPQLAAKKAALVAGVVRPAAEDLPEPVPNCADVRGTFPAAWSATQIAEMELSDFEDCLTLFAGDPGLGPEELRAAMGKAKQLWGPPRGFRPEQILQLGRLLIGLGDRELQELILVDWGVLSTLGQIDGWSTTQLRIVVSSFLRQSGRHVSHLDFVHLTALGYTLCGLRPEELQHISSWEFSQAALFLGTLHLQCSEEQLEVLAHLLVLPGGFGPISNWGPEIFTEIGTIAAGIPDLALSALLRGQIQGVTPLAISVIPPPKFAVVFSPIQLSSLTSAQAVAVTPEQMAFLSPEQRRAVAWAQHEGKESPEQQGRSTAWGLQDWSRPSWSLVLTISFLGHLL

SEQ ID NO: 84344 - protein, 663 aa, Homo sapiens
  Payload ID: 16779
  Gene Symbol: STRC
  Gene Name: stereocilin
  ENSP ID: ENSP00000407303
TFLANISSSFEPGRMGEGPVGEPPPLQPPALRLHDFLVTLRGSPDWEPMLGLLGDMLALLGQEQTPRDFLVHQAGVLGGLVEVLLGALVPGGPPTPTRPPCTRDGPSDCVLAADWLPSLLLLLEGTRWQALVQVQPSVDPTNATGLDGREAAPHFLQGLLGLLTPTGELGSKEALWGGLLRTVGAPLYAAFQEGLLRVTHSLQDEVFSILGQPEPDTNGQCQGGNLQQLLLWGVRHNLSWDVQALGFLSGSPPPPPALLHCLSTGVPLPRASQPSAHISPRQRRAITVEALCENHLGPAPPYSISNFSIHLLCQHTKPATPQPHPSTTAICQTAVWYAVSWAPGAQGWLQACHDQFPDEFLDAICSNLSFSALSGSNRRLVKRLCAGLLPPPTSCPEGLPPVPLTPDIFWGCFLENETLWAERLCGEASLQAVPPSNQAWVQHVCQGPTPDVTASPPCHIGPCGERCPDGGSFLVMVCANDTMYEVLVPFWPWLAGQCRISRGGNDTCFLEGLLGPLLPSLPPLGPSPLCLTPGPFLLGMLSQLPRCQSSVPALAHPTRLHYLLRLLTFLLGPGAGGAEAQGMLGRALLLSSLPDNCSFWDAFRPEGRRSVLRTIGEYLEQDEEQPTPSGFEPTVNPSSGISKMELLACFSVSALPEGKLLEQ

SEQ ID NO: 84345 - protein, 969 aa, Homo sapiens
  Payload ID: 16779
  Gene Symbol: STRC
  Gene Name: stereocilin
  ENSP ID: ENSP00000415991
MALSLWPLLLLLLLLLLLSFAVTLAPTGPHSLDPGLSFLKSLLSTLDQAPQGSLSRSRFFTFLANISSSFEPGRMGEGPVGEPPPLQPPALRLHDFLVTLRGSPDWEPMLGLLGDMLALLGQEQTPRDFLVHQAGVLGGLVEVLLGALVPGGPPTPTRPPCTRDGPSDCVLAADWLPSLLLLLEGTRWQALVQVQPSVDPTNATGLDGREAAPHFLQGLLGLLTPTGELGSKEALWGGLLRTVGAPLYAAFQEGLLRVTHSLQDEVFSILGQPEPDTNGQCQGGNLQQLLLWGVRHNLSWDVQALGFLSGSPPPPPALLHCLSTGVPLPRASQPSAHISPRQRRAITVEALCENHLGPAPPYSISNFSIHLLCQHTKPATPQPHPSTTAICQTAVWYAVSWAPGAQGWLQACHDQFPDEFLDAICSNLSFSALSGSNRRLVKRLCAGLLPPPTSCPEGLPPVPLTPDIFWGCFLENETLWAERLCGEASLQAVPPSNQAWVQHVCQGPTPDVTASPPCHIGPCGERCPDGGSFLVMVCANDTMYEVLVPFWPWLAGQCRISRGGNDTCFLEGLLGPLLPSLPPLGPSPLCLTPGPFLLGMLSQLPRCQSSVPALAHPTRLHYLLRLLTFLLGPGAGGAEAQGMLGRALLLSSLPDNCSFWDAFRPEGRRSVLRTIGEYLEQDEEQPTPSGFEPTVNPSSGISKMELLACFSPVLWDLLQREKSVWALQILVQAYLHMPPENLQQLVLSAEREAAQGFLTLMLQGKLQGKLQVPPSEEQALGRLTALLLQRYPRLTSQLFIDLSPLIPFLAVSDLMRFPPSLLANDSVQQGYRGSEENSLEEDKGLRPMTPRSLAAIRDYSPGMRPEQKEALAKRLLAPELFGEVPAWPQELLWAVLPLLPHLPLENFLQLSPHQIQALEDSWPAAGLGPGHARHVLRSLVNQSVQDGEEQVRRWHMNFWVCCAHLEERC

SEQ ID NO: 84346 - protein, 1002 aa, Homo sapiens
  Payload ID: 16779
  Gene Symbol: STRC
  Gene Name: stereocilin
  ENSP ID: ENSP00000440413
MELLACFSPVLWDLLQREKSVWALQILVQAYLHMPPENLQQLVLSAEREAAQGFLTLMLQGKLQGKLQVPPSEEQALGRLTALLLQRYPRLTSQLFIDLSPLIPFLAVSDLMRFPPSLLANDSVQQGYRGSEENSLEEDKGLRPMTPRSLAAIRDYSPGMRPEQKEALAKRLLAPELFGEVPAWPQELLWAVLPLLPHLPLENFLQLSPHQIQALEDSWPAAGLGPGHARHVLRSLVNQSVQDGEEQVRRLGPLACFLSPEELQSLVPLSDPTGPVERGLLECAANGTLSPEGRVAYELLGVLRSSGGAVLSPRELRVWAPLFSQLGLRFLQELSEPQLRAMLPVLQGTSVTPAQAVLLLGRLLPRHDLLQLDSLALLANRRRYWELPWSEQQAQFLWKKMQVPTNLTLRNLQALGTLAGGMSCEFLQQINSMVDFLEVVHMIYQLPTRVRGSLRACIWAELQRRMAMPEPEWTTVGPELNGLDSKLLLDLPIQLMDRLSNESIMLVVELVQRAPEQLLALTPLHQAALAERALQNLAPKETPVSGEVLETLGPLVGFLGTESTRQIPLQILLSHLSQLQGFCLGETFATELGWLLLQESVLGKPELWSQDEVEQAGRLVFTLSTEAISLIPREALGPETLERLLEKQQSWEQSRVGQLCREPQLAAKKAALVAGVVRPAAEDLPEPVPNCADVRGTFPAAWSATQIAEMELSDFEDCLTLFAGDPGLGPEELRAAMGKAKQLWGPPRGFRPEQILQLGRLLIGLGDRELQELILVDWGVLSTLGQIDGWSTTQLRIVVSSFLRQSGRHVSHLDFVHLTALGYTLCGLRPEELQHISSWEFSQAALFLGTLHLQCSEEQLEVLAHLLVLPGGFGPISNWGPEIFTEIGTIAAGIPDLALSALLRGQIQGVTPLAISVIPPPKFAVVFSPIQLSSLTSAQAVAVTPEQMAFLSPEQRRAVAWAQHEGKESPEQQGRSTAWGLQDWSRPSWSLVLTISFLGHLL

SEQ ID NO: 84347 - protein, 107 aa, Homo sapiens
  Payload ID: 16780
  Gene Symbol: SARM1
  Gene Name: sterile alpha and TIR motif containing 1
  ENSP ID: ENSP00000462228
  MOD_RES (1)..(1): Any amino acid
XASLLKVHLQLHGFSVFIDVEKLEAGKFEDKLIQSVMGARNFVLVLSPGALDKCMQDHDCKDWVHKEIVTALSCGKNIVPIIDGFEWPEPQVLPEDMQAVLTFNGIK

SEQ ID NO: 84348 - protein, 257 aa, Homo sapiens
  Payload ID: 16780
  Gene Symbol: SARM1
  Gene Name: sterile alpha and TIR motif containing 1
  ENSP ID: ENSP00000462479
  MOD_RES (1)..(1): Any amino acid
XNLADWLGSLDPRFRQYTYGLVSCGLDRSLLHRVSEQQLLEDCGIHLGVHRARILTAARVSDAEGPPSPCCLLPTSEMLHSPLPCTGGKPSGDTPDVFISYRRNSGSQLASLLKVHLQLHGFSVFIDVEKLEAGKFEDKLIQSVMGARNFVLVLSPGALDKCMQDHDCKDWVHKEIVTALSCGKNIVPIIDGFEWPEPQVLPEDMQAVLTFNGIKWSHEYQEATIEKIIRFLQGRSSRDSSAGSDTSLEGAAPMGPT

SEQ ID NO: 84349 - protein, 118 aa, Homo sapiens
  Payload ID: 16780
  Gene Symbol: SARM1
  Gene Name: sterile alpha and TIR motif containing 1
  ENSP ID: ENSP00000464166
  MOD_RES (1)..(1): Any amino acid
XLLPQEQQVDGDLLLRLTEEELQTDLGMKSGITRKRFFRELTELKTFANYSTCDRSNLADWLGSLDPRFRQYTYGLVSCGLDRSLLHRVSEQQLLEDCGIHLGVHRARILTAARAITD

SEQ ID NO: 84350 - protein, 724 aa, Homo sapiens
  Payload ID: 16780
  Gene Symbol: SARM1
  Gene Name: sterile alpha and TIR motif containing 1
  Uniprot ID: Q6SZW1
  ENSP ID: ENSP00000468032
MVLTLLLSAYKLCRFFAMSGPRPGAERLAVPGPDGGGGTGPWWAAGGRGPREVSPGAGTEVQDALERALPELQQALSALKQAGGARAVGAGLAEVFQLVEEAWLLPAVGREVAQGLCDAIRLDGGLDLLLRLLQAPELETRVQAARLLEQILVAENRDRVARIGLGVILNLAKEREPVELARSVAGILEHMFKHSEETCQRLVAAGGLDAVLYWCRRTDPALLRHCALALGNCALHGGQAVQRRMVEKRAAEWLFPLAFSKEDELLRLHACLAVAVLATNKEVEREVERSGTLALVEPLVASLDPGRFARCLVDASDTSQGRGPDDLQRLVPLLDSNRLEAQCIGAFYLCAEAAIKSLQGKTKVFSDIGAIQSLKRLVSYSTNGTKSALAKRALRLLGEEVPRPILPSVPSWKEAEVQTWLQQIGFSKYCESFREQQVDGDLLLRLTEEELQTDLGMKSGITRKRFFRELTELKTFANYSTCDRSNLADWLGSLDPRFRQYTYGLVSCGLDRSLLHRVSEQQLLEDCGIHLGVHRARILTAAREMLHSPLPCTGGKPSGDTPDVFISYRRNSGSQLASLLKVHLQLHGFSVFIDVEKLEAGKFEDKLIQSVMGARNFVLVLSPGALDKCMQDHDCKDWVHKEIVTALSCGKNIVPIIDGFEWPEPQVLPEDMQAVLTFNGIKWSHEYQEATIEKIIRFLQGRSSRDSSAGSDTSLEGAAPMGPT

SEQ ID NO: 84351 - protein, 129 aa, Homo sapiens
  Payload ID: 16781
  Gene Symbol: SAMD1
  Gene Name: sterile alpha motif domain containing 1
  ENSP ID: ENSP00000269724
MAAMNKEGGTASVATGPDSPSPVPLPPGKPALPGADGTPFGCPPGRKEKPSDPVEWTVMDVVEYFTEAGFPEQATAFQEQEIDGKSLLLMQRTDVLTGLSIRLGPALKIYEHHIKVLQQGHFEDDDPDG

SEQ ID NO: 84352 - protein, 432 aa, Homo sapiens
  Payload ID: 16781
  Gene Symbol: SAMD1
  Gene Name: sterile alpha motif domain containing 1
  ENSP ID: ENSP00000431971
MAGPPALPPPETAAAATTAAAASSSAASPHYQEWILDTIDSLRSRKARPDLERICRMVRRRHGPEPERTRAELEKLIQQRAVLRVSYKGSISYRNAARVQPPRRGATPPAPPAPPQQQQPPPPQPQPPPEGGAVRAGGAARPVSLREVVRYLGGSGGAGGRLTRGRVQGLLEEEAAARGRLERTRLGALALPRGDRPGRAPPAASARPSRSKRGGEERVLEKEEEEDDDEDEDEEDDVSEGSEVPESDRPAGAQHHQLNGERGPQSAKERVKEWTPCGPHQGQDEGRGPAPGSGTRQVFSMAAMNKEGGTASVATGPDSPSPVPLPPGKPALPGADGTPFGCPPGRKEKPSDPVEWTVMDVVEYFTEAGFPEQATAFQEQEIDGKSLLLMQRTDVLTGLSIRLGPALKIYEHHIKVLQQGHFEDDDPDGFLG

SEQ ID NO: 84353 - protein, 202 aa, Homo sapiens
  Payload ID: 16782
  Gene Symbol: SAMD10
  Gene Name: sterile alpha motif domain containing 10
  Uniprot ID: Q9BYL1
  ENSP ID: ENSP00000358902
MFTELRSKLSPPRGRAGAVRAGFGERRDVDATAHFSFCRTLLEHTVSAESIPCHLPRTPGTSLTWHDSRSQRAASSRPIKLLQQPGTDTPQGRLYSDHYGLYHTSPSLGGLTRPVVLWSQQDVCKWLKKHCPHNYLVYVEAFSQHAITGRALLRLNAEKLQRMGLAQEAQRQEVLQQVLRLQVREEGRSLQLLSQASFGKMS

SEQ ID NO: 84354 - protein, 106 aa, Homo sapiens
  Payload ID: 16782
  Gene Symbol: SAMD10
  Gene Name: sterile alpha motif domain containing 10
  ENSP ID: ENSP00000404839
MFTELRSKLSPPRGRAGAVRAGFGERRDVDGSVHLQIPYRAFIHSFIDNECGVPLCNQTWIKTPASPDSATAHFSFCRTLLEHTVSAESIPCHLPRTPGTSLTWHD

SEQ ID NO: 84355 - protein, 681 aa, Homo sapiens
  Payload ID: 16783
  Gene Symbol: SAMD11
  Gene Name: sterile alpha motif domain containing 11
  Uniprot ID: Q96NU1
  ENSP ID: ENSP00000342313
MSKGILQVHPPICDCPGCRISSPVNRGRLADKRTVALPAARNLKKERTPSFSASDGDSDGSGPTCGRRPGLKQEDGPHIRIMKRRVHTHWDVNISFREASCSQDGNLPTLISSVHRSRHLVMPEHQSRCEFQRGSLEIGLRPAGDLLGKRLGRSPRISSDCFSEKRARSESPQEALLLPRELGPSMAPEDHYRRLVSALSEASTFEDPQRLYHLGLPSHGEDPPWHDPPHHLPSHDLLRVRQEVAAAALRGPSGLEAHLPSSTAGQRRKQGLAQHREGAAPAAAPSFSERELPQPPPLLSPQNAPHVALGPHLRPPFLGVPSALCQTPGYGFLPPAQAEMFAWQQELLRKQNLARLELPADLLRQKELESARPQLLAPETALRPNDGAEELQRRGALLVLNHGAAPLLALPPQGPPGSGPPTPSRDSARRAPRKGGPGPASARPSESKEMTGARLWAQDGSEDEPPKDSDGEDPETAAVGCRGPTPGQAPAGGAGAEGKGLFPGSTLPLGFPYAVSPYFHTGAVGGLSMDGEEAPAPEDVTKWTVDDVCSFVGGLSGCGEYTRVFREQGIDGETLPLLTEEHLLTNMGLKLGPALKIRAQVARRLGRVFYVASFPVALPLQPPTLRAPERELGTGEQPLSPTTATSPYGGGHALAGQTSPKQENGTLALLPGAPDPSQPLC

SEQ ID NO: 84356 - protein, 589 aa, Homo sapiens
  Payload ID: 16783
  Gene Symbol: SAMD11
  Gene Name: sterile alpha motif domain containing 11
  ENSP ID: ENSP00000349216
  MOD_RES (1)..(1): Any amino acid
XHIRIMKRRVHTHWDVNISFREASCSQDGNLPTLISSVHRSRHLVMPEHQSRCEFQRGSLEIGLRPAGDLLGKRLGRSPRISSDCFSEKRARSESPQEALLLPRELGPSMAPEDHYRRLVSALSEASTFEDPQRLYHLGLPSHDLLRVRQEVAAAALRGPSGLEAHLPSSTAGQRRKQGLAQHREGAAPAAAPSFSERELPQPPPLLSPQNAPHVALGPHLRPPFLGVPSALCQTPGYGFLPPAQAEMFAWQQELLRKQNLARLELPADLLRQKELESARPQLLAPETALRPNDGAEELQRRGALLVLNHGAAPLLALPPQGPPGSGPPTPSRDSARRAPRKGGPGPASARPSESKEMTGARLWAQDGSEDEPPKDSDGEDPETAAVGCRGPTPGQAPAGGAGAEGKGLFPGSTLPLGFPYAVSPYFHTGAVGGLSMDGEEAPAPEDVTKWTVDDVCSFVGGLSGCGEYTRVFREQGIDGETLPLLTEEHLLTNMGLKLGPALKIRAQVARRLGRVFYVASFPVALPLQPPTLRAPERELGTGEQPLSPTTATSPYGGGHALAGQTSPKQENGTLALLPGAPDPSQPLC

SEQ ID NO: 84357 - protein, 109 aa, Homo sapiens
  Payload ID: 16783
  Gene Symbol: SAMD11
  Gene Name: sterile alpha motif domain containing 11
  ENSP ID: ENSP00000393181
MSKGILQVHPPICDCPGCRISSPVNRGRLADKRTVALPAARNLKKERTPSFSASDGDSDGSGPTCGRRPGLKQEDGPHIRIMKRRVHTHWDVNISFREASCSQDGNLPT

SEQ ID NO: 84358 - protein, 179 aa, Homo sapiens
  Payload ID: 16783
  Gene Symbol: SAMD11
  Gene Name: sterile alpha motif domain containing 11
  ENSP ID: ENSP00000411579
MSKGILQVHPPICDCPGCRISSPVNRGRLADKRTVALPAARNLKKERTPSFSASDGDSDGSGPTCGRRPGLKQEDGPHIRIMKRRVHTHWDVNISFREASCSQDGNLPTLISSVHRSRHLVMPEHQSRCEFQRGSLEIGLRPAGDLLGKRLGRSPRISSDCFSEKRARSESPQEALLLP

SEQ ID NO: 84359 - protein, 541 aa, Homo sapiens
  Payload ID: 16783
  Gene Symbol: SAMD11
  Gene Name: sterile alpha motif domain containing 11
  ENSP ID: ENSP00000412228
  MOD_RES (1)..(1): Any amino acid
XALLLPRELGPSMAPEDHYRRLVSALSEASTFEDPQRLYHLGLPSHGEDPPWHDPPHHLPSHDLLRVRQEVAAAALRGPSGLEAHLPSSTAGQRRKQGLAQHREGAAPAAAPSFSERELPQPPPLLSPQNAPHVALGPHLRPPFLGVPSALCQTPGYGFLPPAQAEMFAWQQELLRKQNLARLELPADLLRQKELESARPQLLAPETALRPNDGAEELQRRGALLVLNHGAAPLLALPPQGPPGSGPPTPSRDSARRAPRKGGPGPASARPSESKEMTGARLWAQDGSEDEPPKDSDGEDPETAAVGCRGPTPGQAPAGGAGAEGKGLFPGSTLPLGFPYAVSPYFHTGAVGGLSMDGEEAPAPEDVTKWTVDDVCSFVGGLSGCGEYTRVFREQGIDGETLPLLTEEHLLTNMGLKLGPALKIRAQVRRWGVRSGSPDHSWAESSGWVCDSPHQAISLQVARRLGRVFYVASFPVALPLQPPTLRAPERELGTGEQPLSPTTATSPYGGGHALAGQTSPKQENGTLALLPGAPDPSQPLC

SEQ ID NO: 84360 - protein, 345 aa, Homo sapiens
  Payload ID: 16783
  Gene Symbol: SAMD11
  Gene Name: sterile alpha motif domain containing 11
  ENSP ID: ENSP00000478421
MSKGILQVHPPICDCPGCRISSPVNRGRLADKRTVALPAARNLKKERTPSFSASDGDSDGSGPTCGRRPGLKQEDGPHIRIMKRRVHTHWDVNISFREASCSQDGNLPTLISSVHRSRHLVMPEHQSRCEFQRGSLEIGLRPAGDLLGKRLGRSPRISSDCFSEKRARSESPQEALLLPRELGPSMAPEDHYRRLVSALSEASTFEDPQRLYHLGLPSHGEDPPWHDPPHHLPSHGSCLSRPPCCRRRMPLTSPWAPISGPPSWGCPRLCARPQATASCPPRRRRCSPGSRSSCGSRTWPGWSCPPTSCGRRSWRARAHSCWRPRPPCAPTTAPRSCSGAGPCWC

SEQ ID NO: 84361 - protein, 321 aa, Homo sapiens
  Payload ID: 16783
  Gene Symbol: SAMD11
  Gene Name: sterile alpha motif domain containing 11
  ENSP ID: ENSP00000480678
MSKGILQVHPPICDCPGCRISSPVNRGRLADKRTVALPAARNLKKERTPSFSASDGDSDGSGPTCGRRPGLKQEDGPHIRIMKRRVHTHWDVNISFREASCSQDGNLPTLISSGCSSEGPQWPGSPPALLHGRSASEAGPGSAPGGRRPSCRPVLLGEGAASAAPLAVAAECPSRRPGPPSQAPLPGGALGSVPDPRLRLPAPRAGGDVRLAAGAPAEAEPGPAGAARRPPAAEGAGERAPTAAGARDRPAPQRRRRGAAAARGPAGAEPRRGATAGPAPPGAPGLRTPHPVPGLCPASPPEGGSRPCLSAAQRVQGDDGG

SEQ ID NO: 84362 - protein, 556 aa, Homo sapiens
  Payload ID: 16783
  Gene Symbol: SAMD11
  Gene Name: sterile alpha motif domain containing 11
  ENSP ID: ENSP00000480870
MSKGILQVHPPICDCPGCRISSPVNRGRLADKRTVALPAARNLKKERTPSFSASDGDSDGSGPTCGRRPGLKQEDGPHIRIMKRSQDGNLPTLISSVHRSRHLVMPEHQSRCEFQRGSLEIGLRPAGDLLGKRLGRSPRISSDCFSEKRARSESPQAEALLLPRELGPSMAPEDHYRRLVSALSEASTFEDPQRLYHLGLPSHGYGFLPPAQAEMFAWQQELLRKQNLARLELPADLLRQKELESARPQLLAPETALRPNDGAEELQRRGALLVLNHGAAPLLALPPQGPPGSGPPTPSRDSARRAPRKGGPGPASARPSESKEMTGARLWAQDGSEDEPPKDSDGEDPETAAVGCRGPTPGQAPAGGAGAEGKGLFPGSTLPLGFPYAVSPYFHTGAVGGLSMDGEEAPAPEDVTKWTVDDVCSFVGGLSGCGEYTRVFREQGIDGETLPLLTEEHLLTNMGLKLGPALKIRAQVARRLGRVFYVASFPVALPLQPPTLRAPERELGTGEQPLSPTTATSPYGGGHALAGQTSPKQENGTLALLPGAPDPSQPLC

SEQ ID NO: 84363 - protein, 601 aa, Homo sapiens
  Payload ID: 16783
  Gene Symbol: SAMD11
  Gene Name: sterile alpha motif domain containing 11
  ENSP ID: ENSP00000482090
MSKGILQVHPPICDCPGCRISSPVNRGRLADKRTVALPAARNLKKERTPSFSASDGDSDGSGPTCGRRPGLKQEDGPHIRIMKRRVHTHWDVNISFREASCSQDGNLPTLISSVHRSRHLVMPEHQSRCEFQRGSLEIGLRPAGDLLGKRLGRSPRISSDCFSEKRARSESPQEALLLPRELGPSMAPEDHYRRLVSALSEASTFEDPQRLYHLGLPSHDLLRVRQEVAAAALRGPSGLEAHLPSSTAGYGFLPPAQAEMFAWQQELLRKQNLARLELPADLLRQKELESARPQLLAPETALRPNDGAEELQRRGALLVLNHGAAPLLALPPQGPPGSGPPTPSRDSARRAPRKGGPGPASARPSESKEMTGARLWAQDGSEDEPPKDSDGEDPETAAVGCRGPTPGQAPAGGAGAEGKGLFPGSTLPLGFPYAVSPYFHTGAVGGLSMDGEEAPAPEDVTKWTVDDVCSFVGGLSGCGEYTRVFREQGIDGETLPLLTEEHLLTNMGLKLGPALKIRAQVARRLGRVFYVASFPVALPLQPPTLRAPERELGTGEQPLSPTTATSPYGGGHALAGQTSPKQENGTLALLPGAPDPSQPLC

SEQ ID NO: 84364 - protein, 682 aa, Homo sapiens
  Payload ID: 16783
  Gene Symbol: SAMD11
  Gene Name: sterile alpha motif domain containing 11
  ENSP ID: ENSP00000482138
MSKGILQVHPPICDCPGCRISSPVNRGRLADKRTVALPAARNLKKERTPSFSASDGDSDGSGPTCGRRPGLKQEDGPHIRIMKRRVHTHWDVNISFREASCSQDGNLPTLISSVHRSRHLVMPEHQSRCEFQRGSLEIGLRPAGDLLGKRLGRSPRISSDCFSEKRARSESPQAEALLLPRELGPSMAPEDHYRRLVSALSEASTFEDPQRLYHLGLPSHGEDPPWHDPPHHLPSHDLLRVRQEVAAAALRGPSGLEAHLPSSTAGQRRKQGLAQHREGAAPAAAPSFSERELPQPPPLLSPQNAPHVALGPHLRPPFLGVPSALCQTPGYGFLPPAQAEMFAWQQELLRKQNLARLELPADLLRQKELESARPQLLAPETALRPNDGAEELQRRGALLVLNHGAAPLLALPPQGPPGSGPPTPSRDSARRAPRKGGPGPASARPSESKEMTGARLWAQDGSEDEPPKDSDGEDPETAAVGCRGPTPGQAPAGGAGAEGKGLFPGSTLPLGFPYAVSPYFHTGAVGGLSMDGEEAPAPEDVTKWTVDDVCSFVGGLSGCGEYTRVFREQGIDGETLPLLTEEHLLTNMGLKLGPALKIRAQVARRLGRVFYVASFPVALPLQPPTLRAPERELGTGEQPLSPTTATSPYGGGHALAGQTSPKQENGTLALLPGAPDPSQPLC

SEQ ID NO: 84365 - protein, 619 aa, Homo sapiens
  Payload ID: 16783
  Gene Symbol: SAMD11
  Gene Name: sterile alpha motif domain containing 11
  ENSP ID: ENSP00000484256
MSKGILQVHPPICDCPGCRISSPVNRGRLADKRTVALPAARNLKKERTPSFSASDGDSDGSGPTCGRRPGLKQEDGPHIRIMKRRVHTHWDVNISFREASCSQDGNLPTLISSVHRSRHLVMPEHQSRCEFQRGSLEIGLRPAGDLLGKRLGRSPRISSDCFSEKRARSESPQDLLRVRQEVAAAALRGPSGLEAHLPSSTAGQRRKQGLAQHREGAAPAAAPSFSERELPQPPPLLSPQNAPHVALGPHLRPPFLGVPSALCQTPGYGFLPPAQAEMFAWQQELLRKQNLARLELPADLLRQKELESARPQLLAPETALRPNDGAEELQRRGALLVLNHGAAPLLALPPQGPPGSGPPTPSRDSARRAPRKGGPGPASARPSESKEMTGARLWAQDGSEDEPPKDSDGEDPETAAVGCRGPTPGQAPAGGAGAEGKGLFPGSTLPLGFPYAVSPYFHTGAVGGLSMDGEEAPAPEDVTKWTVDDVCSFVGGLSGCGEYTRVFREQGIDGETLPLLTEEHLLTNMGLKLGPALKIRAQVARRLGRVFYVASFPVALPLQPPTLRAPERELGTGEQPLSPTTATSPYGGGHALAGQTSPKQENGTLALLPGAPDPSQPLC

SEQ ID NO: 84366 - protein, 573 aa, Homo sapiens
  Payload ID: 16783
  Gene Symbol: SAMD11
  Gene Name: sterile alpha motif domain containing 11
  ENSP ID: ENSP00000484643
MSKGILQVHPPICDCPGCRISSPVNRGRLADKRTVALPAARNLKKERTPSFSASDGDSDGSGPTCGRRPGLKQEDGPHIRIMKRRVHTHWDVNISFREASCSQDGNLPTLISSVHRSRHLVMPEHQSRCEFQRGSLEIGLRPAGDLLGKRLGRSPRISSDCFSEKRARSESPQAEALLLPRELGPSMAPEDHYRRLVSALSEASTFEDPQRLYHLGLPSHGYGFLPPAQAEMFAWQQELLRKQNLARLELPADLLRQKELESARPQLLAPETALRPNDGAEELQRRGALLVLNHGAAPLLALPPQGPPGSGPPTPSRDSARRAPRKGGPGPASARPSESKEMTGARLWAQDGSEDEPPKDSDGEDPETAAVGCRGPTPGQAPAGGAGAEGKGLFPGSTLPLGFPYAVSPYFHTGAVGGLSMDGEEAPAPEDVTKWTVDDVCSFVGGLSGCGEYTRVFREQGIDGETLPLLTEEHLLTNMGLKLGPALKIRAQVARRLGRVFYVASFPVALPLQPPTLRAPERELGTGEQPLSPTTATSPYGGGHALAGQTSPKQENGTLALLPGAPDPSQPLC

SEQ ID NO: 84367 - protein, 226 aa, Homo sapiens
  Payload ID: 16783
  Gene Symbol: SAMD11
  Gene Name: sterile alpha motif domain containing 11
  ENSP ID: ENSP00000484820
MSKGILQVHPPICDCPGCRISSPVNRGRLADKRTVALPAARNLKKERTPSFSASDGDSDGSGPTCGRRPGLKQEDGPHIRIMKRRVHTHWDVNISFREASCRLRLPAPRAGGDVRLAAGAPAEAEPGPAGAARRPPAAEGAGERAPTAAGARDRPAPQRRRRGAAAARGPAGAEPRRGATAGPAPPGAPGLRTPHPVPGLCPASPPEGGSRPCLSAAQRVQGDDGG

SEQ ID NO: 84368 - protein, 201 aa, Homo sapiens
  Payload ID: 16784
  Gene Symbol: SAMD12
  Gene Name: sterile alpha motif domain containing 12
  Uniprot ID: Q8N8I0
  ENSP ID: ENSP00000314173
MAVEALHCGLNPRGIDHPAHAEGIKLQIEGEGVESQSIKNKNFQKVPDQKGTPKRLQAEAETAKSATVKLSKPVALWTQQDVCKWLKKHCPNQYQIYSESFKQHDITGRALLRLTDKKLERMGIAQENLRQHILQQVLQLKVREEVRNLQLLTQGTLLLPDGWMDGEIRRKTTLLLGQTGVRENLLLFLHRISIIENSIQI

SEQ ID NO: 84369 - protein, 161 aa, Homo sapiens
  Payload ID: 16784
  Gene Symbol: SAMD12
  Gene Name: sterile alpha motif domain containing 12
  ENSP ID: ENSP00000387133
MAVEALHCGLNPRGIDHPAHAEGIKLQIEGEGVESQSIKNKNFQKVPDQKGTPKRLQAEAETAKSATVKLSKPVALWTQQDVCKWLKKHCPNQYQIYSESFKQHDITGRALLRLTDKKLERMGIAQENLRQHILQQVLQLKVREEVRNLQLLTQASSEGSP

SEQ ID NO: 84370 - protein, 68 aa, Homo sapiens
  Payload ID: 16784
  Gene Symbol: SAMD12
  Gene Name: sterile alpha motif domain containing 12
  ENSP ID: ENSP00000387605
MAVEALHCGLNPRGIDHPAHAEGIKLQIEGEGVESQSIKNKNFQKVPDQKGTPKRLQAEAETAKGEPC

SEQ ID NO: 84371 - protein, 148 aa, Homo sapiens
  Payload ID: 16784
  Gene Symbol: SAMD12
  Gene Name: sterile alpha motif domain containing 12
  ENSP ID: ENSP00000402786
  MOD_RES (1)..(1): Any amino acid
XALHCGLNPRGIDHPAHAEGIKLQIEGEGVESQSIKNKNFQKVPDQKGTPKRLQAEAETAKSATVKLSKPVALWTQQDVCKWLKKHCPNQYQIYRRALLRLTDKKLERMGIAQENLRQHILQQVLQLKVREEVRNLQLLTQASSEGSP

SEQ ID NO: 84372 - protein, 154 aa, Homo sapiens
  Payload ID: 16784
  Gene Symbol: SAMD12
  Gene Name: sterile alpha motif domain containing 12
  ENSP ID: ENSP00000431360
MAVEALHCGLNPRGIDHPAHAEGIKLQIEGEGVESQSIKNKNFQKVPDQKGTPKRLQAEAETAKSATVKLSKPVALWTQQDVCKWLKKHCPNQYQIYSESFKQHDITGRALLRLTDKKLERMGIAQENLRQHILQQVLQLKVREEVRNLQLLTQ

SEQ ID NO: 84373 - protein, 169 aa, Homo sapiens
  Payload ID: 16784
  Gene Symbol: SAMD12
  Gene Name: sterile alpha motif domain containing 12
  ENSP ID: ENSP00000434079
  MOD_RES (1)..(1): Any amino acid
XALRAPSREPAASLCVTAAALHCGLNPRGIDHPAHAEGIKLQIEGEGVESQSIKNKNFQKVPDQKGTPKRLQAEAETAKSATVKLSKPVALWTQQDVCKWLKKHCPNQYQIYSESFKQHDITGRALLRLTDKKLERMGIAQENLRQHILQQVLQLKVREEVRNLQLLTQ

SEQ ID NO: 84374 - protein, 153 aa, Homo sapiens
  Payload ID: 16784
  Gene Symbol: SAMD12
  Gene Name: sterile alpha motif domain containing 12
  ENSP ID: ENSP00000435927
GLNPRGIDHPAHAEGIKLQIEGEGVESQSIKNKNFQKVPDQKGTPKRLQAEAETAKSATVKLSKPVALWTQQDVCKWLKKHCPNQYQIYSESFKQHDITGRALLRLTDKKLERMGIAQENLRQHILQQVLQLKVREEVRNLQLLTQASSEGSP

SEQ ID NO: 84375 - protein, 102 aa, Homo sapiens
  Payload ID: 16785
  Gene Symbol: SAMD13
  Gene Name: sterile alpha motif domain containing 13
  Uniprot ID: Q5VXD3
  ENSP ID: ENSP00000359702
MLSVDMENKENGSVGVKNSMENGRPPDPADWAVMDVVNYFRTVGFEEQASAFQEQEIDGKSLLLMTRNDVLTGLQLKLGPALKIYEYHVKPLQTKHLKNNSS

SEQ ID NO: 84376 - protein, 102 aa, Homo sapiens; identical to SEQ ID NO: 84375
  Payload ID: 16785
  Gene Symbol: SAMD13
  Gene Name: sterile alpha motif domain containing 13
  Uniprot ID: Q5VXD3
  ENSP ID: ENSP00000359703

SEQ ID NO: 84377 - protein, 102 aa, Homo sapiens; identical to SEQ ID NO: 84375
  Payload ID: 16785
  Gene Symbol: SAMD13
  Gene Name: sterile alpha motif domain containing 13
  Uniprot ID: Q5VXD3
  ENSP ID: ENSP00000359704

SEQ ID NO: 84378 - protein, 122 aa, Homo sapiens
  Payload ID: 16785
  Gene Symbol: SAMD13
  Gene Name: sterile alpha motif domain containing 13
  Uniprot ID: Q5VXD3
  ENSP ID: ENSP00000359705
MANSLLEGVFAEVKEPCSLPMLSVDMENKENGSVGVKNSMENGRPPDPADWAVMDVVNYFRTVGFEEQASAFQEQEIDGKSLLLMTRNDVLTGLQLKLGPALKIYEYHVKPLQTKHLKNNSS

SEQ ID NO: 84379 - protein, 116 aa, Homo sapiens
  Payload ID: 16785
  Gene Symbol: SAMD13
  Gene Name: sterile alpha motif domain containing 13
  Uniprot ID: Q5VXD3
  ENSP ID: ENSP00000359707
MRGVAEVKEPCSLPMLSVDMENKENGSVGVKNSMENGRPPDPADWAVMDVVNYFRTVGFEEQASAFQEQEIDGKSLLLMTRNDVLTGLQLKLGPALKIYEYHVKPLQTKHLKNNSS

SEQ ID NO: 84380 - protein, 102 aa, Homo sapiens; identical to SEQ ID NO: 84375
  Payload ID: 16785
  Gene Symbol: SAMD13
  Gene Name: sterile alpha motif domain containing 13
  Uniprot ID: Q5VXD3
  ENSP ID: ENSP00000378311

SEQ ID NO: 84381 - protein, 50 aa, Homo sapiens
  Payload ID: 16785
  Gene Symbol: SAMD13
  Gene Name: sterile alpha motif domain containing 13
  ENSP ID: ENSP00000391978
VMDVVNYFRTVGFEEQASAFQEQDKVTDRDKYLECTPIESWSGQIKGLLL

SEQ ID NO: 84382 - protein, 429 aa, Homo sapiens
  Payload ID: 16786
  Gene Symbol: SAMD14
  Gene Name: sterile alpha motif domain containing 14
  ENSP ID: ENSP00000285206
SRFPSGIPVEESGGVLSKGTWRNEGEDLDLAVPETARLDSSLHKARAQLLAKGRRHRPSRSRLRDSASSAEDGEGSDGPGGKVTDGCGSPLHRLRSPLHSGPGSPAGGSFCLDPPGLRRSLDEDEPPPSPLTRYRPLHNAASHEGLAAASCSPPRSAPSSDSSPSFVRRHPRAEPHSEDDSRDASPPEPASPTIGLDKKTRRKFLDLGVTLRRASTGKSRKEKGSNRLSMGSRESVEGSGRSGGSPFLPFSWFTDSGKGSASSGSTTSPTCSPKHEGFSPKKSASQESTLSDDSTPPSSSPKIPSGPWQEAKCSYPYHTLSQSSDEFLDEPLPPVHHWTSQQVGQWLQSLNLEQYAAEFAARQVDGPQLLQLDGSKLKSLGLSNSHDRALVKRKLKEMAAAAEKERKAQEKAARQREKLRRREQEAKKS

SEQ ID NO: 84383 - protein, 417 aa, Homo sapiens
  Payload ID: 16786
  Gene Symbol: SAMD14
  Gene Name: sterile alpha motif domain containing 14
  Uniprot ID: Q8IZD0
  ENSP ID: ENSP00000329144
MASSKLREPVDEVFDLDLAVPETARLDSSLHKARAQLLAKGRRHRPSRSRLRDSASSAEDGEGSDGPGGKVTDGCGSPLHRLRSPLHSGPGSPAGGSFCLDPPGLRRSLDEDEPPPSPLTRYRPLHNAASHEGLAAASCSPPRSAPSSDSSPSFVRRHPRAEPHSEDDSRDASPPEPASPTIGLDKKTRRKFLDLGVTLRRASTGKSRKEKGSNRLSMGSRESVEGSGRSGGSPFLPFSWFTDSGKGSASSGSTTSPTCSPKHEGFSPKKSASQESTLSDDSTPPSSSPKIPSGPWQEAKCSYPYHTLSQSSDEFLDEPLPPVHHWTSQQVGQWLQSLNLEQYAAEFAARQVDGPQLLQLDGSKLKSLGLSNSHDRALVKRKLKEMAAAAEKERKAQEKAARQREKLRRREQEAKKS

SEQ ID NO: 84384 - protein, 13 aa, Homo sapiens
  Payload ID: 16786
  Gene Symbol: SAMD14
  Gene Name: sterile alpha motif domain containing 14
  ENSP ID: ENSP00000423479
MASSKLREPVDEV

SEQ ID NO: 84385 - protein, 445 aa, Homo sapiens
  Payload ID: 16786
  Gene Symbol: SAMD14
  Gene Name: sterile alpha motif domain containing 14
  Uniprot ID: Q8IZD0
  ENSP ID: ENSP00000424474
MASSKLREPVDEVFDLDLAVPETARLDSSLHKARAQLLAKGRRHRPSRSRLRDSASSAEDGEGSDGPGGKVTDGCGSPLHRLRSPLHSGPGSPAGGSFCLDPPGLRRSLDEDEPPPSPLTRYRPLHNAASHEGLAAASCSPPRSAPSSDSSPSFVRRHPRAEPHSEDDSRDASPPEPASPTIGLDKKTRRKFLDLGVTLRRASTGKSRKEKGSNRLSMGSRESVEGSGRSGGSPFLPFSWFTDSGKGSASSGSTTSPTCSPKHEGFSPKKSASQAQLLAHAQEALSNSWCLVQDFGSTQIGMESTLSDDSTPPSSSPKIPSGPWQEAKCSYPYHTLSQSSDEFLDEPLPPVHHWTSQQVGQWLQSLNLEQYAAEFAARQVDGPQLLQLDGSKLKSLGLSNSHDRALVKRKLKEMAAAAEKERKAQEKAARQREKLRRREQEAKKS

SEQ ID NO: 84386 - protein, 674 aa, Homo sapiens
  Payload ID: 16787
  Gene Symbol: SAMD15
  Gene Name: sterile alpha motif domain containing 15
  Uniprot ID: Q9P1V8
  ENSP ID: ENSP00000216471
MAEVPEDYDSGPDEDGELEPERPELPGLHKLYENAEPDTMAKADSKLPAEIYQEPQPETEEEDFKEGEPDSAKNVQLKPGGTSQEGIAKESKRDVPSETEPGIHQEVKSETSREMGEFFKDLEAPMDETHKESDLEPPEEAKPNVTEDVFLESAMETDPDPVPPTETMSEVSGATVRERNLELLEEETEPGVPEESLRVQHEETGLEPPEQTKQDFPSEKLGESLEETDLQPPKMTKPETPEETQRESTEKKRTEPPEQARLEFLEKEPRKSSEEAGLEPPEETQPEVPEEMQRKATEEKGTELPERTKPDFPDHKPRKSTDENVPEPLEEIKLEFPEEESRKTNEETILEQSEMMKPESPEEIRKSNEKKNPQPPEETGPVLPQEINPQVEEKTQTKPTEKILELPDETKPRETHVEFSKEDRPEPIKSKYSVGNDELEHREPKRGKLSLSDKFRKEYYALGSLRESEESIGTHYEFLQPLQKLLNVSEECSYSDPSESQTELSEFVHEKEVVDLSQELKERVSEDDETQPEKGTELQFEHLNWDPEEVAEWISQLGFPQYKECFITNFISGRKLIHVNCSNLPQMGITNFEDMKAISRHTQELLEIEEPLFKRSISLPYRDIIGLYLEQKGHTGIKSDSLTLSEFVKAAGLQDYAPEITAPEENEELPCTEP

SEQ ID NO: 84387 - protein, 88 aa, Homo sapiens
  Payload ID: 16787
  Gene Symbol: SAMD15
  Gene Name: sterile alpha motif domain containing 15
  ENSP ID: ENSP00000450941
MGITNFEDMKAISRHTQELLEIEEPLFKRSISLPYRDIIGLYLEQKGHTGIKSDSLTLSEFVKAAGLQDYAPEITAPEENEELPCTEP

SEQ ID NO: 84388 - protein, 221 aa, Homo sapiens
  Payload ID: 16788
  Gene Symbol: SAMD3
  Gene Name: sterile alpha motif domain containing 3
  Uniprot ID: Q8N6K7
  ENSP ID: ENSP00000324874
METWSVEQVCSWLVEKNLGELVHRFQEEEVSGAALLALNDRMVQQLVKKIGHQAVLMDLIKKYKQNTQGLKSPENPKKAALVMQTEAARDYRDEESSSPARHGEQMPSFYPAENLDNGLIDQRVLKQRRNVKQILARSKALQWTKSYVLPEFPYDVKCMLAEQKCPDHSMRIRIIEFLQADMTKYLEGSLYPSTQQYNDVVNALLQAHPFLDEDGCGFAGV

SEQ ID NO: 84389 - protein, 520 aa, Homo sapiens
  Payload ID: 16788
  Gene Symbol: SAMD3
  Gene Name: sterile alpha motif domain containing 3
  Uniprot ID: Q8N6K7
  ENSP ID: ENSP00000357116
METWSVEQVCSWLVEKNLGELVHRFQEEEVSGAALLALNDRMVQQLVKKIGHQAVLMDLIKKYKQNTQGLKSPENPKKAALVMQTEAARDYRDEESSSPARHGEQMPSFYPAENLDNGLIDQRVLKQRRNVKQILARSKALQWTKSYVLPEFPYDVKCMLAEQKCPDHSMRIRIIEFLQADMTKYLEGSLYPSTQQYNDVVNALLQAHPFLDEDGCGFFLWKRALKDRFKYVRRPIEDDEQVIRNKCKFGHRRGQTRKSLADIRFDEIKLVQIKEEAVCFDSELDEHIKWFQQEYVKTEKDWREIDKRMSQTLEIRRKMIGSRTPLKDILKLFPFLKCPYQMFREFQLLTRTDIYKKTRHILESYSENILTSFSVVDNPINIVLQEKMKHYTDEDMLKYMKMTATCLLLPDVFGDDPSLFVIMNEQVQVSTPVLEVKNPFNMEVCEFSLYLERERLTKVDDCVTALAALVAAFHVFRIECPRRLSQTFNFLETLIFDMHSPYFPSLKEKENEVGFQHPLT

SEQ ID NO: 84390 - protein, 520 aa, Homo sapiens; identical to SEQ ID NO: 84389
  Payload ID: 16788
  Gene Symbol: SAMD3
  Gene Name: sterile alpha motif domain containing 3
  Uniprot ID: Q8N6K7
  ENSP ID: ENSP00000391163

SEQ ID NO: 84391 - protein, 544 aa, Homo sapiens
  Payload ID: 16788
  Gene Symbol: SAMD3
  Gene Name: sterile alpha motif domain containing 3
  Uniprot ID: Q8N6K7
  ENSP ID: ENSP00000402092
MRSSKLQSPSPSQEKQGVYLQETAMETWSVEQVCSWLVEKNLGELVHRFQEEEVSGAALLALNDRMVQQLVKKIGHQAVLMDLIKKYKQNTQGLKSPENPKKAALVMQTEAARDYRDEESSSPARHGEQMPSFYPAENLDNGLIDQRVLKQRRNVKQILARSKALQWTKSYVLPEFPYDVKCMLAEQKCPDHSMRIRIIEFLQADMTKYLEGSLYPSTQQYNDVVNALLQAHPFLDEDGCGFFLWKRALKDRFKYVRRPIEDDEQVIRNKCKFGHRRGQTRKSLADIRFDEIKLVQIKEEAVCFDSELDEHIKWFQQEYVKTEKDWREIDKRMSQTLEIRRKMIGSRTPLKDILKLFPFLKCPYQMFREFQLLTRTDIYKKTRHILESYSENILTSFSVVDNPINIVLQEKMKHYTDEDMLKYMKMTATCLLLPDVFGDDPSLFVIMNEQVQVSTPVLEVKNPFNMEVCEFSLYLERERLTKVDDCVTALAALVAAFHVFRIECPRRLSQTFNFLETLIFDMHSPYFPSLKEKENEVGFQHPLT

SEQ ID NO: 84392 - protein, 520 aa, Homo sapiens; identical to SEQ ID NO: 84389
  Payload ID: 16788
  Gene Symbol: SAMD3
  Gene Name: sterile alpha motif domain containing 3
  Uniprot ID: Q8N6K7
  ENSP ID: ENSP00000403565

SEQ ID NO: 84393 - protein, 165 aa, Homo sapiens
  Payload ID: 16788
  Gene Symbol: SAMD3
  Gene Name: sterile alpha motif domain containing 3
  ENSP ID: ENSP00000434139
METWSVEQVCSWLVEKNLGELVHRFQEVSGAALLALNDRMVQQLVKKIGHQAVLMDLIKKYKQNTQGLKSPENPKKAALVMQTEAARDYRDEESSSPARHGEQMPSFYPAENLDNGLIDQRVLKQRNVKQILARSKALQWTKSYVLPEFPYDVKCMLAEQKCPDH

SEQ ID NO: 84394 - protein, 173 aa, Homo sapiens
  Payload ID: 16788
  Gene Symbol: SAMD3
  Gene Name: sterile alpha motif domain containing 3
  ENSP ID: ENSP00000435875
METWSVEQVCSWLVEKNLGELVHRFQEEEVSGAALLALNDRMVQQLVKKIGHQAVLMDLIKKYKQNTQGLKSPENPKKAALVMQTEAARDYRDEESSSPARHGEQMPSFYPAENLDNGLIDQRVLKQRRNVKQILARSKALQWTKSYVLPEFPYDVKCMLAEQKCPDHSMRIR

SEQ ID NO: 84395 - protein, 77 aa, Homo sapiens
  Payload ID: 16788
  Gene Symbol: SAMD3
  Gene Name: sterile alpha motif domain containing 3
  ENSP ID: ENSP00000435879
  MOD_RES (1)..(1): Any amino acid
XFPFLKCPYQMFREFQLLTRTDIYKKTRHILESYSENILTSFSVVDNPINIVLQEKMKHYTDEDMLKCASVHTCVGS

SEQ ID NO: 84396 - protein, 275 aa, Homo sapiens
  Payload ID: 16788
  Gene Symbol: SAMD3
  Gene Name: sterile alpha motif domain containing 3
  ENSP ID: ENSP00000436088
METWSVEQVCSWLVEKNLGELVHRFQEEEVSGAALLALNDRMVQQLVKKIGHQAVLMDLIKKYKQNTQGLKSPENPKKAALVMQTEAAREDEESSSPARHGEQMPSFYPAENLDNGLIDQRVLKQRRNVKQILARSKALQWTKSYVLPEFPYDVKCMLAEQKCPDHSMRIRIIEFLQADMTKYLEGSLYPSTQQYNDVVNALLQAHPFLDEDGCGFFLWKRALKDRFKYVRRPIEDDEQVIRNKCKFGHRRGQTRKSLADIRFDEIKLVQIKLSA

SEQ ID NO: 84397 - protein, 210 aa, Homo sapiens
  Payload ID: 16788
  Gene Symbol: SAMD3
  Gene Name: sterile alpha motif domain containing 3
  ENSP ID: ENSP00000436115
METWSVEQVCSWLVEKNLGELVHRFQEEEVSGAALLALNDRMVQQLVKKIGHQAVLMDLIKKYKQNTQGLKSPENPKKAALVMQTEAARDYRDEESSSPARHGEQMPSFYPAENLDNGLIDQRVLKQRNVKQILARSKALQWTKSYVLPEFPYDVKCMLAEQKCPDHSMRIRIIEFLQADMTKYLEGSLYPSTQQYNDVVNALLQAHPFL

SEQ ID NO: 84398 - protein, 37 aa, Homo sapiens
  Payload ID: 16788
  Gene Symbol: SAMD3
  Gene Name: sterile alpha motif domain containing 3
  ENSP ID: ENSP00000436997
METWSVEQVCSWLVEKNLGELVHRFQGRSKWGRSSCT

SEQ ID NO: 84399 - protein, 630 aa, Homo sapiens
  Payload ID: 16789
  Gene Symbol: SAMD4A
  Gene Name: sterile alpha motif domain containing 4A
  Uniprot ID: Q9UPU9
  ENSP ID: ENSP00000251091
MMFRDQVGVLAGWFKGWNECEQTVALLSLLKRVSQTQARFLQLCLEHSLADCAELHVLEREANSPGIINQWQQESKDKVISLLLTHLPLLKPGNLDAKVEYMKLLPKILAHSIEHNQHIEESRQLLSYALIHPATSLEDRSALAMWLNHLEDRTSTSFGGQNRGRSDSVDYGQTHYYHQRQNSDDKLNGWQNSRDSGICINASNWQDKSMGCENGHVPLYSSSSVPTTINTIGTSTSTNVPAWLKSLRLHKYAALFSQMTYEEMMALTECQLEAQNVTKGARHKIVISIQKLKERQNLLKSLERDIIEGGSLRIPLQELHQMILTPIKAYSSPSTTPEARRREPQAPRQPSLMGPESQSPDCKDGAAATGATATPSAGASGGLQPHQLSSCDGELAVAPLPEGDLPGQFTRVMGKVCTQLLVSRPDEENISSYLQLIDKCLIHEAFTETQKKRLLSWKQQVQKLFRSFPRKTLLDISGYRQQRNRGFGQSNSLPTAGSVGGGMGRRNPRQYQIPSRNVPSARLGLLGTSGFVSSNQRNTTATPTIMKQGRQNLWFANPGGSNSMPSRTHSSVQRTRSLPVHTSPQNMLMFQQPEFQLPVTEPDINNRLESLCLSMTEHALGDGVDRTSTI

SEQ ID NO: 84400 - protein, 718 aa, Homo sapiens
  Payload ID: 16789
  Gene Symbol: SAMD4A
  Gene Name: sterile alpha motif domain containing 4A
  Uniprot ID: Q9UPU9
  ENSP ID: ENSP00000375919
MMFRDQVGVLAGWFKGWNECEQTVALLSLLKRVSQTQARFLQLCLEHSLADCAELHVLEREANSPGIINQWQQESKDKVISLLLTHLPLLKPGNLDAKVEYMKLLPKILAHSIEHNQHIEESRQLLSYALIHPATSLEDRSALAMWLNHLEDRTSTSFGGQNRGRSDSVDYGQTHYYHQRQNSDDKLNGWQNSRDSGICINASNWQDKSMGCENGHVPLYSSSSVPTTINTIGTSTSTILSGQAHHSPLKRSVSLTPPMNVPNQPLGHGWMSHEDLRARGPQCLPSDHAPLSPQSSVASSGSGGSEHLEDQTTARNTFQEEGSGMKDVPAWLKSLRLHKYAALFSQMTYEEMMALTECQLEAQNVTKGARHKIVISIQKLKERQNLLKSLERDIIEGGSLRIPLQELHQMILTPIKAYSSPSTTPEARRREPQAPRQPSLMGPESQSPDCKDGAAATGATATPSAGASGGLQPHQLSSCDGELAVAPLPEGDLPGQFTRVMGKVCTQLLVSRPDEENISSYLQLIDKCLIHEAFTETQKKRLLSWKQQVQKLFRSFPRKTLLDISGYRQQRNRGFGQSNSLPTAGSVGGGMGRRNPRQYQIPSRNVPSARLGLLGTSGFVSSNQRNTTATPTIMKQGRQNLWFANPGGSNSMPSRTHSSVQRTRSLPVHTSPQNMLMFQQPEFQLPVTEPDINNRLESLCLSMTEHALGDGVDRTSTI

SEQ ID NO: 84401 - protein, 345 aa, Homo sapiens
  Payload ID: 16789
  Gene Symbol: SAMD4A
  Gene Name: sterile alpha motif domain containing 4A
  ENSP ID: ENSP00000450808
MILTPIKAYSSPSTTPEARRREPQAPRQPSLMGPESQSPDCKDGAAATGATATPSAGASGGLQPHQLSSCDGELAVAPLPEGDLPGQFTRVMGKVCTQLLVSRPDEENISSYLQLIDKCLIHEAFTETQKKRLLSWKQQVQKLFRSFPRKTLLDISGYRQQRNRGFGQSNSLPTAGSVGGGMGRRNPRQYQIPSRNVPSARLGLLGTSGFVSSNQRNTTATPTIMKQGRQNLWFANPGGSNSMPSRTHSSVQRTRSLPVHTSPQNMLMFQQPGSQVHSGLCLTDLRGWLSLSGAPSMPALTVPKSSQGEFQLPVTEPDINNRLESLCLSMTEHALGDGVDRTSTI

SEQ ID NO: 84402 - protein, 718 aa, Homo sapiens; identical to SEQ ID NO: 84400
  Payload ID: 16789
  Gene Symbol: SAMD4A
  Gene Name: sterile alpha motif domain containing 4A
  Uniprot ID: Q9UPU9
  ENSP ID: ENSP00000452535

SEQ ID NO: 84403 - protein, 345 aa, Homo sapiens; identical to SEQ ID NO: 84401
  Payload ID: 16789
  Gene Symbol: SAMD4A
  Gene Name: sterile alpha motif domain containing 4A
  ENSP ID: ENSP00000486821

SEQ ID NO: 84404 - protein, 694 aa, Homo sapiens
  Payload ID: 16790
  Gene Symbol: SAMD4B
  Gene Name: sterile alpha motif domain containing 4B
  Uniprot ID: Q5PRF9
  ENSP ID: ENSP00000317224
MMFRDQVGILAGWFKGWNECEQTVALLSLLKRVTRTQARFLQLCLEHSLADCNDIHLLESEANSAAIVSQWQQESKEKVVSLLLSHLPLLQPGNTEAKSEYMRLLQKVLAYSIESNAFIEESRQLLSYALIHPATTLEDRNALALWLSHLEERLASGFRSRPEPSYHSRQGSDEWGGPAELGPGEAGPGWQDKPPRENGHVPFHPSSSVPPAINSIGSNANTGLPCQIHPSPLKRSMSLIPTSPQVPGEWPSPEELGARAAFTTPDHAPLSPQSSVASSGSEQTEEQGSSRNTFQEDGSGMKDVPSWLKSLRLHKYAALFSQMSYEEMMTLTEQHLESQNVTKGARHKIALSIQKLRERQSVLKSLEKDVLEGGNLRNALQELQQIIITPIKAYSVLQATVAAATTTPTAKDGAPGEPPLPGAEPPLAHPGTDKGTEAKDPPAVENYPPPPAPAPTDGSEPAPAPVADGDIPSQFTRVMGKVCTQLLVSRPDEENITSYLQLIEKCLTHEAFTETQKKRLLSWKQQVLKLLRTFPRKAALEMQNYRQQKGWAFGSNSLPIAGSVGMGVARRTQRQFPMPPRALPPGRMGLLSPSGIGGVSPRHALTSPSLGGQGRQNLWFANPGGSNSMPSQSRSSVQRTHSLPVHSSPQAILMFPPDCPVPGPDLEINPTLESLCLSMTEHALGDGTDKTSTI

SEQ ID NO: 84405 - protein, 94 aa, Homo sapiens
  Payload ID: 16790
  Gene Symbol: SAMD4B
  Gene Name: sterile alpha motif domain containing 4B
  ENSP ID: ENSP00000468891
  MOD_RES (1)..(1): Any amino acid
XSPRHALTSPSLGGQGRQNLWFANPGGSNSMPSQSRSSVQRTHSLPVHSSPQAILMFPPDCPVPGPDLEINPTLESLCLSMTEHALGGEHFLFP

SEQ ID NO: 84406 - protein, 75 aa, Homo sapiens
  Payload ID: 16790
  Gene Symbol: SAMD4B
  Gene Name: sterile alpha motif domain containing 4B
  ENSP ID: ENSP00000469404
MMFRDQVGILAGWFKGWNECEQTVALLSLLKRVTRTQARFLQLCLEHSLADCNDIHLLESEANSAAIVSQWQQES

SEQ ID NO: 84407 - protein, 219 aa, Homo sapiens
  Payload ID: 16790
  Gene Symbol: SAMD4B
  Gene Name: sterile alpha motif domain containing 4B
  ENSP ID: ENSP00000469620
MMFRDQVGILAGWFKGWNECEQTVALLSLLKRVTRTQARFLQLCLEHSLADCNDIHLLESEANSAAIVSQWQQESKEKVVSLLLSHLPLLQPGNTEAKSEYMRLLQKVLAYSIESNAFIEESRQLLSYALIHPATTLEDRNALALWLSHLEERLASGFRSRPEPSYHSRQGSDEWGGPAELGPGEAGPGWQDKPPRENGHVPFHPSSSVPPAINSIGSN

SEQ ID NO: 84408 - protein, 692 aa, Homo sapiens
  Payload ID: 16790
  Gene Symbol: SAMD4B
  Gene Name: sterile alpha motif domain containing 4B
  ENSP ID: ENSP00000470237
MMFRDQVGILAGWFKGWNECEQTVALLSLLKRVTRTQARFLQLCLEHSLADCNDIHLLESEANSAAIVSQWQQESKEKVVSLLLSHLPLLQPGNTEAKSEYMRLLQKVLAYSIESNAFIEESRQLLSYALIHPATTLEDRNALALWLSHLEERLASGFRSRPEPSYHSRQGSDEWGGPAELGPGEAGPGWQDKPPRENGHVPFHPSSSVPPAINSIGSNANTGLPCQIHPSPLKRSMSLIPTSPQVPGEWPSPEELGARAAFTTPDHAPLSPQSSVASSGSEQTEEQGSSRNTFQEDGSGMKDVPSWLKSLRLHKYAALFSQMSYEEMMTLTEQHLESQNVTKGARHKIALSIQKLRERQSVLKSLEKDVLEGGNLRNALQELQQIIITPIKAYSVLQATVAAATTTPTAKDGAPGEPPLPGAEPPLAHPGTDKGTEAKDPPAVENYPPPPAPAPTDGSEPAPAPVADGDIPSQFTRVMGKVCTQLLVSRPDEENITSYLQLIEKCLTHEAFTETQKKRLLSWKQQVLKLLRTFPRKAALEMQNYRQQKGWAFGSNSLPIAGSVGMGVARRTQRQFPMPPRALPPGRMGLLSPSGIGGVSPRHALTSPSLGGQGRQNLWFANPGGSNSMPSQSRSSVQRTHSLPVHSSPQAILMFPPDCPVPGPDLEINPTLESLCLSMTEHALGGPSRDLC

SEQ ID NO: 84409 - protein, 48 aa, Homo sapiens
  Payload ID: 16790
  Gene Symbol: SAMD4B
  Gene Name: sterile alpha motif domain containing 4B
  ENSP ID: ENSP00000470821
AINSIGSNANTDVPSWLKSLRLHKYAALFSQMSYEEMMTLTEQHLESQ

SEQ ID NO: 84410 - protein, 325 aa, Homo sapiens
  Payload ID: 16790
  Gene Symbol: SAMD4B
  Gene Name: sterile alpha motif domain containing 4B
  ENSP ID: ENSP00000471509
MMFRDQVGILAGWFKGWNECEQTVALLSLLKRVTRTQARFLQLCLEHSLADCNDIHLLESEANSAAIVSQWQQESKEKVVSLLLSHLPLLQPGNTEAKSEYMRLLQKVLAYSIESNAFIEESRQLLSYALIHPATTLEDRNALALWLSHLEERLASGFRSRPEPSYHSRQGSDEWGGPAELGPGEAGPGWQDKPPRENGHVPFHPSSSVPPAINSIGSNANTGLPCQIHPSPLKRSMSLIPTSPQVPGEWPSPEELGARAAFTTPDHAPLSPQSSVASSGSEQTEEQGSSRNTFQEDGSGMKDVPSWLKSLRLHKYAALFSQNQL

SEQ ID NO: 84411 - protein, 663 aa, Homo sapiens
  Payload ID: 16790
  Gene Symbol: SAMD4B
  Gene Name: sterile alpha motif domain containing 4B
  ENSP ID: ENSP00000478730
MMFRDQVGILAGWFKGWNECEQTVALLSLLKRVTRTQARFLQLCLEHSLADCNDIHLLESEANSAAIVSQWQQESKEKVVSLLLSHLPLLQPGNTEAKSEYMRLLQKVLAYSIESNAFIEESRQLLSYALIHPATTLEDRNALALWLSHLEERLASGFRSRPEPSYHSRQGSDEWGGPAELGPGEAGPGWQDKPPRENGHVPFHPSSSVPPAINSIGSNANTGLPCQIHPSPLKRSMSLIPTSPQVPGEWPSPEELGARAAFTTPDHAPLSPQSSVASSGSEQTEEQGSSRNTFQEDGSGMKDVPSWLKSLRLHKYAALFSQMSYEEMMTLTEQHLESQNVTKGARHKIALSIQKLRERQSVLKSLEKDVLEGGNLRNALQELQQIIITPIKAYSVLQATVAAATTTPTAKDGAPGEPPLPGAEPPLAHPGTDKGTEAKDPPAVENYPPPPAPAPTDGSEPAPAPVADGDIPSQFTRVMGKVCTQLLVSRPDEENITSYLQLIEKCLTHEAFTETQKKRLLSWKQQVLKLLRTFPRKAALEMQNYRQQKGWAFGSNSLPIAGSVGMGVARRTQRQFPMPPRALPPGRMGLLSPSGIGVSPLTCPHQPQPWRPGPTEPVVCQPWRQQQHAQSEPQLCAAHPLAPGPLVTPGHSHVPSRLPGSWA

SEQ ID NO: 84412 - protein, 663 aa, Homo sapiens
  Payload ID: 16790
  Gene Symbol: SAMD4B
  Gene Name: sterile alpha motif domain containing 4B
  ENSP ID: ENSP00000482861
MMFRDQVGILAGWFKGWNECEQTVALLSLLKRVTRTQARFLQLCLEHSLADCNDIHLLESEANSAAIVSQWQQESKEKVVSLLLSHLPLLQPGNTEAKSEYMRLLQKVLAYSIESNAFIEESRQLLSYALIHPATTLEDRNALALWLSHLEERLASGFRSRPEPSYHSRQGSDEWGGPAELGPGEAGPGWQDKPPRENGHVPFHPSSSVPPAINSIGSNANTGLPCQIHPSPLKRSMSLIPTSPQVPGEWPSPEELGARAAFTTPDHAPLSPQSSVASSGSEQTEEQGSSRNTFQEDGSGMKDVPSWLKSLRLHKYAALFSQMSYEEMMTLTEQHLESQNVTKGARHKIALSIQKLRERQSVLKSLEKDVLEGGNLRNALQELQQIIITPIKAYSVLQATVAAATTTPTAKDGAPGEPPLPGAEPPLAHPGTDKGTEAKDPPAVENYPPPPAPAPTDGSEPAPAPVADGDIPSQFTRVMGKVCTQLLVSRPDEENITSYLQLIEKCLTHEAFTETQKKRLLSWKQQVLKLLRTFPRKAALEMQNYRQQKGWAFGSNSLPIAGSVGMGVARRTQRQFPMPPRALPPGRMGLLSPSGIGGVSPRHALTPQPWRPGPTEPVVCQPWRQQQHAQSEPQLCAAHPLAPGPLVTPGHSHVPSRLPGSWA

SEQ ID NO: 84413 - protein, 694 aa, Homo sapiens; identical to SEQ ID NO: 84404
  Payload ID: 16790
  Gene Symbol: SAMD4B
  Gene Name: sterile alpha motif domain containing 4B
  Uniprot ID: Q5PRF9
  ENSP ID: ENSP00000484229

SEQ ID NO: 84414 - protein, 173 aa, Homo sapiens
  Payload ID: 16791
  Gene Symbol: SAMD5
  Gene Name: sterile alpha motif domain containing 5
  Uniprot ID: Q5TGI4
  ENSP ID: ENSP00000356444
MCTNIVYEWLKALQLPQYAESFVDNGYDDLEVCKQIGDPDLDAIGVLAPAHRRRILEAVRRLREQDANAAGLYFTLEPQPAPPGPPADAVPTGRRGEPCGGPAQGTRGDSRGHTTAPRSRELVSYPKLKLKIMIRDKLVRDGIHLSKPPYSRKVPMAGILEYLMNWPKSSQSR

SEQ ID NO: 84415 - protein, 97 aa, Homo sapiens
  Payload ID: 16791
  Gene Symbol: SAMD5
  Gene Name: sterile alpha motif domain containing 5
  ENSP ID: ENSP00000456528
GGPAQGTRGDSRGHTTAPRSRELVSYPKLKLKIMIRDKLVRDGIHLSKPPYSRKVLLCRYLQEVICVLFIGAVNLIISIPRYYRMTIRRCIDISLDT

SEQ ID NO: 84416 - protein, 446 aa, Homo sapiens
  Payload ID: 16792
  Gene Symbol: SAMD7
  Gene Name: sterile alpha motif domain containing 7
  Uniprot ID: Q7Z3H4
  ENSP ID: ENSP00000334668
MAVNPLLTPTGQQTIPLIPSPFGPPTVDRDVLPSTVAPTDPRQFCVPSQFGSSVLPNTNMANVLSSRIYPGWGILPPESIKAVARRNEMIQRHHTARTEMEMYAIYQQRRMEKINPKGLAGLGIPFLYGSSVPAAPAAYHGRSMLPAGDLHFHRSTLRNLQGNPMLAATAPHFEESWGQRCRRLRKNTGNQKALDSDAESSKSQAEEKILGQTHAVPYEEDHYAKDPDIEAPSNQKSSETNEKPTTALANTCGELEPTHRKPWGSHTTTLKAKAWDDGKEEASEQIFATCDEKNGVCPPVPRPSLPGTHALVTIGGNLSLDEDIQKWTVDDVHSFIRSLPGCSDYAQVFKDHAIDGETLPLLTEEHLRGTMGLKLGPALKIQSQVSQHVGSMFYKKTLSFPIRQAFDQPADTSPLLDPNSWSDTMNIFCPQDTIIPKGIERGSMRN

SEQ ID NO: 84417 - protein, 446 aa, Homo sapiens; identical to SEQ ID NO: 84416
  Payload ID: 16792
  Gene Symbol: SAMD7
  Gene Name: sterile alpha motif domain containing 7
  Uniprot ID: Q7Z3H4
  ENSP ID: ENSP00000391299

SEQ ID NO: 84418 - protein, 98 aa, Homo sapiens
  Payload ID: 16792
  Gene Symbol: SAMD7
  Gene Name: sterile alpha motif domain containing 7
  ENSP ID: ENSP00000420460
MAVNPLLTPTGQQTIPLIPSPFGPPTVDRDVLPSTVAPTDPRQFCVPSQFGSSVLPNTNMANVLSSRIYPGWGILPPESIKAVARRNEMIQRHHTARV

SEQ ID NO: 84419 - protein, 326 aa, Homo sapiens
  Payload ID: 16793
  Gene Symbol: SAMD8
  Gene Name: sterile alpha motif domain containing 8
  Uniprot ID: Q96LT4
  ENSP ID: ENSP00000361772
MAGPNQLCIRRWTTKHVAVWLKDEGFFEYVDILCNKHRLDGITLLTLTEYDLRSPPLEIKVLGDIKRLMLSVRKLQKIHIDVLEEMGYNSDSPMGSMTPFISALQSTDWLCNGELSHDCDGPITDLNSDQYQYMNGKNKHSVRRLDPEYWKTILSCIYVFIVFGFTSFIMVIVHERVPDMQTYPPLPDIFLDSVPRIPWAFAMTEVCGMILCYIWLLVLLLHKHRSILLRRLCSLMGTVFLLRCFTMFVTSLSVPGQHLQCTGKIYGSVWEKLHRAFAIWSGFGMTLTGVHTCGDYMFSGHTVVLTMLNFFVTECKYLFSASMRIR

SEQ ID NO: 84420 - protein, 478 aa, Homo sapiens
  Payload ID: 16793
  Gene Symbol: SAMD8
  Gene Name: sterile alpha motif domain containing 8
  ENSP ID: ENSP00000361775
MPARSRHRPRLHSGSPPRAPPPPLEALHSGEAGRAPDSDGGSDADSEVGPGSPTRTAEAAEEEMAGPNQLCIRRWTTKHVAVWLKDEGFFEYVDILCNKHRLDGITLLTLTEYDLRSPPLEIKVLGDIKRLMLSVRKLQKIHIDVLEEMGYNSDSPMGSMTPFISALQSTDWLCNGELSHDCDGPITDLNSDQYQYMNGKNKHSVRRLDPEYWKTILSCIYVFIVFGFTSFIMVIVHERVPDMQTYPPLPDIFLDSVPRIPWAFAMTEVCGMILCYIWLLVLLLHKHRSILLRRLCSLMGTVFLLRCFTMFVTSLSVPGQHLQCTGKIYGSVWEKLHRAFAIWSGFGMTLTGVHTCGDYMFSGHTVVLTMLNFFVTEYTPRSWNFLHTLSWVLNLFGIFFILAAHEHYSIDVFIAFYITTRLFLYYHTLANTRAYQQSRRARIWFPMFSFFECNVNGTVPNEYCWPFSKPAIMKRLIG

SEQ ID NO: 84421 - protein, 253 aa, Homo sapiens
  Payload ID: 16793
  Gene Symbol: SAMD8
  Gene Name: sterile alpha motif domain containing 8
  ENSP ID: ENSP00000391799
MAGPNQLCIRRWTTKHVAVWLKDEGFFEYVDILCNKHRLDGITLLTLTEYDLRSPPLEIKVLGDIKRLMLSVRKLQKIHIDVLEEMGYNSDSPMGSMTPFISALQSTDWLCNGELSHDCDGPITDLNSDQYQYMNGKNKHSVRRLDPEYWKTILSCIYVFIVFGFTSFIMVIVHERVPDMQTYPPLPDIFLDSVPRIPWAFAMTEVCGMILCYIWLLVLLLHKHRSILLRRLCSLMGTVFLLRCFTMFVTSLS

SEQ ID NO: 84422 - protein, 415 aa, Homo sapiens
  Payload ID: 16793
  Gene Symbol: SAMD8
  Gene Name: sterile alpha motif domain containing 8
  Uniprot ID: Q96LT4
  ENSP ID: ENSP00000438042
MAGPNQLCIRRWTTKHVAVWLKDEGFFEYVDILCNKHRLDGITLLTLTEYDLRSPPLEIKVLGDIKRLMLSVRKLQKIHIDVLEEMGYNSDSPMGSMTPFISALQSTDWLCNGELSHDCDGPITDLNSDQYQYMNGKNKHSVRRLDPEYWKTILSCIYVFIVFGFTSFIMVIVHERVPDMQTYPPLPDIFLDSVPRIPWAFAMTEVCGMILCYIWLLVLLLHKHRSILLRRLCSLMGTVFLLRCFTMFVTSLSVPGQHLQCTGKIYGSVWEKLHRAFAIWSGFGMTLTGVHTCGDYMFSGHTVVLTMLNFFVTEYTPRSWNFLHTLSWVLNLFGIFFILAAHEHYSIDVFIAFYITTRLFLYYHTLANTRAYQQSRRARIWFPMFSFFECNVNGTVPNEYCWPFSKPAIMKRLIG

SEQ ID NO: 84423 - protein, 1589 aa, Homo sapiens
  Payload ID: 16794
  Gene Symbol: SAMD9
  Gene Name: sterile alpha motif domain containing 9
  Uniprot ID: Q5K651
  ENSP ID: ENSP00000369292
MAKQLNLPENTDDWTKEDVNQWLESHKIDQKHREILTEQDVNGAVLKWLKKEHLVDMGITHGPAIQIEELFKELRKTAIEDSIQTSKMGKPSKNAPKDQTVSQKERRETSKQKQKGKENPDMANPSAMSTTAKGSKSLKVELIEDKIDYTKERQPSIDLTCVSYPFDEFSNPYRYKLDFSLQPETGPGNLIDPIHEFKAFTNTATATEEDVKMKFSNEVFRFASACMNSRTNGTIHFGVKDKPHGKIVGIKVTNDTKEALINHFNLMINKYFEDHQVQQAKKCIREPRFVEVLLPNSTLSDRFVIEVDIIPQFSECQYDYFQIKMQNYNNKIWEQSKKFSLFVRDGTSSKDITKNKVDFRAFKADFKTLAESRKAAEEKFRAKTNKKEREGPKLVKLLTGNQDLLDNSYYEQYILVTNKCHPDQTKHLDFLKEIKWFAVLEFDPESNINGVVKAYKESRVANLHFPSVYVEQKTTPNETISTLNLYHQPSWIFCNGRLDLDSEKYKPFDPSSWQRERASDVRKLISFLTHEDIMPRGKFLVVFLLLSSVDDPRDPLIETFCAFYQDLKGMENILCICVHPHIFQGWKDLLEARLIKHQDEISSQCISALSLEEINGTILKLKSVTQSSKRLLPSIGLSTVLLKKEEDIMTALEIICENECEGTLLEKDKNKFLEFKASKEEDFYRGGKVSWWNFYFSSESYSSPFVKRDKYERLEAMIQNCADSSKPTSTKIIHLYHHPGCGGTTLAMHILWELRKKFRCAVLKNKTVDFSEIGEQVTSLITYGAMNRQEYVPVLLLVDDFEEQDNVYLLQYSIQTAIAKKYIRYEKPLVIILNCMRSQNPEKSARIPDSIAVIQQLSPKEQRAFELKLKEIKEQHKNFEDFYSFMIMKTNFNKEYIENVVRNILKGQNIFTKEAKLFSFLALLNSYVPDTTISLSQCEKFLGIGNKKAFWGTEKFEDKMGTYSTILIKTEVIECGNYCGVRIIHSLIAEFSLEELKKSYHLNKSQIMLDMLTENLFFDTGMGKSKFLQDMHTLLLTRHRDEHEGETGNWFSPFIEALHKDEGNEAVEAVLLESIHRFNPNAFICQALARHFYIKKKDFGNALNWAKQAKIIEPDNSYISDTLGQVYKSKIRWWIEENGGNGNISVDDLIALLDLAEHASSAFKESQQQSEDREYEVKERLYPKSKRRYDTYNIAGYQGEIEVGLYTIQILQLIPFFDNKNELSKRYMVNFVSGSSDIPGDPNNEYKLALKNYIPYLTKLKFSLKKSFDFFDEYFVLLKPRNNIKQNEEAKTRRKVAGYFKKYVDIFCLLEESQNNTGLGSKFSEPLQVERCRRNLVALKADKFSGLLEYLIKSQEDAISTMKCIVNEYTFLLEQCTVKIQSKEKLNFILANIILSCIQPTSRLVKPVEKLKDQLREVLQPIGLTYQFSEPYFLASLLFWPENQQLDQHSEQMKEYAQALKNSFKGQYKHMHRTKQPIAYFFLGKGKRLERLVHKGKIDQCFKKTPDINSLWQSGDVWKEEKVQELLLRLQGRAENNCLYIEYGINEKITIPITPAFLGQLRSGRSIEKVSFYLGFSIGGPLAYDIEIV

SEQ ID NO: 84424 - protein, 1283 aa, Homo sapiens
  Payload ID: 16794
  Gene Symbol: SAMD9
  Gene Name: sterile alpha motif domain containing 9
  ENSP ID: ENSP00000414529
MAKQLNLPENTDDWTKEDVNQWLESHKIDQKHREILTEQDVNGAVLKWLKKEHLVDMGITHGPAIQIEELFKELRKTAIEDSIQTSKMGKPSKNAPKDQTVSQKERRETSKQKQKGKENPDMANPSAMSTTAKGSKSLKVELIEDKIDYTKERQPSIDLTCVSYPFDEFSNPYRYKLDFSLQPETGPGNLIDPIHEFKAFTNTATATEEDVKMKFSNEVFRFASACMNSRTNGTIHFGVKDKPHGKIVGIKVTNDTKEALINHFNLMINKYFEDHQVQQAKKCIREPRFVEVLLPNSTLSDRFVIEVDIIPQFSECQYDYFQIKMQNYNNKIWEQSKKFSLFVRDGTSSKDITKNKVDFRAFKADFKTLAESRKAAEEKFRAKTNKKEREGPKLVKLLTGNQDLLDNSYYEQYILVTNKCHPDQTKHLDFLKEIKWFAVLEFDPESNINGVVKAYKESRVANLHFPSVYVEQKTTPNETISTLNLYHQPSWIFCNGRLDLDSEKYKPFDPSSWQRERASDVRKLISFLTHEDIMPRGKFLVVFLLLSSVDDPRDPLIETFCAFYQDLKGMENILCICVHPHIFQGWKDLLEARLIKHQDEISSQCISALSLEEINGTILKLKSVTQSSKRLLPSIGLSTVLLKKEEDIMTALEIICENECEGTLLEKDKNKFLEFKASKEEDFYRGGKVSWWNFYFSSESYSSPFVKRDKYERLEAMIQNCADSSKPTSTKIIHLYHHPGCGGTTLAMHILWELRKKFRCAVLKNKTVDFSEIGEQVTSLITYGAMNRQEYVPVLLLVDDFEEQDNVYLLQYSIQTAIAKKYIRYEKPLVIILNCMRSQNPEKSARIPDSIAVIQQLSPKEQRAFELKLKEIKEQHKNFEDFYSFMIMKTNFNKEYIENVVRNILKGQNIFTKEAKLFSFLALLNSYVPDTTISLSQCEKFLGIGNKKAFWGTEKFEDKMGTYSTILIKTEVIECGNYCGVRIIHSLIAEFSLEELKKSYHLNKSQIMLDMLTENLFFDTGMGKSKFLQDMHTLLLTRHRDEHEGETGNWFSPFIEALHKDEGNEAVEAVLLESIHRFNPNAFICQALARHFYIKKKDFGNALNWAKQAKIIEPDNSYISDTLGQVYKSKIRWWIEENGGNGNISVDDLIALLDLAEHASSAFKESQQQSEDREYEVKERLYPKSKRRYDTYNIAGYQGEIEVGLYTIQILQLIPFFDNKNELSKRYMVNFVSGSSDIPGDPNNEYKLALKNYIPYLTKLKFSLKKSFDFFDEYFVLLKPRNN

SEQ ID NO: 84425 - protein, 1589 aa, Homo sapiens; identical to SEQ ID NO: 84423
  Payload ID: 16794
  Gene Symbol: SAMD9
  Gene Name: sterile alpha motif domain containing 9
  Uniprot ID: Q5K651
  ENSP ID: ENSP00000484636

SEQ ID NO: 84426 - protein, 1584 aa, Homo sapiens
  Payload ID: 16795
  Gene Symbol: SAMD9L
  Gene Name: sterile alpha motif domain containing 9-like
  Uniprot ID: Q8IVG5
  ENSP ID: ENSP00000326247
MSKQVSLPEMIKDWTKEHVKKWVNEDLKINEQYGQILLSEEVTGLVLQELTEKDLVEMGLPWGPALLIKRSYNKLNSKSPESDNHDPGQLDNSKPSKTEHQKNPKHTKKEEENSMSSNIDYDPREIRDIKQEESILMKENVLDEVANAKHKKKGKLKPEQLTCMPYPFDQFHDSHRYIEHYTLQPETGALNLIDPIHEFKALTNTETATEVDIKMKFSNEVFRFASACMNSRTNGTIHFGVKDKPHGEIVGVKITSKAAFIDHFNVMIKKYFEESEINEAKKCIREPRFVEVLLQNNTPSDRFVIEVDTIPKHSICNDKYFYIQMQICKDKIWKQNQNLSLFVREGASSRDILANSKQRDVDFKAFLQNLKSLVASRKEAEEEYGMKAMKKESEGLKLVKLLIGNRDSLDNSYYDWYILVTNKCHPNQIKHLDFLKEIKWFAVLEFDPESMINGVVKAYKESRVANLHFPNQYEDKTTNMWEKISTLNLYQQPSWIFCNGRSDLKSETYKPLEPHLWQRERASEVRKLILFLTDENIMTRGKFLVVFLLLSSVESPGDPLIETFWAFYQALKGMENMLCISVNSHIYQRWKDLLQTRMKMEDELTNHSISTLNIELVNSTILKLKSVTRSSRRFLPARGSSSVILEKKKEDVLTALEILCENECTETDIEKDKSKFLEFKKSKEEHFYRGGKVSWWNFYFSSENYSSDFVKRDSYEKLKDLIHCWAESPKPIFAKIINLYHHPGCGGTTLAMHVLWDLKKNFRCAVLKNKTTDFAEIAEQVINLVTYRAKSHQDYIPVLLLVDDFEEQENVYFLQNAIHSVLAEKDLRYEKTLVIILNCMRSRNPDESAKLADSIALNYQLSSKEQRAFGAKLKEIEKQHKNCENFYSFMIMKSNFDETYIENVVRNILKGQDVDSKEAQLISFLALLSSYVTDSTISVSQCEIFLGIIYTSTPWEPESLEDKMGTYSTLLIKTEVAEYGRYTGVRIIHPLIALYCLKELERSYHLDKCQIALNILEENLFYDSGIGRDKFQHDVQTLLLTRQRKVYGDETDTLFSPLMEALQNKDIEKVLSAGSRRFPQNAFICQALARHFYIKEKDFNTALDWARQAKMKAPKNSYISDTLGQVYKSEIKWWLDGNKNCRSITVNDLTHLLEAAEKASRAFKESQRQTDSKNYETENWSPQKSQRRYDMYNTACFLGEIEVGLYTIQILQLTPFFHKENELSKKHMVQFLSGKWTIPPDPRNECYLALSKFTSHLKNLQSDLKRCFDFFIDYMVLLKMRYTQKEIAEIMLSKKVSRCFRKYTELFCHLDPCLLQSKESQLLQEENCRKKLEALRADRFAGLLEYLNPNYKDATTMESIVNEYAFLLQQNSKKPMTNEKQNSILANIILSCLKPNSKLIQPLTTLKKQLREVLQFVGLSHQYPGPYFLACLLFWPENQELDQDSKLIEKYVSSLNRSFRGQYKRMCRSKQASTLFYLGKRKGLNSIVHKAKIEQYFDKAQNTNSLWHSGDVWKKNEVKDLLRRLTGQAEGKLISVEYGTEEKIKIPVISVYSGPLRSGRNIERVSFYLGFSIEGPLAYDIEVI

SEQ ID NO: 84427 - protein, 69 aa, Homo sapiens
  Payload ID: 16795
  Gene Symbol: SAMD9L
  Gene Name: sterile alpha motif domain containing 9-like
  ENSP ID: ENSP00000391387
MSKQVSLPEMIKDWTKEHVKKWVNEDLKINEQYGQILLSEEVTGLVLQELTEKDLVEMGLPWGPALLIK

SEQ ID NO: 84428 - protein, 69 aa, Homo sapiens; identical to SEQ ID NO: 84427
  Payload ID: 16795
  Gene Symbol: SAMD9L
  Gene Name: sterile alpha motif domain containing 9-like
  ENSP ID: ENSP00000391699

SEQ ID NO: 84429 - protein, 69 aa, Homo sapiens; identical to SEQ ID NO: 84427
  Payload ID: 16795
  Gene Symbol: SAMD9L
  Gene Name: sterile alpha motif domain containing 9-like
  ENSP ID: ENSP00000396137

SEQ ID NO: 84430 - protein, 1584 aa, Homo sapiens; identical to SEQ ID NO: 84426
  Payload ID: 16795
  Gene Symbol: SAMD9L
  Gene Name: sterile alpha motif domain containing 9-like
  Uniprot ID: Q8IVG5
  ENSP ID: ENSP00000405760

SEQ ID NO: 84431 - protein, 1584 aa, Homo sapiens; identical to SEQ ID NO: 84426
  Payload ID: 16795
  Gene Symbol: SAMD9L
  Gene Name: sterile alpha motif domain containing 9-like
  Uniprot ID: Q8IVG5
  ENSP ID: ENSP00000408796

SEQ ID NO: 84432 - protein, 69 aa, Homo sapiens; identical to SEQ ID NO: 84427
  Payload ID: 16795
  Gene Symbol: SAMD9L
  Gene Name: sterile alpha motif domain containing 9-like
  ENSP ID: ENSP00000410062

SEQ ID NO: 84433 - protein, 406 aa, Homo sapiens
  Payload ID: 16795
  Gene Symbol: SAMD9L
  Gene Name: sterile alpha motif domain containing 9-like
  Uniprot ID: Q8IVG5
  ENSP ID: ENSP00000484397
MSKQVSLPEMIKDWTKEHVKKWVNEDLKINEQYGQILLSEEVTGLVLQELTEKDLVEMGLPWGPALLIKRSYNKLNSKSPESDNHDPGQLDNSKPSKTEHQKNPKHTKKEEENSMSSNIDYDPREIRDIKQEESILMKENVLDEVANAKHKKKLEALRADRFAGLLEYLNPNYKDATTMESIVNEYAFLLQQNSKKPMTNEKQNSILANIILSCLKPNSKLIQPLTTLKKQLREVLQFVGLSHQYPGPYFLACLLFWPENQELDQDSKLIEKYVSSLNRSFRGQYKRMCRSKQASTLFYLGKRKGLNSIVHKAKIEQYFDKAQNTNSLWHSGDVWKKNEVKDLLRRLTGQAEGKLISVEYGTEEKIKIPVISVYSGPLRSGRNIERVSFYLGFSIEGPLAYDIEVI

SEQ ID NO: 84434 - protein, 318 aa, Homo sapiens
  Payload ID: 16796
  Gene Symbol: SRD5A3
  Gene Name: steroid 5 alpha-reductase 3
  Uniprot ID: Q9H8P0
  ENSP ID: ENSP00000264228
MAPWAEAEHSALNPLRAVWLTLTAAFLLTLLLQLLPPGLLPGCAIFQDLIRYGKTKCGEPSRPAACRAFDVPKRYFSHFYIISVLWNGFLLWCLTQSLFLGAPFPSWLHGLLRILGAAQFQGGELALSAFLVLVFLWLHSLRRLFECLYVSVFSNVMIHVVQYCFGLVYYVLVGLTVLSQVPMDGRNAYITGKNLLMQARWFHILGMMMFIWSSAHQYKCHVILGNLRKNKAGVVIHCNHRIPFGDWFEYVSSPNYLAELMIYVSMAVTFGFHNLTWWLVVTNVFFNQALSAFLSHQFYKSKFVSYPKHRKAFLPFLF

SEQ ID NO: 84435 - protein, 182 aa, Homo sapiens
  Payload ID: 16796
  Gene Symbol: SRD5A3
  Gene Name: steroid 5 alpha-reductase 3
  ENSP ID: ENSP00000424714
FLLTLLLQLLPPGLLPGCAIFQDLIRYGKTKCGEPSRPAACRAFDVPKRYFSHFYIISVLWNGFLLWCLTQSLFLGAPFPSWLHGLLRILGAAQFQGVVIHCNHRIPFGDWFEYVSSPNYLAELMIYVSMAVTFGFHNLTWWLVVTNVFFNQALSAFLSHQFYKSKFVSYPKHRKAFLPFLF

SEQ ID NO: 84436 - protein, 236 aa, Homo sapiens
  Payload ID: 16797
  Gene Symbol: SRA1
  Gene Name: steroid receptor RNA activator 1
  Uniprot ID: Q9HD15
  ENSP ID: ENSP00000337513
MTRCPAGQAEVEMAELYVKPGNKERGWNDPPQFSYGLQTQAGGPRRSLLTKRVAAPQDGSPRVPASETSPGPPPMGPPPPSSKAPRSPPVGSGPASGVEPTSFPVESEAVMEDVLRPLEQALEDCRGHTRKQVCDDISRRLALLQEQWAGGKLSIPVKKRMALLVQELSSHRWDAADDIHRSLMVDHVTEVSQWMVGVKRLIAEKRSLFSEEAANEEKSAATAEKNHTIPGFQQAS

SEQ ID NO: 84437 - protein, 75 aa, Homo sapiens
  Payload ID: 16797
  Gene Symbol: SRA1
  Gene Name: steroid receptor RNA activator 1
  ENSP ID: ENSP00000473378
  MOD_RES (1)..(1): Any amino acid
XQEQWAGGKLSIPVKKRMALLVQELSSHRWDAADDIHRSLMVDHVTEELSFNGKPTAYLRYPSRERARQLYLTQH

SEQ ID NO: 84438 - protein, 583 aa, Homo sapiens
  Payload ID: 16798
  Gene Symbol: STS
  Gene Name: steroid sulfatase (microsomal), isozyme S
  Uniprot ID: P08842
  ENSP ID: ENSP00000217961
MPLRKMKIPFLLLFFLWEAESHAASRPNIILVMADDLGIGDPGCYGNKTIRTPNIDRLASGGVKLTQHLAASPLCTPSRAAFMTGRYPVRSGMASWSRTGVFLFTASSGGLPTDEITFAKLLKDQGYSTALIGKWHLGMSCHSKTDFCHHPLHHGFNYFYGISLTNLRDCKPGEGSVFTTGFKRLVFLPLQIVGVTLLTLAALNCLGLLHVPLGVFFSLLFLAALILTLFLGFLHYFRPLNCFMMRNYEIIQQPMSYDNLTQRLTVEAAQFIQRNTETPFLLVLSYLHVHTALFSSKDFAGKSQHGVYGDAVEEMDWSVGQILNLLDELRLANDTLIYFTSDQGAHVEEVSSKGEIHGGSNGIYKGGKANNWEGGIRVPGILRWPRVIQAGQKIDEPTSNMDIFPTVAKLAGAPLPEDRIIDGRDLMPLLEGKSQRSDHEFLFHYCNAYLNAVRWHPQNSTSIWKAFFFTPNFNPVGSNGCFATHVCFCFGSYVTHHDPPLLFDISKDPRERNPLTPASEPRFYEILKVMQEAADRHTQTLPEVPDQFSWNNFLWKPWLQLCCPSTGLSCQCDREKQDKRLSR

SEQ ID NO: 84439 - protein, 259 aa, Homo sapiens
  Payload ID: 16799
  Gene Symbol: SRD5A1
  Gene Name: steroid-5-alpha-reductase, alpha polypeptide 1 (3-oxo-5 alpha-steroid delta 4-dehydrogenase alpha 1)
  Uniprot ID: P18405
  ENSP ID: ENSP00000274192
MATATGVAEERLLAALAYLQCAVGCAVFARNRQTNSVYGRHALPSHRLRVPARAAWVVQELPSLALPLYQYASESAPRLRSAPNCILLAMFLVHYGHRCLIYPFLMRGGKPMPLLACTMAIMFCTCNGYLQSRYLSHCAVYADDWVTDPRFLIGFGLWLTGMLINIHSDHILRNLRKPGDTGYKIPRGGLFEYVTAANYFGEIMEWCGYALASWSVQGAAFAFFTFCFLSGRAKEHHEWYLRKFEEYPKFRKIIIPFLF

SEQ ID NO: 84440 - protein, 135 aa, Homo sapiens
  Payload ID: 16799
  Gene Symbol: SRD5A1
  Gene Name: steroid-5-alpha-reductase, alpha polypeptide 1 (3-oxo-5 alpha-steroid delta 4-dehydrogenase alpha 1)
  ENSP ID: ENSP00000421342
MATATGVAEERLLAALAYLQCAVGCAVFARNRQTNSVYGRHALPSHRLRVPARAAWVVQELPSLALPLYQYASESAPRLRSAPNCILLAMFLVHYGHRFWLVVNGHVDKHPFRSYPKESQKTRRYWIQNTKGRLI

SEQ ID NO: 84441 - protein, 126 aa, Homo sapiens
  Payload ID: 16799
  Gene Symbol: SRD5A1
  Gene Name: steroid-5-alpha-reductase, alpha polypeptide 1 (3-oxo-5 alpha-steroid delta 4-dehydrogenase alpha 1)
  ENSP ID: ENSP00000425330
MATATGVAEERLLAALAYLQCAVGCAVFARNRQTNSVYGRHALPSHRLRVPARAAWVVQELPSLALPLYQYASESAPRLRSAPNCILLAMFLVHYGHRKCWYASTCSVPTSQMPAHGTHCLPGSES

SEQ ID NO: 84442 - protein, 254 aa, Homo sapiens
  Payload ID: 16800
  Gene Symbol: SRD5A2
  Gene Name: steroid-5-alpha-reductase, alpha polypeptide 2 (3-oxo-5 alpha-steroid delta 4-dehydrogenase alpha 2)
  Uniprot ID: P31213
  ENSP ID: ENSP00000477587
MQVQCQQSPVLAGSATLVALGALALYVAKPSGYGKHTESLKPAATRLPARAAWFLQELPSFAVPAGILARQPLSLFGPPGTVLLGLFCLHYFHRTFVYSLLNRGRPYPAILILRGTAFCTGNGVLQGYYLIYCAEYPDGWYTDIRFSLGVFLFILGMGINIHSDYILRQLRKPGEISYRIPQGGLFTYVSGANFLGEIIEWIGYALATWSLPALAFAFFSLCFLGLRAFHHHRFYLKMFEDYPKSRKALIPFIF

SEQ ID NO: 84443 - protein, 285 aa, Homo sapiens
  Payload ID: 16801
  Gene Symbol: STAR
  Gene Name: steroidogenic acute regulatory protein
  Uniprot ID: P49675
  ENSP ID: ENSP00000276449
MLLATFKLCAGSSYRHMRNMKGLRQQAVMAISQELNRRALGGPTPSTWINQVRRRSSLLGSRLEETLYSDQELAYLQQGEEAMQKALGILSNQEGWKKESQQDNGDKVMSKVVPDVGKVFRLEVVVDQPMERLYEELVERMEAMGEWNPNVKEIKVLQKIGKDTFITHELAAEAAGNLVGPRDFVSVRCAKRRGSTCVLAGMATDFGNMPEQKGVIRAEHGPTCMVLHPLAGSPSKTKLTWLLSIDLKGWLPKSIINQVLSQTQVDFANHLRKRLESHPASEARC

SEQ ID NO: 84444 - protein, 249 aa, Homo sapiens
  Payload ID: 16801
  Gene Symbol: STAR
  Gene Name: steroidogenic acute regulatory protein
  ENSP ID: ENSP00000429009
  MOD_RES (1)..(1): Any amino acid
XLRQQAVMAISQELNRRALGGPTPSTWINQVRRRSSLLGSRLEETLYSDQELAYLQQGEEAMQKALGILSNQEGWKKESQQDNGDKVMSKVVPDVGKVFRLEVVVDQPMERLYEELVERMEAMGEWNPNVKEIKVLQKIGKDTFITHELAAEAAGNLVGPRDFVSVRCAKRRGSTCVLAGMATDFGNMPEQKGVIRGGCPRASSTRSCPRPRWILPTTCASAWSPTLPLKPGVEDQPAVPNCAQLHWYT

SEQ ID NO: 84445 - protein, 48 aa, Homo sapiens
  Payload ID: 16801
  Gene Symbol: STAR
  Gene Name: steroidogenic acute regulatory protein
  ENSP ID: ENSP00000430030
MQKALGILSNQEGWKKESQQDNGDKVMSKVVPDVGKVFRLEVVVDQPM

SEQ ID NO: 84446 - protein, 503 aa, Homo sapiens
  Payload ID: 16802
  Gene Symbol: SCP2
  Gene Name: sterol carrier protein 2
  Uniprot ID: P22307
  ENSP ID: ENSP00000360564
MSSSPWEPATLRRVFVVGVGMTKFVKPGAENSRDYPDLAEEAGKKALADAQIPYSAVDQACVGYVFGVAECVLALGFEKMSKGSLGIKFSDRTIPTDKHVDLLINKYGLSAHPVAPQMFGYAGKEHMEKYGTKIEHFAKIGWKNHKHSVNNPYSQFQDEYSLDEVMASKEVFDFLTILQCCPTSDGAAAAILASEAFVQKYGLQSKAVEILAQEMMTDLPSSFEEKSIIKMVGFDMSKEAARKCYEKSGLTPNDIDVIELHDCFSTNELLTYEALGLCPEGQGATLVDRGDNTYGGKWVINPSGGLISKGHPLGATGLAQCAELCWQLRGEAGKRQVPGAKVALQHNLGIGGAVVVTLYKMGFPEAASSFRTHQIEAVPTSSASDGFKANLVFKEIEKKLEEEGEQFVKKIGGIFAFKVKDGPGGKEATWVVDVKNGKGSVLPNSDKKADCTITMADSDFLALMTGKMNPQSAFFQGKLKITGNMGLAMKLQNLQLQPGNAKL

SEQ ID NO: 84447 - protein, 322 aa, Homo sapiens
  Payload ID: 16802
  Gene Symbol: SCP2
  Gene Name: sterol carrier protein 2
  Uniprot ID: P22307
  ENSP ID: ENSP00000360568
MSSSPWEPATLRRVFVVGVGMTKFVKPGAENSRDYPDLAEEAGKKALADAQIPYSAVDQACVGYVFGVAECVLALGFEKMSKGSLGIKFSDRTIPTDKHVDLLINKYGLSAHPVAPQMFGYAGKEHMEKYGTKIEHFAKIGWKNHKHSVNNPYSQFQDEYSLDEVMASKEVFDFLTILQCCPTSDGAAAAILASEAFVQKYGLQSKAVEILAQEMMTDLPSSFEEKSIIKMVGFDMSKEAARKCYEKSGLTPNDIDVIELHDCFSTNELLTYEALGLCPEGQGATLVDRGDNTYGGKWVINPSGGLISKGHPLGATGGHSCS

SEQ ID NO: 84448 - protein, 547 aa, Homo sapiens
  Payload ID: 16802
  Gene Symbol: SCP2
  Gene Name: sterol carrier protein 2
  Uniprot ID: P22307
  ENSP ID: ENSP00000360569
MSSSPWEPATLRRVFVVGVGMTKFVKPGAENSRDYPDLAEEAGKKALADAQIPYSAVDQACVGYVFGDSTCGQRAIYHSLGMTGIPIINVNNNCATGSTALFMARQLIQGGVAECVLALGFEKMSKGSLGIKFSDRTIPTDKHVDLLINKYGLSAHPVAPQMFGYAGKEHMEKYGTKIEHFAKIGWKNHKHSVNNPYSQFQDEYSLDEVMASKEVFDFLTILQCCPTSDGAAAAILASEAFVQKYGLQSKAVEILAQEMMTDLPSSFEEKSIIKMVGFDMSKEAARKCYEKSGLTPNDIDVIELHDCFSTNELLTYEALGLCPEGQGATLVDRGDNTYGGKWVINPSGGLISKGHPLGATGLAQCAELCWQLRGEAGKRQVPGAKVALQHNLGIGGAVVVTLYKMGFPEAASSFRTHQIEAVPTSSASDGFKANLVFKEIEKKLEEEGEQFVKKIGGIFAFKVKDGPGGKEATWVVDVKNGKGSVLPNSDKKADCTITMADSDFLALMTGKMNPQSAFFQGKLKITGNMGLAMKLQNLQLQPGNAKL

SEQ ID NO: 84449 - protein, 523 aa, Homo sapiens
  Payload ID: 16802
  Gene Symbol: SCP2
  Gene Name: sterol carrier protein 2
  Uniprot ID: P22307
  ENSP ID: ENSP00000384569
MSSSPWEPATLRRVFVVGVGMTKFVKPGAENSRDYPDLAEEAGDSTCGQRAIYHSLGMTGIPIINVNNNCATGSTALFMARQLIQGGVAECVLALGFEKMSKGSLGIKFSDRTIPTDKHVDLLINKYGLSAHPVAPQMFGYAGKEHMEKYGTKIEHFAKIGWKNHKHSVNNPYSQFQDEYSLDEVMASKEVFDFLTILQCCPTSDGAAAAILASEAFVQKYGLQSKAVEILAQEMMTDLPSSFEEKSIIKMVGFDMSKEAARKCYEKSGLTPNDIDVIELHDCFSTNELLTYEALGLCPEGQGATLVDRGDNTYGGKWVINPSGGLISKGHPLGATGLAQCAELCWQLRGEAGKRQVPGAKVALQHNLGIGGAVVVTLYKMGFPEAASSFRTHQIEAVPTSSASDGFKANLVFKEIEKKLEEEGEQFVKKIGGIFAFKVKDGPGGKEATWVVDVKNGKGSVLPNSDKKADCTITMADSDFLALMTGKMNPQSAFFQGKLKITGNMGLAMKLQNLQLQPGNAKL

SEQ ID NO: 84450 - protein, 59 aa, Homo sapiens
  Payload ID: 16802
  Gene Symbol: SCP2
  Gene Name: sterol carrier protein 2
  Uniprot ID: P22307
  ENSP ID: ENSP00000386214
MGFPEAASSFRTHQIEAVPTSSASDGFKANLVFKEIEKKLEEIRRLTAQSQWLTQTSWL

SEQ ID NO: 84451 - protein, 143 aa, Homo sapiens
  Payload ID: 16802
  Gene Symbol: SCP2
  Gene Name: sterol carrier protein 2
  Uniprot ID: P22307
  ENSP ID: ENSP00000396413
MGFPEAASSFRTHQIEAVPTSSASDGFKANLVFKEIEKKLEEEGEQFVKKIGGIFAFKVKDGPGGKEATWVVDVKNGKGSVLPNSDKKADCTITMADSDFLALMTGKMNPQSAFFQGKLKITGNMGLAMKLQNLQLQPGNAKL

SEQ ID NO: 84452 - protein, 140 aa, Homo sapiens
  Payload ID: 16802
  Gene Symbol: SCP2
  Gene Name: sterol carrier protein 2
  Uniprot ID: P22307
  ENSP ID: ENSP00000406636
MGFPEAARTHQIEAVPTSSASDGFKANLVFKEIEKKLEEEGEQFVKKIGGIFAFKVKDGPGGKEATWVVDVKNGKGSVLPNSDKKADCTITMADSDFLALMTGKMNPQSAFFQGKLKITGNMGLAMKLQNLQLQPGNAKL

SEQ ID NO: 84453 - protein, 240 aa, Homo sapiens
  Payload ID: 16802
  Gene Symbol: SCP2
  Gene Name: sterol carrier protein 2
  ENSP ID: ENSP00000431279
  MOD_RES (1)..(1): Any amino acid
XPGAENSRDYPDLAEEAGKKALADAQIPYSAVDQACVGYVFGDSTCGQRAIYHSLGMTGIPIINVNNNCATGSTALFMARQLIQGGVAECVLALGFEKMSKGSLGIKFSDRTIPTDKHVDLLINKYGLSAHPVAPQMFGYAGKEHMEKYGTKIEHFAKIGWKNHKHSVNNPPTSDGAAAAILASEAFVQKYGLQSKAVEILAQEMMTDLPSSFEEKSIIKMVGFDMSKEAARKCYEKSGL

SEQ ID NO: 84454 - protein, 78 aa, Homo sapiens
  Payload ID: 16802
  Gene Symbol: SCP2
  Gene Name: sterol carrier protein 2
  ENSP ID: ENSP00000432645
  MOD_RES (1)..(1): Any amino acid
XALQHNLGIGGAVVVTLYKMGFPEAASSFRTHQIEAVPTSSASDGFKANLVFKEIEKKLEEIRRLTAQSQWLTQTSWL

SEQ ID NO: 84455 - protein, 466 aa, Homo sapiens
  Payload ID: 16802
  Gene Symbol: SCP2
  Gene Name: sterol carrier protein 2
  Uniprot ID: P22307
  ENSP ID: ENSP00000434132
MTGIPIINVNNNCATGSTALFMARQLIQGGVAECVLALGFEKMSKGSLGIKFSDRTIPTDKHVDLLINKYGLSAHPVAPQMFGYAGKEHMEKYGTKIEHFAKIGWKNHKHSVNNPYSQFQDEYSLDEVMASKEVFDFLTILQCCPTSDGAAAAILASEAFVQKYGLQSKAVEILAQEMMTDLPSSFEEKSIIKMVGFDMSKEAARKCYEKSGLTPNDIDVIELHDCFSTNELLTYEALGLCPEGQGATLVDRGDNTYGGKWVINPSGGLISKGHPLGATGLAQCAELCWQLRGEAGKRQVPGAKVALQHNLGIGGAVVVTLYKMGFPEAASSFRTHQIEAVPTSSASDGFKANLVFKEIEKKLEEEGEQFVKKIGGIFAFKVKDGPGGKEATWVVDVKNGKGSVLPNSDKKADCTITMADSDFLALMTGKMNPQSAFFQGKLKITGNMGLAMKLQNLQLQPGNAKL

SEQ ID NO: 84456 - protein, 366 aa, Homo sapiens
  Payload ID: 16802
  Gene Symbol: SCP2
  Gene Name: sterol carrier protein 2
  ENSP ID: ENSP00000435194
MSSSPWEPATLRRVFVVGVGMTKFVKPGAENSRDYPDLAEEAGKKALADAQIPYSAVDQACVGYVFGDSTCGQRAIYHSLGMTGIPIINVNNNCATGSTALFMARQLIQGGVAECVLALGFEKMSKGSLGIKFSDRTIPTDKHVDLLINKYGLSAHPVAPQMFGYAGKEHMEKYGTKIEHFAKIGWKNHKHSVNNPYSQFQDEYSLDEVMASKEVFDFLTILQCCPTSDGAAAAILASEAFVQKYGLQSKAVEILAQEMMTDLPSSFEEKSIIKMVGFDMSKEAARKCYEKSGLTPNDIDVIELHDCFSTNELLTYEALGLCPEGQGATLVDRGDNTYGGKWVINPSGGLISKGHPLGATGGHSCS

SEQ ID NO: 84457 - protein, 59 aa, Homo sapiens; identical to SEQ ID NO: 84450
  Payload ID: 16802
  Gene Symbol: SCP2
  Gene Name: sterol carrier protein 2
  Uniprot ID: P22307
  ENSP ID: ENSP00000435783

SEQ ID NO: 84458 - protein, 32 aa, Homo sapiens
  Payload ID: 16802
  Gene Symbol: SCP2
  Gene Name: sterol carrier protein 2
  ENSP ID: ENSP00000436581
  MOD_RES (1)..(1): Any amino acid
XALQHNLGIGGAVVVTLYKMGFPEAARKGNSL

SEQ ID NO: 84459 - protein, 140 aa, Homo sapiens
  Payload ID: 16802
  Gene Symbol: SCP2
  Gene Name: sterol carrier protein 2
  ENSP ID: ENSP00000437317
  MOD_RES (1)..(1): Any amino acid
XALQHNLGIGGAVVVTLYKMGFPEAASSFRTHQIEAVPTSSASDGFKANLVFKEIEKKLEEEGEQFVKKIGGIFAFKVKDGPGGKEATWVVDVKNGKGSVLPNSDKKADCTITMADSDFLALMTGKMNPQSVSMMELISC

SEQ ID NO: 84460 - protein, 550 aa, Homo sapiens
  Payload ID: 16803
  Gene Symbol: SOAT1
  Gene Name: sterol O-acyltransferase 1
  Uniprot ID: P35610
  ENSP ID: ENSP00000356591
MVGEEKMSLRNRLSKSRENPEEDEDQRNPAKESLETPSNGRIDIKQLIAKKIKLTAEAEELKPFFMKEVGSHFDDFVTNLIEKSASLDNGGCALTTFSVLEGEKNNHRAKDLRAPPEQGKIFIARRSLLDELLEVDHIRTIYHMFIALLILFILSTLVVDYIDEGRLVLEFSLLSYAFGKFPTVVWTWWIMFLSTFSVPYFLFQHWATGYSKSSHPLIRSLFHGFLFMIFQIGVLGFGPTYVVLAYTLPPASRFIIIFEQIRFVMKAHSFVRENVPRVLNSAKEKSSTVPIPTVNQYLYFLFAPTLIYRDSYPRNPTVRWGYVAMKFAQVFGCFFYVYYIFERLCAPLFRNIKQEPFSARVLVLCVFNSILPGVLILFLTFFAFLHCWLNAFAEMLRFGDRMFYKDWWNSTSYSNYYRTWNVVVHDWLYYYAYKDFLWFFSKRFKSAAMLAVFAVSAVVHEYALAVCLSFFYPVLFVLFMFFGMAFNFIVNDSRKKPIWNVLMWTSLFLGNGVLLCFYSQEWYARQHCPLKNPTFLDYVRPRSWTCRYVF

SEQ ID NO: 84461 - protein, 260 aa, Homo sapiens
  Payload ID: 16803
  Gene Symbol: SOAT1
  Gene Name: sterol O-acyltransferase 1
  ENSP ID: ENSP00000411309
MVGEEKMSLRNRLSKSRENPEEDEDQRNPAKESLETPSNGRIDIKQLIAKKIKLTAEAEELKPFFMKEVGSHFDDFVTNLIEKSASLDNGGCALTTFSVLEGEKNNHRAKDLRAPPEQGKIFIARRSLLDELLEVDHIRTIYHMFIALLILFILSTLVVDYIDEGRLVLEFSLLSYAFGKFPTVVWTWWIMFLSTFSVPYFLFQHWATGYSKSSHPLIRSLFHGFLFMIFQIGVLGFGPTYVVLAYTLPPASRFIIIFEQ

SEQ ID NO: 84462 - protein, 485 aa, Homo sapiens
  Payload ID: 16803
  Gene Symbol: SOAT1
  Gene Name: sterol O-acyltransferase 1
  Uniprot ID: P35610
  ENSP ID: ENSP00000441356
MKEVGSHFDDFVTNLIEKSASLDNGGCALTTFSVLEGEKNNHRAKDLRAPPEQGKIFIARRSLLDELLEVDHIRTIYHMFIALLILFILSTLVVDYIDEGRLVLEFSLLSYAFGKFPTVVWTWWIMFLSTFSVPYFLFQHWATGYSKSSHPLIRSLFHGFLFMIFQIGVLGFGPTYVVLAYTLPPASRFIIIFEQIRFVMKAHSFVRENVPRVLNSAKEKSSTVPIPTVNQYLYFLFAPTLIYRDSYPRNPTVRWGYVAMKFAQVFGCFFYVYYIFERLCAPLFRNIKQEPFSARVLVLCVFNSILPGVLILFLTFFAFLHCWLNAFAEMLRFGDRMFYKDWWNSTSYSNYYRTWNVVVHDWLYYYAYKDFLWFFSKRFKSAAMLAVFAVSAVVHEYALAVCLSFFYPVLFVLFMFFGMAFNFIVNDSRKKPIWNVLMWTSLFLGNGVLLCFYSQEWYARQHCPLKNPTFLDYVRPRSWTCRYVF

SEQ ID NO: 84463 - protein, 492 aa, Homo sapiens
  Payload ID: 16803
  Gene Symbol: SOAT1
  Gene Name: sterol O-acyltransferase 1
  Uniprot ID: P35610
  ENSP ID: ENSP00000445315
MELKPFFMKEVGSHFDDFVTNLIEKSASLDNGGCALTTFSVLEGEKNNHRAKDLRAPPEQGKIFIARRSLLDELLEVDHIRTIYHMFIALLILFILSTLVVDYIDEGRLVLEFSLLSYAFGKFPTVVWTWWIMFLSTFSVPYFLFQHWATGYSKSSHPLIRSLFHGFLFMIFQIGVLGFGPTYVVLAYTLPPASRFIIIFEQIRFVMKAHSFVRENVPRVLNSAKEKSSTVPIPTVNQYLYFLFAPTLIYRDSYPRNPTVRWGYVAMKFAQVFGCFFYVYYIFERLCAPLFRNIKQEPFSARVLVLCVFNSILPGVLILFLTFFAFLHCWLNAFAEMLRFGDRMFYKDWWNSTSYSNYYRTWNVVVHDWLYYYAYKDFLWFFSKRFKSAAMLAVFAVSAVVHEYALAVCLSFFYPVLFVLFMFFGMAFNFIVNDSRKKPIWNVLMWTSLFLGNGVLLCFYSQEWYARQHCPLKNPTFLDYVRPRSWTCRYVF

SEQ ID NO: 84464 - protein, 522 aa, Homo sapiens
  Payload ID: 16804
  Gene Symbol: SOAT2
  Gene Name: sterol O-acyltransferase 2
  Uniprot ID: O75908
  ENSP ID: ENSP00000301466
MEPGGARLRLQRTEGLGGERERQPCGDGNTETHRAPDLVQWTRHMEAVKAQLLEQAQGQLRELLDRAMREAIQSYPSQDKPLPPPPPGSLSRTQEPSLGKQKVFIIRKSLLDELMEVQHFRTIYHMFIAGLCVFIISTLAIDFIDEGRLLLEFDLLIFSFGQLPLALVTWVPMFLSTLLAPYQALRLWARGTWTQATGLGCALLAAHAVVLCALPVHVAVEHQLPPASRCVLVFEQVRFLMKSYSFLREAVPGTLRARRGEGIQAPSFSSYLYFLFCPTLIYRETYPRTPYVRWNYVAKNFAQALGCVLYACFILGRLCVPVFANMSREPFSTRALVLSILHATLPGIFMLLLIFFAFLHCWLNAFAEMLRFGDRMFYRDWWNSTSFSNYYRTWNVVVHDWLYSYVYQDGLRLLGARARGVAMLGVFLVSAVAHEYIFCFVLGFFYPVMLILFLVIGGMLNFMMHDQRTGPAWNVLMWTMLFLGQGIQVSLYCQEWYARRHCPLPQATFWGLVTPRSWSCHT

SEQ ID NO: 84465 - protein, 310 aa, Homo sapiens
  Payload ID: 16804
  Gene Symbol: SOAT2
  Gene Name: sterol O-acyltransferase 2
  Uniprot ID: O75908
  ENSP ID: ENSP00000442234
MEPGGARLRLQRTEGLGGERERQPCGDGNTETHRAPDLVQWTRHMEAVKAQLLEQAQGQLRELLDRAMREAIQSYPSQDKPLPPPPPGSLSRTQEPSLGKQKVFIIRKSLLDELMEVQHFRTIYHMFIAGLCVFIISTLAIDFIDEGRLLLEFDLLIFSFGQLPLALVTWVPMFLSTLLAPYQALRLWARGTWTQATGLGCALLAAHAVVLCALPVHVAVEHQLPPASRCVLVFEQVRFLMKSYSFLREAVPGTLRARRGEGIQAPSFSSYLYFLFCPTLIYRETYPRPWDVCSMPASSWAASVFLSLPT

SEQ ID NO: 84466 - protein, 170 aa, Homo sapiens
  Payload ID: 16804
  Gene Symbol: SOAT2
  Gene Name: sterol O-acyltransferase 2
  ENSP ID: ENSP00000450120
MEPGGARLRLQRTEGLGGERERQPCGDGNTETHRAPDLVQWTRHMEAVKAQLLEQAQGQLRELLDRAMREAIQSYPSQDKPLPPPPPGSLSSELMEVQHFRTIYHMFIAGLCVFIISTLAIDFIDEGRLLLEFDLLIFSFGQLPLALVTWVPMFLSTLLAPYQALRLWAR

SEQ ID NO: 84467 - protein, 1147 aa, Homo sapiens
  Payload ID: 16805
  Gene Symbol: SREBF1
  Gene Name: sterol regulatory element binding transcription factor 1
  Uniprot ID: P36956
  ENSP ID: ENSP00000261646
MDEPPFSEAALEQALGEPCDLDAALLTDIEDMLQLINNQDSDFPGLFDPPYAGSGAGGTDPASPDTSSPGSLSPPPATLSSSLEAFLSGPQAAPSPLSPPQPAPTPLKMYPSMPAFSPGPGIKEESVPLSILQTPTPQPLPGALLPQSFPAPAPPQFSSTPVLGYPSPPGGFSTGSPPGNTQQPLPGLPLASPPGVPPVSLHTQVQSVVPQQLLTVTAAPTAAPVTTTVTSQIQQVPVLLQPHFIKADSLLLTAMKTDGATVKAAGLSPLVSGTTVQTGPLPTLVSGGTILATVPLVVDAEKLPINRLAAGSKAPASAQSRGEKRTAHNAIEKRYRSSINDKIIELKDLVVGTEAKLNKSAVLRKAIDYIRFLQHSNQKLKQENLSLRTAVHKSKSLKDLVSACGSGGNTDVLMEGVKTEVEDTLTPPPSDAGSPFQSSPLSLGSRGSGSGGSGSDSEPDSPVFEDSKAKPEQRPSLHSRGMLDRSRLALCTLVFLCLSCNPLASLLGARGLPSPSDTTSVYHSPGRNVLGTESRDGPGWAQWLLPPVVWLLNGLLVLVSLVLLFVYGEPVTRPHSGPAVYFWRHRKQADLDLARGDFAQAAQQLWLALRALGRPLPTSHLDLACSLLWNLIRHLLQRLWVGRWLAGRAGGLQQDCALRVDASASARDAALVYHKLHQLHTMGKHTGGHLTATNLALSALNLAECAGDAVSVATLAEIYVAAALRVKTSLPRALHFLTRFFLSSARQACLAQSGSVPPAMQWLCHPVGHRFFVDGDWSVLSTPWESLYSLAGNPVDPLAQVTQLFREHLLERALNCVTQPNPSPGSADGDKEFSDALGYLQLLNSCSDAAGAPAYSFSISSSMATTTGVDPVAKWWASLTAVVIHWLRRDEEAAERLCPLVEHLPRVLQESERPLPRAALHSFKAARALLGCAKAESGPASLTICEKASGYLQDSLATTPASSSIDKAVQLFLCDLLLVVRTSLWRQQQPPAPAPAAQGTSSRPQASALELRGFQRDLSSLRRLAQSFRPAMRRVFLHEATARLMAGASPTRTHQLLDRSLRRRAGPGGKGGAVAELEPRPTRREHAEALLLASCYLPPGFLSAPGQRVGMLAEAARTLEKLGDRRLLHDCQQMLMRLGGGTTVTSS

SEQ ID NO: 84468 - protein, 1177 aa, Homo sapiens
  Payload ID: 16805
  Gene Symbol: SREBF1
  Gene Name: sterol regulatory element binding transcription factor 1
  Uniprot ID: P36956
  ENSP ID: ENSP00000348069
MDEPPFSEAALEQALGEPCDLDAALLTDIEGEVGAGRGRANGLDAPRAGADRGAMDCTFEDMLQLINNQDSDFPGLFDPPYAGSGAGGTDPASPDTSSPGSLSPPPATLSSSLEAFLSGPQAAPSPLSPPQPAPTPLKMYPSMPAFSPGPGIKEESVPLSILQTPTPQPLPGALLPQSFPAPAPPQFSSTPVLGYPSPPGGFSTGSPPGNTQQPLPGLPLASPPGVPPVSLHTQVQSVVPQQLLTVTAAPTAAPVTTTVTSQIQQVPVLLQPHFIKADSLLLTAMKTDGATVKAAGLSPLVSGTTVQTGPLPTLVSGGTILATVPLVVDAEKLPINRLAAGSKAPASAQSRGEKRTAHNAIEKRYRSSINDKIIELKDLVVGTEAKLNKSAVLRKAIDYIRFLQHSNQKLKQENLSLRTAVHKSKSLKDLVSACGSGGNTDVLMEGVKTEVEDTLTPPPSDAGSPFQSSPLSLGSRGSGSGGSGSDSEPDSPVFEDSKAKPEQRPSLHSRGMLDRSRLALCTLVFLCLSCNPLASLLGARGLPSPSDTTSVYHSPGRNVLGTESRDGPGWAQWLLPPVVWLLNGLLVLVSLVLLFVYGEPVTRPHSGPAVYFWRHRKQADLDLARGDFAQAAQQLWLALRALGRPLPTSHLDLACSLLWNLIRHLLQRLWVGRWLAGRAGGLQQDCALRVDASASARDAALVYHKLHQLHTMGKHTGGHLTATNLALSALNLAECAGDAVSVATLAEIYVAAALRVKTSLPRALHFLTRFFLSSARQACLAQSGSVPPAMQWLCHPVGHRFFVDGDWSVLSTPWESLYSLAGNPVDPLAQVTQLFREHLLERALNCVTQPNPSPGSADGDKEFSDALGYLQLLNSCSDAAGAPAYSFSISSSMATTTGVDPVAKWWASLTAVVIHWLRRDEEAAERLCPLVEHLPRVLQESERPLPRAALHSFKAARALLGCAKAESGPASLTICEKASGYLQDSLATTPASSSIDKAVQLFLCDLLLVVRTSLWRQQQPPAPAPAAQGTSSRPQASALELRGFQRDLSSLRRLAQSFRPAMRRVFLHEATARLMAGASPTRTHQLLDRSLRRRAGPGGKGGAVAELEPRPTRREHAEALLLASCYLPPGFLSAPGQRVGMLAEAARTLEKLGDRRLLHDCQQMLMRLGGGTTVTSS

SEQ ID NO: 84469 - protein, 216 aa, Homo sapiens
  Payload ID: 16805
  Gene Symbol: SREBF1
  Gene Name: sterol regulatory element binding transcription factor 1
  ENSP ID: ENSP00000379100
MKTDGATVKAAGLSPLVSGTTVQTGPLPTLVSGGTILATVPLVVDAEKLPINRLAAGSKAPASAQSRGEKRTAHNAIEKRYRSSINDKIIELKDLVVGTEAKLNKSAVLRKAIDYIRFLQHSNQKLKQENLSLRTAVHKSKSLKDLVSACGSGGNTDVLMEGVKTEVEDTLTPPPSDAGSPFQSSPLSLGSRGSGSGGSGSDSEPDSPVFEDSKTE

SEQ ID NO: 84470 - protein, 893 aa, Homo sapiens
  Payload ID: 16805
  Gene Symbol: SREBF1
  Gene Name: sterol regulatory element binding transcription factor 1
  ENSP ID: ENSP00000379106
MKTDGATVKAAGLSPLVSGTTVQTGPLPTLVSGGTILATVPLVVDAEKLPINRLAAGSKAPASAQSRGEKRTAHNAIEKRYRSSINDKIIELKDLVVGTEAKLNKSAVLRKAIDYIRFLQHSNQKLKQENLSLRTAVHKSKSLKDLVSACGSGGNTDVLMEGVKTEVEDTLTPPPSDAGSPFQSSPLSLGSRGSGSGGSGSDSEPDSPVFEDSKAKPEQRPSLHSRGMLDRSRLALCTLVFLCLSCNPLASLLGARGLPSPSDTTSVYHSPGRNVLGTESRDGPGWAQWLLPPVVWLLNGLLVLVSLVLLFVYGEPVTRPHSGPAVYFWRHRKQADLDLARGDFAQAAQQLWLALRALGRPLPTSHLDLACSLLWNLIRHLLQRLWVGRWLAGRAGGLQQDCALRVDASASARDAALVYHKLHQLHTMGKHTGGHLTATNLALSALNLAECAGDAVSVATLAEIYVAAALRVKTSLPRALHFLTRFFLSSARQACLAQSGSVPPAMQWLCHPVGHRFFVDGDWSVLSTPWESLYSLAGNPVDPLAQVTQLFREHLLERALNCVTQPNPSPGSADGDKEFSDALGYLQLLNSCSDAAGAPAYSFSISSSMATTTGVDPVAKWWASLTAVVIHWLRRDEEAAERLCPLVEHLPRVLQESERPLPRAALHSFKAARALLGCAKAESGPASLTICEKASGYLQDSLATTPASSSIDKAVQLFLCDLLLVVRTSLWRQQQPPAPAPAAQGTSSRPQASALELRGFQRDLSSLRRLAQSFRPAMRRVFLHEATARLMAGASPTRTHQLLDRSLRRRAGPGGKGGAVAELEPRPTRREHAEALLLASCYLPPGFLSAPGQRVGMLAEAARTLEKLGDRRLLHDCQQMLMRLGGGTTVTSS

SEQ ID NO: 84471 - protein, 325 aa, Homo sapiens
  Payload ID: 16805
  Gene Symbol: SREBF1
  Gene Name: sterol regulatory element binding transcription factor 1
  ENSP ID: ENSP00000411516
MDCTFEDMLQLINNQDSDFPGLFDPPYAGSGAGGTDPASPDTSSPGSLSPPPATLSSSLEAFLSGPQAAPSPLSPPQPAPTPLKMYPSMPAFSPGPGIKEESVPLSILQTPTPQPLPGALLPQSFPAPAPPQFSSTPVLGYPSPPGGFSTGSPPGNTQQPLPGLPLASPPGVPPVSLHTQVQSVVPQQLLTVTAAPTAAPVTTTVTSQIQQVLLQPHFIKADSLLLTAMKTDGATVKAAGLSPLVSGTTVQTGPLPTLVSGGTILATVPLVVDAEKLPINRLAAGSKAPASAQSRGEKRTAHNAIEKRYRSSINDKIIELKDLVV

SEQ ID NO: 84472 - protein, 66 aa, Homo sapiens
  Payload ID: 16805
  Gene Symbol: SREBF1
  Gene Name: sterol regulatory element binding transcription factor 1
  ENSP ID: ENSP00000463474
MKTDGATVKAAGLSPLVSGTTVQTGPLPTLVSGGTILATVPLVVDAEKLPINRLAAGSKAPASAQS

SEQ ID NO: 84473 - protein, 163 aa, Homo sapiens
  Payload ID: 16805
  Gene Symbol: SREBF1
  Gene Name: sterol regulatory element binding transcription factor 1
  ENSP ID: ENSP00000464923
GCAKAESGPASLTICEKASGYLQDSLATTPASSSIDKAVQLFLCDLLLVVRTSLWRQQQPPAPAPAAQGTSSRPQASALELRGFQRDLSSLRRLAQSFRPAMRRVFLHEATARLMAGASPTRTHQLLDRSLRRRAGPGGKGGEGAAADQGCAVCSAGKGAHGM

SEQ ID NO: 84474 - protein, 31 aa, Homo sapiens
  Payload ID: 16805
  Gene Symbol: SREBF1
  Gene Name: sterol regulatory element binding transcription factor 1
  ENSP ID: ENSP00000465747
  MOD_RES (1)..(1): Any amino acid
XASPTRTHQLLDRSLRRRAGPGGKGADGCAD

SEQ ID NO: 84475 - protein, 157 aa, Homo sapiens
  Payload ID: 16805
  Gene Symbol: SREBF1
  Gene Name: sterol regulatory element binding transcription factor 1
  ENSP ID: ENSP00000466453
KAARALLGCAKAESGPASLTICEKASGYLQDSLATTPASSSIDKAVQLFLCDLLLVVRTSLWRQQQPPAPAPAAQGTSSRPQASALELRGFQRDLSSLRRLAQSFRPAMRRARWRSWSRGPRGGSTRRPCCWPPATCPPASCRRPGSAWACWLRRRA

SEQ ID NO: 84476 - protein, 110 aa, Homo sapiens
  Payload ID: 16805
  Gene Symbol: SREBF1
  Gene Name: sterol regulatory element binding transcription factor 1
  ENSP ID: ENSP00000466643
AVQLFLCDLLLVVRTSLWRQQQPPAPAPAAQGTSSRPQASALELRGFQRDLSSLRRLAQSFRPAMRRVFLHEATARLMAGASPTRTHQLLDRSLRRRAGPGGKGADGCAD

SEQ ID NO: 84477 - protein, 113 aa, Homo sapiens
  Payload ID: 16805
  Gene Symbol: SREBF1
  Gene Name: sterol regulatory element binding transcription factor 1
  ENSP ID: ENSP00000474121
  MOD_RES (1)..(1): Any amino acid
XLQHSNQKLKQENLSLRTAVHKSKSLKDLVSACGSGGNTDVLMEGVKTEVEDTLTPPPSDAGSPFQSSPLSLGSRGSGSGGSGSDSEPDSPVFEDSKVGPCHGAPFPTPSHIL

SEQ ID NO: 84478 - protein, 1141 aa, Homo sapiens
  Payload ID: 16806
  Gene Symbol: SREBF2
  Gene Name: sterol regulatory element binding transcription factor 2
  Uniprot ID: Q12772
  ENSP ID: ENSP00000354476
MDDSGELGGLETMETLTELGDELTLGDIDEMLQFVSNQVGEFPDLFSEQLCSSFPGSGGSGSSSGSSGSSSSSSNGRGSSSGAVDPSVQRSFTQVTLPSFSPSAASPQAPTLQVKVSPTSVPTTPRATPILQPRPQPQPQPQTQLQQQTVMITPTFSTTPQTRIIQQPLIYQNAATSFQVLQPQVQSLVTSSQVQPVTIQQQVQTVQAQRVLTQTANGTLQTLAPATVQTVAAPQVQQVPVLVQPQIIKTDSLVLTTLKTDGSPVMAAVQNPALTALTTPIQTAALQVPTLVGSSGTILTTMPVMMGQEKVPIKQVPGGVKQLEPPKEGERRTTHNIIEKRYRSSINDKIIELKDLVMGTDAKMHKSGVLRKAIDYIKYLQQVNHKLRQENMVLKLANQKNKLLKGIDLGSLVDNEVDLKIEDFNQNVLLMSPPASDSGSQAGFSPYSIDSEPGSPLLDDAKVKDEPDSPPVALGMVDRSRILLCVLTFLCLSFNPLTSLLQWGGAHDSDQHPHSGSGRSVLSFESGSGGWFDWMMPTLLLWLVNGVIVLSVFVKLLVHGEPVIRPHSRSSVTFWRHRKQADLDLARGDFAAAAGNLQTCLAVLGRALPTSRLDLACSLSWNVIRYSLQKLRLVRWLLKKVFQCRRATPATEAGFEDEAKTSARDAALAYHRLHQLHITGKLPAGSACSDVHMALCAVNLAECAEEKIPPSTLVEIHLTAAMGLKTRCGGKLGFLASYFLSRAQSLCGPEHSAVPDSLRWLCHPLGQKFFMERSWSVKSAAKESLYCAQRNPADPIAQVHQAFCKNLLERAIESLVKPQAKKKAGDQEEESCEFSSALEYLKLLHSFVDSVGVMSPPLSRSSVLKSALGPDIICRWWTSAITVAISWLQGDDAAVRSHFTKVERIPKALEVTESPLVKAIFHACRAMHASLPGKADGQQSSFCHCERASGHLWSSLNVSGATSDPALNHVVQLLTCDLLLSLRTALWQKQASASQAVGETYHASGAELAGFQRDLGSLRRLAHSFRPAYRKVFLHEATVRLMAGASPTRTHQLLEHSLRRRTTQSTKHGEVDAWPGQRERATAILLACRHLPLSFLSSPGQRAVLLAEAARTLEKVGDRRSCNDCQQMIVKLGGGTAIAAS

SEQ ID NO: 84479 - protein, 684 aa, Homo sapiens
  Payload ID: 16806
  Gene Symbol: SREBF2
  Gene Name: sterol regulatory element binding transcription factor 2
  ENSP ID: ENSP00000395728
MDDSGELGGLETMETLTELGDELTLGDIDEMLQFVSNQVGEFPDLFSEQLCSSFPGSGGSGSSSGSSGSSSSSSNGRGSSSGAVDPSVQRSFTQVTLPSFSPSAASPQAPTLQVKVSPTSVPTTPRATPILQPRPQPQPQPQTQLQQQTVMITPTFSTTPQTRIIQQPLIYQNAATSFQVLQPQVQSLVTSSQVQPVTIQQQVQTVQAQRVLTQTANGTLQTLAPATVQTVAAPQVQQVPVLVQPQIIKTDSLVLTTLKTDGSPVMAAVQNPALTALTTPIQTAALQVPTLVGSSGTILTTMPVMMGQEKVPIKQVPGGVKQLEPPKEGERRTTHNIIEKRYRSSINDKIIELKDLVMGTDAKMHKSGVLRKAIDYIKYLQQVNHKLRQENMVLKLANQKNKLLKGIDLGSLVDNEVDLKIEDFNQNVLLMSPPASDSGSQAGFSPYSIDSEPGSPLLDDAKVKDEPDSPPVALGMVDRSRILLCVLTFLCLSFNPLTSLLQWGGAHDSDQHPHSGSGRSVLSFESGSGGWFDWMMPTLLLWLVNGVIVLSVFVKLLVHGEPVIRPHSRSSVTFWRHRKQADLDLARGVYGKKSGATHSIEEELNIHISRGTRTRTLLSSRRFCSCCRQPTNLPGSFGPGTAHLPPGPGLQPLLERDPLQPAEATPGALAAQESLPVPAGHASH

SEQ ID NO: 84480 - protein, 257 aa, Homo sapiens
  Payload ID: 16806
  Gene Symbol: SREBF2
  Gene Name: sterol regulatory element binding transcription factor 2
  ENSP ID: ENSP00000412287
  MOD_RES (1)..(1): Any amino acid
XSAITVAISWLQGDDAAVRSHFTKVERIPKALEVTESPLVKAIFHACRAMHASLPGKADGQQSSFCHCERASGHLWSSLNVSGATSDPALNHVVQLLTCDLLLSLRTALWQKQASASQAVGETYHASGAELAGFQRDLGSLRRLAHSFRPAYRKAASRALGLHPGHLSTSPTRCVQGFLVTSWEKQAFCLSLLSSCSCCSARFPAWLRVRVRDNRGCFSGVFLHEATVRLMAGASPTRTHQLLEHSLRRRTTQSTKH

SEQ ID NO: 84481 - protein, 654 aa, Homo sapiens
  Payload ID: 16806
  Gene Symbol: SREBF2
  Gene Name: sterol regulatory element binding transcription factor 2
  ENSP ID: ENSP00000484441
MLQFVSNQVGEFPDLFSEQLCSSFPGSGGSGSSSGSSGSSSSSSNGRGSSSGAVDPSVQRSFTQVTLPSFSPSAASPQAPTLQVKVSPTSVPTTPRATPILQPRPQPQPQPQTQLQQQTVMITPTFSTTPQTRIIQQPLIYQNAATSFQVLQPQVQSLVTSSQVQPVTIQQQVQTVQAQRVLTQTANGTLQTLAPATVQTVAAPQVQQVPVLVQPQIIKTDSLVLTTLKTDGSPVMAAVQNPALTALTTPIQTAALQVPTLVGSSGTILTTMPVMMGQEKVPIKQVPGGVKQLEPPKEGERRTTHNIIEKRYRSSINDKIIELKDLVMGTDAKMHKSGVLRKAIDYIKYLQQVNHKLRQENMVLKLANQKNKLLKGIDLGSLVDNEVDLKIEDFNQNVLLMSPPASDSGSQAGFSPYSIDSEPGSPLLDDAKVKDEPDSPPVALGMVDRSRILLCVLTFLCLSFNPLTSLLQWGGAHDSDQHPHSGSGRSVLSFESGSGGWFDWMMPTLLLWLVNGVIVLSVFVKLLVHGEPVIRPHSRSSVTFWRHRKQADLDLARGVYGKKSGATHSIEEELNIHISRGTRTRTLLSSRRFCSCCRQPTNLPGSFGPGTAHLPPGPGLQPLLERDPLQPAEATPGALAAQESLPVPAGHASH

SEQ ID NO: 84482 - protein, 299 aa, Homo sapiens
  Payload ID: 16807
  Gene Symbol: SC5D
  Gene Name: sterol-C5-desaturase
  Uniprot ID: O75845
  ENSP ID: ENSP00000264027
MDLVLRVADYYFFTPYVYPATWPEDDIFRQAISLLIVTNVGAYILYFFCATLSYYFVFDHALMKHPQFLKNQVRREIKFTVQALPWISILTVALFLLEIRGYSKLHDDLGEFPYGLFELVVSIISFLFFTDMFIYWIHRGLHHRLVYKRLHKPHHIWKIPTPFASHAFHPIDGFLQSLPYHIYPFIFPLHKVVYLSLYILVNIWTISIHDGDFRVPQILQPFINGSAHHTDHHMFFDYNYGQYFTLWDRIGGSFKNPSSFEGKGPLSYVKEMTEGKRSSHSGNGCKNEKLFNGEFTKTE

SEQ ID NO: 84483 - protein, 299 aa, Homo sapiens; identical to SEQ ID NO: 84482
  Payload ID: 16807
  Gene Symbol: SC5D
  Gene Name: sterol-C5-desaturase
  Uniprot ID: O75845
  ENSP ID: ENSP00000376539

SEQ ID NO: 84484 - protein, 228 aa, Homo sapiens
  Payload ID: 16807
  Gene Symbol: SC5D
  Gene Name: sterol-C5-desaturase
  ENSP ID: ENSP00000432550
MDLVLRVADYYFFTPYVYPATWPEDDIFRQAISLLIVTNVGAYILYFFCATLSYYFVFDHALMKHPQFLKNQVRREIKFTVQALPWISILTVALFLLEIRGYSKLHDDLGEFPYGLFELVVSIISFLFFTDMFIYWIHRGLHHRLVYKRLHKPHHIWKIPTPFASHAFHPIDGFLQSLPYHIYPFIFPLHKVVYLSLYILVNIWTISIHDGNGCKNEKLFNGEFTKTE

SEQ ID NO: 84485 - protein, 177 aa, Homo sapiens
  Payload ID: 16807
  Gene Symbol: SC5D
  Gene Name: sterol-C5-desaturase
  ENSP ID: ENSP00000436290
MDLVLRVADYYFFTPYVYPATWPEDDIFRQAISLLIVTNVGAYILYFFCATLSYYFVFDHALMKHPQFLKYWKFHFQNQVRREIKFTVQALPWISILTVALFLLEIRGYSKLHDDLGEFPYGLFELVVSIISFLFFTDMFIYWIHRGLHHRLVYKRLHKPHHIWKIPTPFASHAFHP

SEQ ID NO: 84486 - protein, 63 aa, Homo sapiens
  Payload ID: 16808
  Gene Symbol: STRA13
  Gene Name: stimulated by retinoic acid 13
  Uniprot ID: A8MT69
  ENSP ID: ENSP00000302951
MEGAGAGSGFRKELVSRLLHLHFKDDKTKEAAVRGVRQAQAEDALRVDVDQLEKVLPQLLLDF

SEQ ID NO: 84487 - protein, 81 aa, Homo sapiens
  Payload ID: 16808
  Gene Symbol: STRA13
  Gene Name: stimulated by retinoic acid 13
  Uniprot ID: A8MT69
  ENSP ID: ENSP00000376168
MEGAGAGSGFRKELVSRLLHLHFKDDKTKVSGDALQLMVELLKVFVVEAAVRGVRQAQAEDALRVDVDQLEKVLPQLLLDF

SEQ ID NO: 84488 - protein, 58 aa, Homo sapiens
  Payload ID: 16808
  Gene Symbol: STRA13
  Gene Name: stimulated by retinoic acid 13
  Uniprot ID: A8MT69
  ENSP ID: ENSP00000462015
MEGAGAGSGFRKELVSRLLHLHFKDDKTKEAAVRGVRQAQAEDALRVDVDQLEKLLDF

SEQ ID NO: 84489 - protein, 75 aa, Homo sapiens
  Payload ID: 16808
  Gene Symbol: STRA13
  Gene Name: stimulated by retinoic acid 13
  ENSP ID: ENSP00000463974
EGAGAGSGFRKELVSRLLHLHFKDDKTKVSGDALQLMVELLKVFVVEAAVRGVRQAQAEDALRVDVDQLEKLLDF

SEQ ID NO: 84490 - protein, 66 aa, Homo sapiens
  Payload ID: 16808
  Gene Symbol: STRA13
  Gene Name: stimulated by retinoic acid 13
  ENSP ID: ENSP00000464024
  MOD_RES (1)..(1): Any amino acid
XPLPGTKPALHAGNQELVSRLLHLHFKDDKTKEAAVRGVRQAQAEDALRVDVDQLEKVLPQLLLDF

SEQ ID NO: 84491 - protein, 131 aa, Homo sapiens
  Payload ID: 16808
  Gene Symbol: STRA13
  Gene Name: stimulated by retinoic acid 13
  ENSP ID: ENSP00000464357
MEGAGAGSGFRKELVSRLLHLHFKDDKTKVSGDALQLMVELLKVFVVGEPRAHAPSGHSIRNFAFFQRENQDVFSRFPQGPKLGSPEPVCQKQQSAACGRPRQKTRSVWTWTSWRRCFRSCSWTSRDLSRG

SEQ ID NO: 84492 - protein, 667 aa, Homo sapiens
  Payload ID: 16809
  Gene Symbol: STRA6
  Gene Name: stimulated by retinoic acid 6
  Uniprot ID: Q9BX79
  ENSP ID: ENSP00000326085
MSSQPAGNQTSPGATEDYSYGSWYIDEPQGGEELQPEGEVPSCHTSIPPGLYHACLASLSILVLLLLAMLVRRRQLWPDCVRGRPGLPSPVDFLAGDRPRAVPAAVFMVLLSSLCLLLPDEDALPFLTLASAPSQDGKTEAPRGAWKILGLFYYAALYYPLAACATAGHTAAHLLGSTLSWAHLGVQVWQRAECPQVPKIYKYYSLLASLPLLLGLGFLSLWYPVQLVRSFSRRTGAGSKGLQSSYSEEYLRNLLCRKKLGSSYHTSKHGFLSWARVCLRHCIYTPQPGFHLPLKLVLSATLTGTAIYQVALLLLVGVVPTIQKVRAGVTTDVSYLLAGFGIVLSEDKQEVVELVKHHLWALEVCYISALVLSCLLTFLVLMRSLVTHRTNLRALHRGAALDLSPLHRSPHPSRQAIFCWMSFSAYQTAFICLGLLVQQIIFFLGTTALAFLVLMPVLHGRNLLLFRSLESSWPFWLTLALAVILQNMAAHWVFLETHDGHPQLTNRRVLYAATFLLFPLNVLVGAMVATWRVLLSALYNAIHLGQMDLSLLPPRAATLDPGYYTYRNFLKIEVSQSHPAMTAFCSLLLQAQSLLPRTMAAPQDSLRPGEEDEGMQLLQTKDSMAKGARPGASRGRARWGLAYTLLHNPTLQVFRKTALLGANGAQP

SEQ ID NO: 84493 - protein, 667 aa, Homo sapiens; identical to SEQ ID NO: 84492
  Payload ID: 16809
  Gene Symbol: STRA6
  Gene Name: stimulated by retinoic acid 6
  Uniprot ID: Q9BX79
  ENSP ID: ENSP00000378537

SEQ ID NO: 84494 - protein, 659 aa, Homo sapiens
  Payload ID: 16809
  Gene Symbol: STRA6
  Gene Name: stimulated by retinoic acid 6
  ENSP ID: ENSP00000400403
MSSQPAGNQTSPGATEDYSYGSWYIDEPQGGEELQPEGEVPSCHTSIPPGLYHACLASLSILVLLLLAMLVRRRQLWPDCVRGRPGLPSPVDFLAGDRPRAVPAAVFMVLLSSLCLLLPDEDALPFLTLASAPSQGAWKILGLFYYAALYYPLAACATAGHTAAHLLGSTLSWAHLGVQVWQRAECPQVPKIYKYYSLLASLPLLLGLGFLSLWYPVQLVRSFSRRTGAGSKGLQSSYSEEYLRNLLCRKKLGSSYHTSKHGFLSWARVCLRHCIYTPQPGFHLPLKLVLSATLTGTAIYQVALLLLVGVVPTIQKVRAGVTTDVSYLLAGFGIVLSEDKQEVVELVKHHLWALEVCYISALVLSCLLTFLVLMRSLVTHRTNLRALHRGAALDLSPLHRSPHPSRQAIFCWMSFSAYQTAFICLGLLVQQIIFFLGTTALAFLVLMPVLHGRNLLLFRSLESSWPFWLTLALAVILQNMAAHWVFLETHDGHPQLTNRRVLYAATFLLFPLNVLVGAMVATWRVLLSALYNAIHLGQMDLSLLPPRAATLDPGYYTYRNFLKIEVSQSHPAMTAFCSLLLQAQSLLPRTMAAPQDSLRPGEEDEGMQLLQTKDSMAKGARPGASRGRARWGLAYTLLHNPTLQVFRKTALLGANGAQP

SEQ ID NO: 84495 - protein, 159 aa, Homo sapiens
  Payload ID: 16809
  Gene Symbol: STRA6
  Gene Name: stimulated by retinoic acid 6
  Uniprot ID: Q9BX79
  ENSP ID: ENSP00000407176
MSSQPAGNQTSPGATEDYSYGSWYIDEPQGGEELQPEGEVPSCHTSIPPGLYHACLASLSILVLLLLAMLVRRRQLWPDCVRGRPGLPSPVDFLAGDRPRAVPAAVFMVLLSSLCLLLPDEDALPFLTLASAPSQDGKTEAPRGNLPKITELRLVRAWI

SEQ ID NO: 84496 - protein, 667 aa, Homo sapiens; identical to SEQ ID NO: 84492
  Payload ID: 16809
  Gene Symbol: STRA6
  Gene Name: stimulated by retinoic acid 6
  Uniprot ID: Q9BX79
  ENSP ID: ENSP00000410221

SEQ ID NO: 84497 - protein, 658 aa, Homo sapiens
  Payload ID: 16809
  Gene Symbol: STRA6
  Gene Name: stimulated by retinoic acid 6
  Uniprot ID: Q9BX79
  ENSP ID: ENSP00000413012
MSSQPAGNQTSPGATEDYSYGSWYIDEPQGGEELQPEGEVPSCHTSIPPGLYHACLASLSILVLLLLAMLVRRRQLWPDCVRGRPGLPRPRAVPAAVFMVLLSSLCLLLPDEDALPFLTLASAPSQDGKTEAPRGAWKILGLFYYAALYYPLAACATAGHTAAHLLGSTLSWAHLGVQVWQRAECPQVPKIYKYYSLLASLPLLLGLGFLSLWYPVQLVRSFSRRTGAGSKGLQSSYSEEYLRNLLCRKKLGSSYHTSKHGFLSWARVCLRHCIYTPQPGFHLPLKLVLSATLTGTAIYQVALLLLVGVVPTIQKVRAGVTTDVSYLLAGFGIVLSEDKQEVVELVKHHLWALEVCYISALVLSCLLTFLVLMRSLVTHRTNLRALHRGAALDLSPLHRSPHPSRQAIFCWMSFSAYQTAFICLGLLVQQIIFFLGTTALAFLVLMPVLHGRNLLLFRSLESSWPFWLTLALAVILQNMAAHWVFLETHDGHPQLTNRRVLYAATFLLFPLNVLVGAMVATWRVLLSALYNAIHLGQMDLSLLPPRAATLDPGYYTYRNFLKIEVSQSHPAMTAFCSLLLQAQSLLPRTMAAPQDSLRPGEEDEGMQLLQTKDSMAKGARPGASRGRARWGLAYTLLHNPTLQVFRKTALLGANGAQP

SEQ ID NO: 84498 - protein, 704 aa, Homo sapiens
  Payload ID: 16809
  Gene Symbol: STRA6
  Gene Name: stimulated by retinoic acid 6
  Uniprot ID: Q9BX79
  ENSP ID: ENSP00000440238
MQIRLLRAELVVPLWQFIRQWPPGSDGWGQMEEKGQRMSSQPAGNQTSPGATEDYSYGSWYIDEPQGGEELQPEGEVPSCHTSIPPGLYHACLASLSILVLLLLAMLVRRRQLWPDCVRGRPGLPSPVDFLAGDRPRAVPAAVFMVLLSSLCLLLPDEDALPFLTLASAPSQDGKTEAPRGAWKILGLFYYAALYYPLAACATAGHTAAHLLGSTLSWAHLGVQVWQRAECPQVPKIYKYYSLLASLPLLLGLGFLSLWYPVQLVRSFSRRTGAGSKGLQSSYSEEYLRNLLCRKKLGSSYHTSKHGFLSWARVCLRHCIYTPQPGFHLPLKLVLSATLTGTAIYQVALLLLVGVVPTIQKVRAGVTTDVSYLLAGFGIVLSEDKQEVVELVKHHLWALEVCYISALVLSCLLTFLVLMRSLVTHRTNLRALHRGAALDLSPLHRSPHPSRQAIFCWMSFSAYQTAFICLGLLVQQIIFFLGTTALAFLVLMPVLHGRNLLLFRSLESSWPFWLTLALAVILQNMAAHWVFLETHDGHPQLTNRRVLYAATFLLFPLNVLVGAMVATWRVLLSALYNAIHLGQMDLSLLPPRAATLDPGYYTYRNFLKIEVSQSHPAMTAFCSLLLQAQSLLPRTMAAPQDSLRPGEEDEGMQLLQTKDSMAKGARPGASRGRARWGLAYTLLHNPTLQVFRKTALLGANGAQP

SEQ ID NO: 84499 - protein, 706 aa, Homo sapiens
  Payload ID: 16809
  Gene Symbol: STRA6
  Gene Name: stimulated by retinoic acid 6
  Uniprot ID: Q9BX79
  ENSP ID: ENSP00000456609
MGGKGGGDTRGPVLFPCQLAQALSPRRAFPRELKEKGQRMSSQPAGNQTSPGATEDYSYGSWYIDEPQGGEELQPEGEVPSCHTSIPPGLYHACLASLSILVLLLLAMLVRRRQLWPDCVRGRPGLPSPVDFLAGDRPRAVPAAVFMVLLSSLCLLLPDEDALPFLTLASAPSQDGKTEAPRGAWKILGLFYYAALYYPLAACATAGHTAAHLLGSTLSWAHLGVQVWQRAECPQVPKIYKYYSLLASLPLLLGLGFLSLWYPVQLVRSFSRRTGAGSKGLQSSYSEEYLRNLLCRKKLGSSYHTSKHGFLSWARVCLRHCIYTPQPGFHLPLKLVLSATLTGTAIYQVALLLLVGVVPTIQKVRAGVTTDVSYLLAGFGIVLSEDKQEVVELVKHHLWALEVCYISALVLSCLLTFLVLMRSLVTHRTNLRALHRGAALDLSPLHRSPHPSRQAIFCWMSFSAYQTAFICLGLLVQQIIFFLGTTALAFLVLMPVLHGRNLLLFRSLESSWPFWLTLALAVILQNMAAHWVFLETHDGHPQLTNRRVLYAATFLLFPLNVLVGAMVATWRVLLSALYNAIHLGQMDLSLLPPRAATLDPGYYTYRNFLKIEVSQSHPAMTAFCSLLLQAQSLLPRTMAAPQDSLRPGEEDEGMQLLQTKDSMAKGARPGASRGRARWGLAYTLLHNPTLQVFRKTALLGANGAQP

SEQ ID NO: 84500 - protein, 88 aa, Homo sapiens
  Payload ID: 16809
  Gene Symbol: STRA6
  Gene Name: stimulated by retinoic acid 6
  ENSP ID: ENSP00000458204
MSSQPAGNQTSPGATEDYSYGSWYIDEPQGGEELQPEGEVPSCHTSIPPGLYHACLASLSILVLLLLAMLVRRRQLWPDCVRGRPGLP

SEQ ID NO: 84501 - protein, 87 aa, Homo sapiens
  Payload ID: 16809
  Gene Symbol: STRA6
  Gene Name: stimulated by retinoic acid 6
  ENSP ID: ENSP00000458734
MSSQPAGNQTSPGATEDYSYGSWYIDEPQGGEELQPEGEVPSCHTSIPPGLYHACLASLSVSPTQVEPGLQAAASLGSGTCVPHWGW

SEQ ID NO: 84502 - protein, 682 aa, Homo sapiens
  Payload ID: 16809
  Gene Symbol: STRA6
  Gene Name: stimulated by retinoic acid 6
  Uniprot ID: Q9BX79
  ENSP ID: ENSP00000458827
MDSQGDWAAQEKGQRMSSQPAGNQTSPGATEDYSYGSWYIDEPQGGEELQPEGEVPSCHTSIPPGLYHACLASLSILVLLLLAMLVRRRQLWPDCVRGRPGLPSPVDFLAGDRPRAVPAAVFMVLLSSLCLLLPDEDALPFLTLASAPSQDGKTEAPRGAWKILGLFYYAALYYPLAACATAGHTAAHLLGSTLSWAHLGVQVWQRAECPQVPKIYKYYSLLASLPLLLGLGFLSLWYPVQLVRSFSRRTGAGSKGLQSSYSEEYLRNLLCRKKLGSSYHTSKHGFLSWARVCLRHCIYTPQPGFHLPLKLVLSATLTGTAIYQVALLLLVGVVPTIQKVRAGVTTDVSYLLAGFGIVLSEDKQEVVELVKHHLWALEVCYISALVLSCLLTFLVLMRSLVTHRTNLRALHRGAALDLSPLHRSPHPSRQAIFCWMSFSAYQTAFICLGLLVQQIIFFLGTTALAFLVLMPVLHGRNLLLFRSLESSWPFWLTLALAVILQNMAAHWVFLETHDGHPQLTNRRVLYAATFLLFPLNVLVGAMVATWRVLLSALYNAIHLGQMDLSLLPPRAATLDPGYYTYRNFLKIEVSQSHPAMTAFCSLLLQAQSLLPRTMAAPQDSLRPGEEDEGMQLLQTKDSMAKGARPGASRGRARWGLAYTLLHNPTLQVFRKTALLGANGAQP

SEQ ID NO: 84503 - protein, 266 aa, Homo sapiens
  Payload ID: 16809
  Gene Symbol: STRA6
  Gene Name: stimulated by retinoic acid 6
  ENSP ID: ENSP00000459546
  MOD_RES (1)..(1): Any amino acid
XVRAGVTTDVSYLLAGFGIVLSEDKQEVVELVKHHLWALEVCYISALVLSCLLTFLVLMRSLVTHRAPGAADHLLPGNHGPGLPGAHACAPWQEPPALPFPGVLVNMAAHWVFLETHDGHPQLTNRRVLYAATFLLFPLNVLVGAMVATWRVLLSALYNAIHLGQMDLSLLPPRAATLDPGYYTYRNFLKIEVSQSHPAMTAFCSLLLQAQSLLPRTMAAPQDSLRPGEEDEGMQLLQTKDSMAKGARPGASRGRARWGLAYTLLH

SEQ ID NO: 84504 - protein, 477 aa, Homo sapiens
  Payload ID: 16809
  Gene Symbol: STRA6
  Gene Name: stimulated by retinoic acid 6
  ENSP ID: ENSP00000461799
MSSQPAGNQTSPGATEDYSYGSWYIDEPQGGEELQPEGEVPSCHTSIPPGLYHACLASLSILVLLLLAMLVRRRQLWPDCVRGRPGLPSPVDFLAGDRPRAVPAAVFMVLLSSLCLLLPDEDALPFLTLASAPSQDGKTEAPRGAWKILGLFYYAALYYPLAACATAGHTAAHLLGSTLSWAHLGVQVWQRAECPQVPKIYKYYSLLASLPLLLGLGFLSLWYPVQLVRSFSRRTGAGSKGLQSSYSEEYLRNLLCRKKLGSRMAAVEDWLLLPRILVIKRDNYQLGTAGRPWPGLGHLGSCWPFSWAPWEGGGLPGLSGAVHHTPSFEDYRIPSPAEAGAFSYTDRDGHLPGGPAAAGGRGTHYPEGEGRGHHGCLLPAGRLWNRALRGQAGGGGAGEAPSVGSGSVLHLSLGLVLLTHLPGPDALTGDTQDQPSSSAPRSCPGLESLASESPSLPPSHILLDELQCLPDSLYLPW

SEQ ID NO: 84505 - protein, 667 aa, Homo sapiens; identical to SEQ ID NO: 84492
  Payload ID: 16809
  Gene Symbol: STRA6
  Gene Name: stimulated by retinoic acid 6
  Uniprot ID: Q9BX79
  ENSP ID: ENSP00000479112

SEQ ID NO: 84506 - protein, 330 aa, Homo sapiens
  Payload ID: 16810
  Gene Symbol: STRA8
  Gene Name: stimulated by retinoic acid 8
  Uniprot ID: Q7Z7C7
  ENSP ID: ENSP00000275764
MGKIDVDKILFFNQEIRLWQLIMATPEENSNPHDRATPQLPAQLQELEHRVARRRLSQARHRATLAALFNNLRKTVYSQSDLIASKWQVLNKAKSHIPELEQTLDNLLKLKASFNLEDGHASSLEEVKKEYASMYSGNDSFPQNGSSPWYLNFYKQTMDLLTGSGIITPQEAALPIVSAAISHLWQNLSEERKASLRQAWAQKHRGPATLAEACREPACAEGSVKDSGVDSQGASCSLVSTPEEILFEDAFDVASFLDKSEVPSTSSSSSVLASCNPENPEEKFQLYMQIINFFKGLSCANTQVKQEASFPVDEEMIMLQCTETFDDEDL

SEQ ID NO: 84507 - protein, 98 aa, Homo sapiens
  Payload ID: 16811
  Gene Symbol: SCRG1
  Gene Name: stimulator of chondrogenesis 1
  Uniprot ID: O75711
  ENSP ID: ENSP00000296506
MKLMVLVFTIGLTLLLGVQAMPANRLSCYRKILKDHNCHNLPEGVADLTQIDVNVQDHFWDGKGCEMICYCNFSELLCCPKDVFFGPKISFVIPCNNQ

SEQ ID NO: 84508 - protein, 92 aa, Homo sapiens
  Payload ID: 16811
  Gene Symbol: SCRG1
  Gene Name: stimulator of chondrogenesis 1
  ENSP ID: ENSP00000425404
MKLMVLVFTIGLTLLLGVQAMPANRLSCYRKILKDHNCHNLPEGVADLTQIDVNVQDHFWDGKGCEMICYCNFSELLCCPKCHHIFILLRNL

SEQ ID NO: 84509 - protein, 303 aa, Homo sapiens
  Payload ID: 16812
  Gene Symbol: STUB1
  Gene Name: STIP1 homology and U-box containing protein 1, E3 ubiquitin protein ligase
  Uniprot ID: Q9UNE7
  ENSP ID: ENSP00000219548
MKGKEEKEGGARLGAGGGSPEKSPSAQELKEQGNRLFVGRKYPEAAACYGRAITRNPLVAVYYTNRALCYLKMQQHEQALADCRRALELDGQSVKAHFFLGQCQLEMESYDEAIANLQRAYSLAKEQRLNFGDDIPSALRIAKKKRWNSIEERRIHQESELHSYLSRLIAAERERELEECQRNHEGDEDDSHVRAQQACIEAKHDKYMADMDELFSQVDEKRKKRDIPDYLCGKISFELMREPCITPSGITYDRKDIEEHLQRVGHFDPVTRSPLTQEQLIPNLAMKEVIDAFISENGWVEDY

SEQ ID NO: 84510 - protein, 213 aa, Homo sapiens
  Payload ID: 16812
  Gene Symbol: STUB1
  Gene Name: STIP1 homology and U-box containing protein 1, E3 ubiquitin protein ligase
  ENSP ID: ENSP00000456591
MKGKEEKEGGARLGAGGGSPEKSPSAQELKEQGNRLFVGRKYPEAAACYGRAIMQQHEQALADCRRALELDGQSVKAHFFLGQCQLEMESYDEAIANLQRAYSLAKEQRLNFGDDIPSALRIAKKKRWNSIEERRIHQESELHSYLSRLIAAERERELEECQRNHEGDEDDSHVRAQQACIEAKHDKYMADMDELFSQVDEKRKKRDIPDYLC

SEQ ID NO: 84511 - protein, 231 aa, Homo sapiens
  Payload ID: 16812
  Gene Symbol: STUB1
  Gene Name: STIP1 homology and U-box containing protein 1, E3 ubiquitin protein ligase
  Uniprot ID: Q9UNE7
  ENSP ID: ENSP00000456875
MQQHEQALADCRRALELDGQSVKAHFFLGQCQLEMESYDEAIANLQRAYSLAKEQRLNFGDDIPSALRIAKKKRWNSIEERRIHQESELHSYLSRLIAAERERELEECQRNHEGDEDDSHVRAQQACIEAKHDKYMADMDELFSQVDEKRKKRDIPDYLCGKISFELMREPCITPSGITYDRKDIEEHLQRVGHFDPVTRSPLTQEQLIPNLAMKEVIDAFISENGWVEDY

SEQ ID NO: 84512 - protein, 157 aa, Homo sapiens
  Payload ID: 16812
  Gene Symbol: STUB1
  Gene Name: STIP1 homology and U-box containing protein 1, E3 ubiquitin protein ligase
  ENSP ID: ENSP00000457090
  MOD_RES (1)..(1): Any amino acid
XIPSALRIAKKKRWNSIEERRIHQESELHSYLSRLIAAERERELEECQRNHEGDEDDSHVRAQQACIEAKHVDEKRKKRDIPDYLCGKISFELMREPCITPSGITYDRKDIEEHLQRVGHFDPVTRSPLTQEQLIPNLAMKEVIDAFISENGWVEDY

SEQ ID NO: 84513 - protein, 231 aa, Homo sapiens; identical to SEQ ID NO: 84511
  Payload ID: 16812
  Gene Symbol: STUB1
  Gene Name: STIP1 homology and U-box containing protein 1, E3 ubiquitin protein ligase
  Uniprot ID: Q9UNE7
  ENSP ID: ENSP00000457228

SEQ ID NO: 84514 - protein, 185 aa, Homo sapiens
  Payload ID: 16812
  Gene Symbol: STUB1
  Gene Name: STIP1 homology and U-box containing protein 1, E3 ubiquitin protein ligase
  ENSP ID: ENSP00000457583
  MOD_RES (1)..(1): Any amino acid
XAHFFLGQCQLEMESYDEAIANLQRAYSLAKEQRLNFGDDIPSALRIAKKKRWNSIEERRIHQESELHSYLSRLIAAERERELEECQRNHEGDEDDSHVRAQQACIEAKHDKYMADMDELFSQVDEKRKKRDIPDYLCGKISFELMREPCITPSGITYDRKDIEEHLQVRPAAGGAGPVAWSWAP

SEQ ID NO: 84515 - protein, 24 aa, Homo sapiens
  Payload ID: 16812
  Gene Symbol: STUB1
  Gene Name: STIP1 homology and U-box containing protein 1, E3 ubiquitin protein ligase
  ENSP ID: ENSP00000476751
  MOD_RES (1)..(1): Any amino acid
XIPNLAMKEVIDAFISENGWVEDY

SEQ ID NO: 84516 - protein, 288 aa, Homo sapiens [sequence omitted]

SEQ ID NO: 84517 - protein, 123 aa, Homo sapiens
  Payload ID: 16813
  Gene Symbol: STOM
  Gene Name: stomatin
  Uniprot ID: P27105
  ENSP ID: ENSP00000339607
MAEKRHTRDSEAQRLPDSFKDSPSKGLGPCGWILVAFSFLFTVITFPISIWMCIKVIAAEGEMNASRALKEASMVITESPAALQLRYLQTLTTIAAEKNSTIVFPLPIDMLQGIIGAKHSHLG

SEQ ID NO: 84518 - protein, 168 aa, Homo sapiens
  Payload ID: 16813
  Gene Symbol: STOM
  Gene Name: stomatin
  ENSP ID: ENSP00000445764
MAEKRHTRDSEAQRLPDSFKDSPSKGLGPCGWILVAFSFLFTVITFPISIWMCIKIIKEYERAIIFRLGRILQGGAKGPGLFFILPCTDSFIKVDMRTISFDIPPQEILTKDSVTISVDGVVYYRVQNATLAVANITNADSATRLLAQTTLRNVLGTKNLSQISSLRL

SEQ ID NO: 84519 - protein, 355 aa, Homo sapiens
  Payload ID: 16814
  Gene Symbol: STOML1
  Gene Name: stomatin (EPB72)-like 1
  Uniprot ID: Q9UBI4
  ENSP ID: ENSP00000319323
MPDVPQSWPSCLCHGLISFLGFLLLLVTFPISGWFALKIVPTYERMIVFRLGRIRTPQGPGMVLLLPFIDSFQRVDLRTRAFNVPPCKLASKDGAVLSVGADVQFRIWDPVLSVMTVKDLNTATRMTAQNAMTKALLKRPLREIQMEKLKISDQLLLEINDVTRAWGLEVDRVELAVEAVLQPPQDSPAGPNLDSTLQQLALHFLGGSMNSMAGGAPSPGPDTVEMVSEVEPPAPQVGARSSPKQPLAEGLLTALQPFLSEALVSQVGACYQFNVVLPSGTQSAYFLDLTTGRGRVGHGVPDGIPDVVVEMAEADLRALLCRELRPLGAYMSGRLKVKGDLAMAMKLEAVLRALK

SEQ ID NO: 84520 - protein, 348 aa, Homo sapiens
  Payload ID: 16814
  Gene Symbol: STOML1
  Gene Name: stomatin (EPB72)-like 1
  Uniprot ID: Q9UBI4
  ENSP ID: ENSP00000319384
MLGRSGYRALPLGDFDRFQQSSFGFLGSQKGCLSPERGGVGTGADVPQSWPSCLCHGLISFLGFLLLLVTFPISGWFALKLASKDGAVLSVGADVQFRIWDPVLSVMTVKDLNTATRMTAQNAMTKALLKRPLREIQMEKLKISDQLLLEINDVTRAWGLEVDRVELAVEAVLQPPQDSPAGPNLDSTLQQLALHFLGGSMNSMAGGAPSPGPADTVEMVSEVEPPAPQVGARSSPKQPLAEGLLTALQPFLSEALVSQVGACYQFNVVLPSGTQSAYFLDLTTGRGRVGHGVPDGIPDVVVEMAEADLRALLCRELRPLGAYMSGRLKVKGDLAMAMKLEAVLRALK

SEQ ID NO: 84521 - protein, 327 aa, Homo sapiens
  Payload ID: 16814
  Gene Symbol: STOML1
  Gene Name: stomatin (EPB72)-like 1
  Uniprot ID: Q9UBI4
  ENSP ID: ENSP00000352788
MLGRSGYRALPLGDFDRFQQSSFGFLGSQKGCLSPERGGVGTGADVPQSWPSCLCHGLISFLGFLLLLVTFPISGWFALKIVPTYERMIVFRLGRIRTPQGPGMVLLLPFIDSFQRVDLRTRAFNVPPCKLASKDGAVLSVGADVQFRIWDPVLSVMTVKDLNTATRMTAQNAMTKALLKRPLREIQMEKLKISDQLLLEINDVTRAWGLEVDRVELAVEAVLQPPQDSPAGPNLDSTLQQLALHFLGGSMNSMAGGAPSPGPGRGRVGHGVPDGIPDVVVEMAEADLRALLCRELRPLGAYMSGRLKVKGDLAMAMKLEAVLRALK

SEQ ID NO: 84522 - protein, 398 aa, Homo sapiens
  Payload ID: 16814
  Gene Symbol: STOML1
  Gene Name: stomatin (EPB72)-like 1
  Uniprot ID: Q9UBI4
  ENSP ID: ENSP00000442478
MLGRSGYRALPLGDFDRFQQSSFGFLGSQKGCLSPERGGVGTGADVPQSWPSCLCHGLISFLGFLLLLVTFPISGWFALKIVPTYERMIVFRLGRIRTPQGPGMVLLLPFIDSFQRVDLRTRAFNVPPCKLASKDGAVLSVGADVQFRIWDPVLSVMTVKDLNTATRMTAQNAMTKALLKRPLREIQMEKLKISDQLLLEINDVTRAWGLEVDRVELAVEAVLQPPQDSPAGPNLDSTLQQLALHFLGGSMNSMAGGAPSPGPADTVEMVSEVEPPAPQVGARSSPKQPLAEGLLTALQPFLSEALVSQVGACYQFNVVLPSGTQSAYFLDLTTGRGRVGHGVPDGIPDVVVEMAEADLRALLCRELRPLGAYMSGRLKVKGDLAMAMKLEAVLRALK

SEQ ID NO: 84523 - protein, 91 aa, Homo sapiens
  Payload ID: 16814
  Gene Symbol: STOML1
  Gene Name: stomatin (EPB72)-like 1
  ENSP ID: ENSP00000455246
MPDVPQSWPSCLCHGLISFLGFLLLLVTFPISGWFALKIVPTYERMIVFRLGRIRTPQGPGMVLLLPFIDSFQRVDLRTRAFNVPPCKLAS

SEQ ID NO: 84524 - protein, 137 aa, Homo sapiens
  Payload ID: 16814
  Gene Symbol: STOML1
  Gene Name: stomatin (EPB72)-like 1
  ENSP ID: ENSP00000455690
MTDVPQSWPSCLCHGLISFLGFLLLLVTFPISGWFALKIVPTYERMIVFRLGRIRTPQGPGMVLLLPFIDSFQRVDLRTRAFNVPPCKLASKDGAVLSVGADVQFRIWDPVLSVMTVKDLNTATRMTAQNAMTKALL

SEQ ID NO: 84525 - protein, 347 aa, Homo sapiens
  Payload ID: 16814
  Gene Symbol: STOML1
  Gene Name: stomatin (EPB72)-like 1
  Uniprot ID: Q9UBI4
  ENSP ID: ENSP00000456343
MLGRSGYRALPLGDFDRFQQSSFGFLGSQKGCLSPERGGVGTGADVPQSWPSCLCHGLISFLGFLLLLVTFPISGWFALKLASKDGAVLSVGADVQFRIWDPVLSVMTVKDLNTATRMTAQNAMTKALLKRPLREIQMEKLKISDQLLLEINDVTRAWGLEVDRVELAVEAVLQPPQDSPAGPNLDSTLQQLALHFLGGSMNSMAGGAPSPGPDTVEMVSEVEPPAPQVGARSSPKQPLAEGLLTALQPFLSEALVSQVGACYQFNVVLPSGTQSAYFLDLTTGRGRVGHGVPDGIPDVVVEMAEADLRALLCRELRPLGAYMSGRLKVKGDLAMAMKLEAVLRALK

SEQ ID NO: 84526 - protein, 310 aa, Homo sapiens
  Payload ID: 16814
  Gene Symbol: STOML1
  Gene Name: stomatin (EPB72)-like 1
  ENSP ID: ENSP00000456853
MIVFRLGRIRTPQGPGMVLLLPFIDSFQRVDLRTRAFNVPPCKLASKDGAVLSVGADVQFRIWDPVLSVMTVKDLNTATRMTAQNAMTKALLKRPLREIQMEKLKISDQLLLEINDVTRAWGLEVDRVELAVEAVLQPPQDSPAGPNLDSTLQQLALHFLGGSMNSMAGGAPSPGPDTVEMVSEVEPPAPQVGARSSPKQPLAEGLLTALQPFLSEALVSQVGACYQFNVVLPSGTQSAYFLDLTTGRGRVGHGVPDGIPDVVVEMAEADLRALLCRELRPLGAYMSGRLKVKGDLAMAMKLEAVLRALK

SEQ ID NO: 84527 - protein, 92 aa, Homo sapiens
  Payload ID: 16814
  Gene Symbol: STOML1
  Gene Name: stomatin (EPB72)-like 1
  ENSP ID: ENSP00000458091
MIVFRLGRIRTPQGPGMVLLLPFIDSFQRVDLRTRAFNVPPCKLASKDGAVLSVGADVQFRIWDPVLSVMTVKDLNTATRMTAQNAMTKALL

SEQ ID NO: 84528 - protein, 356 aa, Homo sapiens
  Payload ID: 16815
  Gene Symbol: STOML2
  Gene Name: stomatin (EPB72)-like 2
  Uniprot ID: Q9UJZ1
  ENSP ID: ENSP00000348886
MLARAARGTGALLLRGSLLASGRAPRRASSGLPRNTVVLFVPQQEAWVVERMGRFHRILEPGLNILIPVLDRIRYVQSLKEIVINVPEQSAVTLDNVTLQIDGVLYLRIMDPYKASYGVEDPEYAVTQLAQTTMRSELGKLSLDKVFRERESLNASIVDAINQAADCWGIRCLRYEIKDIHVPPRVKESMQMQVEAERRKRATVLESEGTRESAINVAEGKKQAQILASEAEKAEQINQAAGEASAVLAKAKAKAEAIRILAAALTQHNGDAAASLTVAEQYVSAFSKLAKDSNTILLPSNPGDVTSMVAQAMGVYGALTKAPVPGTPDSLSSGSSRDVQGTDASLDEELDRVKMS

SEQ ID NO: 84529 - protein, 311 aa, Homo sapiens
  Payload ID: 16815
  Gene Symbol: STOML2
  Gene Name: stomatin (EPB72)-like 2
  Uniprot ID: Q9UJZ1
  ENSP ID: ENSP00000395743
MLARAARGTGALLLRGSLLASGRAPRRASSGLPRNTVVLFVPQQEAWVVERMGRFHRILEPGLNILIPVLDRIRYVQSLKEIVINVPEQSAVTLDNVTLQIDGVLYLRIMDPYKASYGVEDPEYAVTQLAQTTMRSELGKLSLDKVFRVEAERRKRATVLESEGTRESAINVAEGKKQAQILASEAEKAEQINQAAGEASAVLAKAKAKAEAIRILAAALTQHNGDAAASLTVAEQYVSAFSKLAKDSNTILLPSNPGDVTSMVAQAMGVYGALTKAPVPGTPDSLSSGSSRDVQGTDASLDEELDRVKMS

SEQ ID NO: 84530 - protein, 101 aa, Homo sapiens
  Payload ID: 16815
  Gene Symbol: STOML2
  Gene Name: stomatin (EPB72)-like 2
  ENSP ID: ENSP00000434531
MQMQVEAERRKRATVLESEGTRESAINVAEGKKQAQILASEAEKAEQINQAAGEASAVLAKAKAKAEAIRILAAALTQHVRGPWVGMGTGIDSGRGSLIYA

SEQ ID NO: 84531 - protein, 310 aa, Homo sapiens
  Payload ID: 16815
  Gene Symbol: STOML2
  Gene Name: stomatin (EPB72)-like 2
  ENSP ID: ENSP00000481672
MLARAARGTGALLLRGLNILIPVLDRIRYVQSLKEIVINVPEQSAVTLDNVTLQIDGVLYLRIMDPYKASYGVEDPEYAVTQLAQTTMRSELGKLSLDKVFRERESLNASIVDAINQAADCWGIRCLRYEIKDIHVPPRVKESMQMQVEAERRKRATVLESEGTRESAINVAEGKKQAQILASEAEKAEQINQAAGEASAVLAKAKAKAEAIRILAAALTQHNGDAAASLTVAEQYVSAFSKLAKDSNTILLPSNPGDVTSMVAQAMGVYGALTKAPVPGTPDSLSSGSSRDVQGTDASLDEELDRVKMS

SEQ ID NO: 84532 - protein, 291 aa, Homo sapiens
  Payload ID: 16816
  Gene Symbol: STOML3
  Gene Name: stomatin (EPB72)-like 3
  Uniprot ID: Q8TAV4
  ENSP ID: ENSP00000368952
MDSRVSSPEKQDKENFVGVNNKRLGVCGWILFSLSFLLVIITFPISIWMCLKIIKEYERAVVFRLGRIQADKAKGPGLILVLPCIDVFVKVDLRTVTCNIPPQEILTRDSVTTQVDGVVYYRIYSAVSAVANVNDVHQATFLLAQTTLRNVLGTQTLSQILAGREEIAHSIQTLLDDATELWGIRVARVEIKDVRIPVQLQRSMAAEAEATREARAKVLAAEGEMNASKSLKSASMVLAESPIALQLRYLQTLSTVATEKNSTIVFPLPMNILEGIGGVSYDNHKKLPNKA

SEQ ID NO: 84533 - protein, 282 aa, Homo sapiens
  Payload ID: 16816
  Gene Symbol: STOML3
  Gene Name: stomatin (EPB72)-like 3
  Uniprot ID: Q8TAV4
  ENSP ID: ENSP00000401989
MNSRGELVGVNNKRLGVCGWILFSLSFLLVIITFPISIWMCLKIIKEYERAVVFRLGRIQADKAKGPGLILVLPCIDVFVKVDLRTVTCNIPPQEILTRDSVTTQVDGVVYYRIYSAVSAVANVNDVHQATFLLAQTTLRNVLGTQTLSQILAGREEIAHSIQTLLDDATELWGIRVARVEIKDVRIPVQLQRSMAAEAEATREARAKVLAAEGEMNASKSLKSASMVLAESPIALQLRYLQTLSTVATEKNSTIVFPLPMNILEGIGGVSYDNHKKLPNKA

SEQ ID NO: 84534 - protein, 1135 aa, Homo sapiens
  Payload ID: 16817
  Gene Symbol: STON1-GTF2A1L
  Gene Name: STON1-GTF2A1L readthrough
  ENSP ID: ENSP00000378234
MCSTNPGKWVTFDDDPAVQSSQKSKNFPLENQGVCRPNGLKLNLPGLREFPSGSSSTSSTPLSSPIVDFYFSPGPPSNSPLSTPTKDFPGFPGIPKAGTHVLYPIPESSSDSPLAISGGESSLLPTRPTCLSHALLPSDHSCTHPTPKVGLPDEVNPQQAESLGFQSDDLPQFQYFREDCAFSSPFWKDEGSDSHFTLDPPGSKKMFSSRNKEMPIDQKSLNKCSLNYICEKLEHLQSAENQDSLRSLSMHCLCAEENASSFVPHTLFRSQPKSGWSFMLRIPEKKNMMSSRQWGPIFLKVLPGGILQMYYEQGLEKPFKEIQLDPYCRLSEPKVENFSVAGKIHTVKIEHVSYTEKRKYHSKTEVVHEPDIEQMLKLGSTSYHDFLDFLTTVEEELMKLPAVSKPKKNYEEQEISLEIVDNFWGKVTKEGKFVESAVITQIYCLCFVNGNLECFLTLNDLELPKRDESYYEKDSEKKGIDILDYHFHKCVNVQEFEQSRIIKFVPLDACRFELMRFKTLYNGDNLPFSLKSVVVVQGAYVELQAFVNMASLAQRSSYAGSLRSCDNIRIHFPVPSQWIKALWTMNLQRQKSLKAKMNRRACLGSLQELESEPVIQVTVGSAKYESAYQAVVWKIDRLPDKNSSLDHPHCLSYKLELGSDQEIPSDWYPFATVQFSVPDTCASRTEVRSLGVESDVQPQKHVQQRACYNIQPKLYRSVIEDVIEGVRNLFAEEGIEEQVLKDLKQLWETKVLQSKATEDFFRNSIQSPLFTLQLPHSLHQTLQSSTGHLYKVNVPIMVTETSGRAGILQHPIQQVFQQLGQPSVIQTSVPQLNPWSLQATTEKSQRIETVLQQPAILPSGPVDRKHLENATSDILVSPGNEHKIVPEALLCHQESSHYISLPGVVFSPQVSQTNSNVESVLSGSASMAQNLHDESLSTSPHGALHQHVTDIQLHILKNRMYGCDSVKQPRNIEEPSNIPVSEKDSNSQVDLSIRVTDDDIGEIIQVDGSGDTSSNEEIGSTRDADENEFLGNIDGGDLKVPEEEADSISNEDSATNSSDNEDPQVNIVEEDPLNSGDDVSEQDVPDLFDTDNVIVCQYDKIHRSKNKWKFYLKDGVMCFGGRDYVFAKAIGDAEW

SEQ ID NO: 84535 - protein, 1182 aa, Homo sapiens
  Payload ID: 16817
  Gene Symbol: STON1-GTF2A1L
  Gene Name: STON1-GTF2A1L readthrough
  ENSP ID: ENSP00000378236
MCSTNPGKWVTFDDDPAVQSSQKSKNFPLENQGVCRPNGLKLNLPGLREFPSGSSSTSSTPLSSPIVDFYFSPGPPSNSPLSTPTKDFPGFPGIPKAGTHVLYPIPESSSDSPLAISGGESSLLPTRPTCLSHALLPSDHSCTHPTPKVGLPDEVNPQQAESLGFQSDDLPQFQYFREDCAFSSPFWKDEGSDSHFTLDPPGSKKMFSSRNKEMPIDQKSLNKCSLNYICEKLEHLQSAENQDSLRSLSMHCLCAEENASSFVPHTLFRSQPKSGWSFMLRIPEKKNMMSSRQWGPIFLKVLPGGILQMYYEQGLEKPFKEIQLDPYCRLSEPKVENFSVAGKIHTVKIEHVSYTEKRKYHSKTEVVHEPDIEQMLKLGSTSYHDFLDFLTTVEEELMKLPAVSKPKKNYEEQEISLEIVDNFWGKVTKEGKFVESAVITQIYCLCFVNGNLECFLTLNDLELPKRDESYYEKDSEKKGIDILDYHFHKCVNVQEFEQSRIIKFVPLDACRFELMRFKTLYNGDNLPFSLKSVVVVQGAYVELQAFVNMASLAQRSSYAGSLRSCDNIRIHFPVPSQWIKALWTMNLQRQKSLKAKMNRRACLGSLQELESEPVIQVTVGSAKYESAYQAVVWKIDRLPDKNSSLDHPHCLSYKLELGSDQEIPSDWYPFATVQFSVPDTCASRTEVRSLGVESDVQPQKHVQQRACYNIQPKLYRSVIEDVIEGVRNLFAEEGIEEQVLKDLKQLWETKVLQSKATEDFFRNSIQSPLFTLQLPHSLHQTLQSSTASLVIPAGRTLPSFTTAELGTSNSSANFTFPGYPIHVPAGVTLQTVSGHLYKVNVPIMVTETSGRAGILQHPIQQVFQQLGQPSVIQTSVPQLNPWSLQATTEKSQRIETVLQQPAILPSGPVDRKHLENATSDILVSPGNEHKIVPEALLCHQESSHYISLPGVVFSPQVSQTNSNVESVLSGSASMAQNLHDESLSTSPHGALHQHVTDIQLHILKNRMYGCDSVKQPRNIEEPSNIPVSEKDSNSQVDLSIRVTDDDIGEIIQVDGSGDTSSNEEIGSTRDADENEFLGNIDGGDLKVPEEEADSISNEDSATNSSDNEDPQVNIVEEDPLNSGDDVSEQDVPDLFDTDNVIVCQYDKIHRSKNKWKFYLKDGVMCFGGRDYVFAKAIGDAEW

SEQ ID NO: 84536 - protein, 1182 aa, Homo sapiens; identical to SEQ ID NO: 84535
  Payload ID: 16817
  Gene Symbol: STON1-GTF2A1L
  Gene Name: STON1-GTF2A1L readthrough
  ENSP ID: ENSP00000385499

SEQ ID NO: 84537 - protein, 1158 aa, Homo sapiens
  Payload ID: 16817
  Gene Symbol: STON1-GTF2A1L
  Gene Name: STON1-GTF2A1L readthrough
  ENSP ID: ENSP00000385701
MCSTNPGKWVTFDDDPAVQSSQKSKNFPLENQGVCRPNGLKLNLPGLREFPSGSSSTSSTPLSSPIVDFYFSPGPPSNSPLSTPTKDFPGFPGIPKAGTHVLYPIPESSSDSPLAISGGESSLLPTRPTCLSHALLPSDHSCTHPTPKVGLPDEVNPQQAESLGFQSDDLPQFQYFREDCAFSSPFWKDEGSDSHFTLDPPGSKKMFSSRNKEMPIDQKSLNKCSLNYICEKLEHLQSAENQDSLRSLSMHCLCAEENASSFVPHTLFRSQPKSGWSFMLRIPEKKNMMSSRQWGPIFLKVLPGGILQMYYEQGLEKPFKEIQLDPYCRLSEPKVENFSVAGKIHTVKIEHVSYTEKRKYHSKTEVVHEPDIEQMLKLGSTSYHDFLDFLTTVEEELMKLPAVSKPKKNYEEQEISLEIVDNFWGKVTKEGKFVESAVITQIYCLCFVNGNLECFLTLNDLELPKRDESYYEKDSEKKGIDILDYHFHKCVNVQEFEQSRIIKFVPLDACRFELMRFKTLYNGDNLPFSLKSVVVVQGAYVELQAFVNMASLAQRSSYAGSLRSCDNIRIHFPVPSQWIKALWTMNLQRQKSLKAKMNRRACLGSLQELESEPVIQVTVGSAKYESAYQAVVWKIDRLPDKNSSLDHPHCLSYKLELGSDQEIPSDWYPFATVQFSVPDTCASRTEVRSLGVESDVQPQKHVQQRACYNIQPKLYRSVIEDVIEGVRNLFAEEGIEEQVLKDLKQLWETKVLQSKATEDFFRNSIQSPLFTLQLPHSLHQTLQSSTASLVIPAGRTLPSFTTAELGTSNSSANFTFPGYPIHVPAGVTLQTVSGHLYKVNVPIMVTETSGRAGILQHPIQQVFQQLGQPSVIQTSVPQLNPWSLQATTEKSQRIETVLQQPAILPSGPVDRKHLENATSDILVSPGNEHKIVPEALLCHQESSHYISLPGVVFSPQVSQTNSNVESVLSGSASMAQNLHDESLSTSPHGALHQHVTDIQLHILKNRMYGCDSVKQPRNIEEPSNIPVSEKDSNSQVDLSIRVTDDDIGEIIQVDGSGDTSSNEEIGSTRDADENEFLGNIDGGDLKVPEEEADSISNEDSATNSSDNEDPQVNIVEEDPLNSGDDVSEQDVPDLFDTDNVIVCQYDKQGDTRVRHGQQ

SEQ ID NO: 84538 - protein, 735 aa, Homo sapiens
  Payload ID: 16818
  Gene Symbol: STON1
  Gene Name: stonin 1
  Uniprot ID: Q9Y6Q2
  ENSP ID: ENSP00000384615
MCSTNPGKWVTFDDDPAVQSSQKSKNFPLENQGVCRPNGLKLNLPGLREFPSGSSSTSSTPLSSPIVDFYFSPGPPSNSPLSTPTKDFPGFPGIPKAGTHVLYPIPESSSDSPLAISGGESSLLPTRPTCLSHALLPSDHSCTHPTPKVGLPDEVNPQQAESLGFQSDDLPQFQYFREDCAFSSPFWKDEGSDSHFTLDPPGSKKMFSSRNKEMPIDQKSLNKCSLNYICEKLEHLQSAENQDSLRSLSMHCLCAEENASSFVPHTLFRSQPKSGWSFMLRIPEKKNMMSSRQWGPIFLKVLPGGILQMYYEQGLEKPFKEIQLDPYCRLSEPKVENFSVAGKIHTVKIEHVSYTEKRKYHSKTEVVHEPDIEQMLKLGSTSYHDFLDFLTTVEEELMKLPAVSKPKKNYEEQEISLEIVDNFWGKVTKEGKFVESAVITQIYCLCFVNGNLECFLTLNDLELPKRDESYYEKDSEKKGIDILDYHFHKCVNVQEFEQSRIIKFVPLDACRFELMRFKTLYNGDNLPFSLKSVVVVQGAYVELQAFVNMASLAQRSSYAGSLRSCDNIRIHFPVPSQWIKALWTMNLQRQKSLKAKMNRRACLGSLQELESEPVIQVTVGSAKYESAYQAVVWKIDRLPDKNSSLDHPHCLSYKLELGSDQEIPSDWYPFATVQFSVPDTCASRTEVRSLGVESDVQPQKHVQQRACYNIQVEIEKKWIKIDGEDPDKIGDCITQ

SEQ ID NO: 84539 - protein, 735 aa, Homo sapiens; identical to SEQ ID NO: 84538
  Payload ID: 16818
  Gene Symbol: STON1
  Gene Name: stonin 1
  Uniprot ID: Q9Y6Q2
  ENSP ID: ENSP00000385273

SEQ ID NO: 84540 - protein, 93 aa, Homo sapiens
  Payload ID: 16818
  Gene Symbol: STON1
  Gene Name: stonin 1
  ENSP ID: ENSP00000399868
RSSYAGSLRSCDNIRIHFPVPSQWIKALWTMNLQRQKSLKAKMNRRACLGSLQELESEPVIQVTVGSAKYESAYQAVVWKIDRLPDKNSIFRA

SEQ ID NO: 84541 - protein, 905 aa, Homo sapiens
  Payload ID: 16819
  Gene Symbol: STON2
  Gene Name: stonin 2
  Uniprot ID: Q8WXE9
  ENSP ID: ENSP00000267540
MTTLDHVIATHQSEWVSFNEEPPFPAHSQGGTEEHLPGLSSSPDQSESSSGENHVVDGGSQDHSHSEQDDSSEKMGLISEAASPPGSPEQPPPDLASAISNWVQFEDDTPWASTSPPHQETAETALPLTMPCWTCPSFDSLGRCPLTSESSWTTHSEDTSSPSFGCSYTDLQLINAEEQTSGQASGADSTDNSSSLQEDEEVEMEAISWQASSPAMNGHPAPPVTSARFPSWVTFDDNEVSCPLPPVTSPLKPNTPPSASVIPDVPYNSMGSFKKRDRPKSTLMNFSKVQKLDISSLNRTPSVTEASPWRATNPFLNETLQDVQPSPINPFSAFFEEQERRSQNSSISSTTGKSQRDSLIVIYQDAISFDDSSKTQSHSDAVEKLKQLQIDDPDHFGSATLPDDDPVAWIELDAHPPGSARSQPRDGWPMMLRIPEKKNIMSSRHWGPIFVKLTDTGYLQLYYEQGLEKPFREFKLEICHEISEPRLQNYDENGRIHSLRIDRVTYKEKKKYQPKPAVAHTAEREQVIKLGTTNYDDFLSFIHAVQDRLMDLPVLSMDLSTVGLNYLEEEITVDVRDEFSGIVSKGDNQILQHHVLTRIHILSFLSGLAECRLGLNDILVKGNEIVLRQDIMPTTTTKWIKLHECRFHGCVDEDVFHNSRVILFNPLDACRFELMRFRTVFAEKTLPFTLRTATSVNGAEVEVQSWLRMSTGFSANRDPLTQVPCENVMIRYPVPSEWVKNFRRESVLGEKSLKAKVNRGASFGSTSVSGSEPVMRVTLGTAKYEHAFNSIVWRINRLPDKNSASGHPHCFFCHLELGSDREVPSRFANHVNVEFSMPTTSASKASVRSISVEDKTDVRKWVNYSAHYSYQVALGSIWLMLPTPFVHPTTLPLLFLLAMLTMFAW

SEQ ID NO: 84542 - protein, 106 aa, Homo sapiens
  Payload ID: 16819
  Gene Symbol: STON2
  Gene Name: stonin 2
  ENSP ID: ENSP00000450577
  MOD_RES (1)..(1): Any amino acid
XRINRLPDKNSASGHPHCFFCHLELGSDREVPSRFANHVNVEFSMPTTSASKASVRSISVEDKTDVRKWVNYSAHYSYQVEIEQKKSLKPDFEGDEMENPKECGVQ

SEQ ID NO: 84543 - protein, 920 aa, Homo sapiens
  Payload ID: 16819
  Gene Symbol: STON2
  Gene Name: stonin 2
  Uniprot ID: Q8WXE9
  ENSP ID: ENSP00000450857
MTTLDHVIATHQSEWVSFNEEPPFPAHSQGGTEEHLPGLSSSPDQSESSSGENHVVDGGSQDHSHSEQDDSSEKMGLISEAASPPGSPEQPPPDLASAISNWVQFEDDTPWASTSPPHQETAETALPLTMPCWTCPSFDSLGRCPLTSESSWTTHSEDTSSPSFGCSYTDLQLINAEEQTSGQASGADSTDNSSSLQEDEEVEMEAISWQASSPAMNGHPAPPVTSARFPSWVTFDDNEVSCPLPPVTSPLKPNTPPSASVIPDVPYNSMGSFKKRDRPKSTLMNFSKVQKLDISSLNRTPSVTEASPWRATNPFLNETLQDVQPSPINPFSAFFEEQERRSQNSSISSTTGKSQRDSLIVIYQDAISFDDSSKTQSHSDAVEKLKQLQIDDPDHFGSATLPDDDPVAWIELDAHPPGSARSQPRDGWPMMLRIPEKKNIMSSRHWGPIFVKLTDTGYLQLYYEQGLEKPFREFKLEICHEISEPRLQNYDENGRIHSLRIDRVTYKEKKKYQPKPAVAHTAEREQVIKLGTTNYDDFLSFIHAVQDRLMDLPVLSMDLSTVGLNYLEEEITVDVRDEFSGIVSKGDNQILQHHVLTRIHILSFLSGLAECRLGLNDILVKGNEIVLRQDIMPTTTTKWIKLHECRFHGCVDEDVFHNSRVILFNPLDACRFELMRFRTVFAEKTLPFTLRTATSVNGAEVEVQSWLRMSTGFSANRDPLTQVPCENVMIRYPVPSEWVKNFRRESVLGEKSLKAKVNRGASFGSTSVSGSEPVMRVTLGTAKYEHAFNSIVWRINRLPDKNSASGHPHCFFCHLELGSDREVPSRFANHVNVEFSMPTTSASKASVRSISVEDKTDVRKWVNYSAHYSYQTTETDNLPNPLYCSCLPHTDLKRGSKRVVKIRWNASLEVPLASSIRTMV

SEQ ID NO: 84544 - protein, 49 aa, Homo sapiens
  Payload ID: 16819
  Gene Symbol: STON2
  Gene Name: stonin 2
  ENSP ID: ENSP00000450990
MTTLDHVIATHQSEWVSFNEEPPFPAHSQGGTEEHLPGLSSSPDQSESS

SEQ ID NO: 84545 - protein, 3 aa, Homo sapiens
  Payload ID: 16819
  Gene Symbol: STON2
  Gene Name: stonin 2
  ENSP ID: ENSP00000451383
MTT

SEQ ID NO: 84546 - protein, 920 aa, Homo sapiens; identical to SEQ ID NO: 84543
  Payload ID: 16819
  Gene Symbol: STON2
  Gene Name: stonin 2
  Uniprot ID: Q8WXE9
  ENSP ID: ENSP00000477736

SEQ ID NO: 84547 - protein, 339 aa, Homo sapiens
  Payload ID: 16820
  Gene Symbol: SARAF
  Gene Name: store-operated calcium entry-associated regulatory factor
  Uniprot ID: Q96BY9
  ENSP ID: ENSP00000256255
MAAACGPGAAGYCLLLGLHLFLLTAGPALGWNDPDRMLLRDVKALTLHYDRYTTSRRLDPIPQLKCVGGTAGCDSYTPKVIQCQNKGWDGYDVQWECKTDLDIAYKFGKTVVSCEGYESSEDQYVLRGSCGLEYNLDYTELGLQKLKESGKQHGFASFSDYYYKWSSADSCNMSGLITIVVLLGIAFVVYKLFLSDGQYSPPPYSEYPPFSHRYQRFTNSAGPPPPGFKSEFTGPQNTGHGATSGFGSAFTGQQGYENSGPGFWTGLGTGGILGYLFGSNRAATPFSDSWYYPSYPPSYPGTWNRAYSPLHGGSGSYSVCSNSDTKTRTASGYGGTRRR

SEQ ID NO: 84548 - protein, 218 aa, Homo sapiens
  Payload ID: 16820
  Gene Symbol: SARAF
  Gene Name: store-operated calcium entry-associated regulatory factor
  ENSP ID: ENSP00000427769
  MOD_RES (1)..(1): Any amino acid
XLEYNLDYTELGLQKLKESGKQHGFASFSDYYYKWSSADSCNMSGLITIVVLLGIAFVVYKLFLSDGQYSPPPYSEYPPFSHRYQRFTNSAGPPPPGFKSEFTGPQNTGHGATSGFGSAFTGQQGYENSGPGFWTGLGTGGILGYLFGSNRAATPFSDSWYYPSYPPSYPGTWNRAYSPLHGGSGSYSVCSNSDTKTRTASGKSKKYKFLLPRSKVQK

SEQ ID NO: 84549 - protein, 36 aa, Homo sapiens
  Payload ID: 16820
  Gene Symbol: SARAF
  Gene Name: store-operated calcium entry-associated regulatory factor
  ENSP ID: ENSP00000428245
MAAACGPGAAGYCLLLGLHLFLLTAGPALGWIPSHS

SEQ ID NO: 84550 - protein, 213 aa, Homo sapiens
  Payload ID: 16820
  Gene Symbol: SARAF
  Gene Name: store-operated calcium entry-associated regulatory factor
  ENSP ID: ENSP00000428323
IAYKFGKTVVSCEGYESSEDQYVLRGSCGLEYNLDYTELGLQKLKESGKQHGFASFSDYYYKWSSADSCNMSGLITIVVLLGIAFVVYKLFLSDGQYSPPPYSEYPPFSHRYQRFTNSAGPPPPGFKSEFTGPQNTGHGATSGFGSAFTGQQGYENSGPGFWTGLGTGGILGYLFGSNRAYSPLHGGSGSYSVCSNSDTKTRTASGYGGTRRR

SEQ ID NO: 84551 - protein, 147 aa, Homo sapiens
  Payload ID: 16820
  Gene Symbol: SARAF
  Gene Name: store-operated calcium entry-associated regulatory factor
  ENSP ID: ENSP00000428832
MAAACGPGAAGYCLLLGLHLFLLTAGPALGWNDPALTLHYDRYTTSRRLDPIPQLKCVGGTAGCDSYTPKVIQCQNKGWDGYDVQWECKTDLDIAYKFGKTVVSCEGYESSEDQYVLRGSCGLEYNLDYTELGLQKLKESGKQHGFA

SEQ ID NO: 84552 - protein, 37 aa, Homo sapiens
  Payload ID: 16820
  Gene Symbol: SARAF
  Gene Name: store-operated calcium entry-associated regulatory factor
  ENSP ID: ENSP00000428963
MAAACGPGAAGYCLLLGLHLFLLTAGPALGWNDPVGM

SEQ ID NO: 84553 - protein, 347 aa, Homo sapiens
  Payload ID: 16820
  Gene Symbol: SARAF
  Gene Name: store-operated calcium entry-associated regulatory factor
  ENSP ID: ENSP00000429538
  MOD_RES (1)..(1): Any amino acid
XAAACGPGAAGYCLLLGLHLFLLTAGPALGWNDPDRMLLRDVKALTLHYDRYTTSRRLDPIPQLKCVGGTAGCDSYTPKVIQCQNKGWDGYDVQWECKTDLDIAYKFGKTVVSCEGYESSEDQYVLRGSCGLEYNLDYTELGLQKLKESGKQHGFASFSDYYYKWSSADSCNMSGLITIVVLLGIAFVVYKLFLSDGQYSPPPYSEYPPFSHRYQRFTNSAGPPPPGFKSEFTGPQNTGHGATSGFGSAFTGQQGYENSGPGFWTGLGTGGILGYLFGSNRAATPFSDSWYYPSYPPSYPGTWNRAYSPLHGGSGSYSDMVVPGDDKVESWSQTLDAEILDFSSLSL

SEQ ID NO: 84554 - protein, 202 aa, Homo sapiens
  Payload ID: 16820
  Gene Symbol: SARAF
  Gene Name: store-operated calcium entry-associated regulatory factor
  ENSP ID: ENSP00000429630
MLLRDVKALTLHYDRYTTSRRLDPIPQLKCVGGTAGCDSYTPKVIQCQNKGWDGYDVQWECKTDLDIAYKFGKTVVSCEGYESSEDQYVLRGSCGLEYNLDYTELGLQKLKESGKQHGFASFSDYYYKWSSADSCNMSGLITIVVLLGIAFVVYKLFLSDGQYSPPPYSEYPPFSHRYQRFTNSAGPPPPGFKSEFTGPQNT

SEQ ID NO: 84555 - protein, 37 aa, Homo sapiens; identical to SEQ ID NO: 84552
  Payload ID: 16820
  Gene Symbol: SARAF
  Gene Name: store-operated calcium entry-associated regulatory factor
  ENSP ID: ENSP00000430477

SEQ ID NO: 84556 - protein, 40 aa, Homo sapiens
  Payload ID: 16820
  Gene Symbol: SARAF
  Gene Name: store-operated calcium entry-associated regulatory factor
  ENSP ID: ENSP00000431005
MAAACGPGAAGYCLLLGLHLFLLTAGPALGWNDPECCCGM

SEQ ID NO: 84557 - protein, 167 aa, Homo sapiens
  Payload ID: 16820
  Gene Symbol: SARAF
  Gene Name: store-operated calcium entry-associated regulatory factor
  Uniprot ID: Q96BY9
  ENSP ID: ENSP00000441351
MSGLITIVVLLGIAFVVYKLFLSDGQYSPPPYSEYPPFSHRYQRFTNSAGPPPPGFKSEFTGPQNTGHGATSGFGSAFTGQQGYENSGPGFWTGLGTGGILGYLFGSNRAATPFSDSWYYPSYPPSYPGTWNRAYSPLHGGSGSYSVCSNSDTKTRTASGYGGTRRR

SEQ ID NO: 84558 - protein, 989 aa, Homo sapiens
  Payload ID: 16821
  Gene Symbol: STOX1
  Gene Name: storkhead box 1
  Uniprot ID: Q6ZVD7
  ENSP ID: ENSP00000298596
MARPVQLAPGSLALVLCRLEAQKAAGAAEEPGGRAVFRAFRRANARCFWNARLARAASRLAFQGWLRRGVLLVRAPPACLQVLRDAWRRRALRPPRGFRIRAVGDVFPVQMNPITQSQFVPLGEVLCCAISDMNTAQIVVTQESLLERLMKHYPGIAIPSEDILYTTLGTLIKERKIYHTGEGYFIVTPQTYFITNTTTQENKRMLPSDESRLMPASMTYLVSMESCAESAQENAAPISHCQSCQCFRDMHTQDVQEAPVAAEVTRKSHRGLGESVSWVQNGAVSVSAEHHICESTKPLPYTRDKEKGKKFGFSLLWRSLSRKEKPKTEHSSFSAQFPPEEWPVRDEDDLDNIPRDVEHEIIKRINPILTVDNLIKHTVLMQKYEEQKKYNSQGTSTDMLTIGHKYPSKEGVKKRQGLSAKPQGQGHSRRDRHKARNQGSEFQPGSIRLEKHPKLPATQPIPRIKSPNEMVGQKPLGEITTVLGSHLIYKKRISNPFQGLSHRGSTISKGHKIQKTSDLKPSQTGPKEKPFQKPRSLDSSRIFDGKAKEPYAEQPNDKMEAESIYINDPTVKPINDDFRGHLFSHPQQSMLQNDGKCCPFMESMLRYEVYGGENEVIPEVLRKSHSHFDKLGETKQTPHSLPSRGASFSDRTPSACRLVDNTIHQFQNLGLLDYPVGVNPLRQAARQDKDSEELLRKGFVQDAETTSLENEQLSNDDQALYQNEVEDDDGACSSLYLEEDDISENDDLRQMLPGHSQYSFTGGSQGNHLGKQKVIERSLTEYNSTMERVESQVLKRNECYKPTGLHATPGESQEPNLSAESCGLNSGAQFGFNYEEEPSVAKCVQASAPADERIFDYYSARKASFEAEVIQDTIGDTGKKPASWSQSPQNQEMRKHFPQKFQLFNTSHMPVLAQDVQYEHSHLEGTENHSMAGDSGIDSPRTQSLGSNNSVILDGLKRRQNFLQNVEGTKSSQPLTSNSLLPLTPVINV

SEQ ID NO: 84559 - protein, 169 aa, Homo sapiens
  Payload ID: 16821
  Gene Symbol: STOX1
  Gene Name: storkhead box 1
  Uniprot ID: Q6ZVD7
  ENSP ID: ENSP00000382115
MARPVQLAPGSLALVLCRLEAQKAAGAAEEPGGRAVFRAFRRANARCFWNARLARAASRLAFQGWLRRGVLLVRAPPACLQVLRDAWRRRALRPPRGFRIRAVGDVFPVQMNPITQSQFVPLGEVLCCAISDMNTAQIVVTQESLLERLMKHYPGHRVWDLIIQSFWMD

SEQ ID NO: 84560 - protein, 227 aa, Homo sapiens
  Payload ID: 16821
  Gene Symbol: STOX1
  Gene Name: storkhead box 1
  Uniprot ID: Q6ZVD7
  ENSP ID: ENSP00000382118
MARPVQLAPGSLALVLCRLEAQKAAGAAEEPGGRAVFRAFRRANARCFWNARLARAASRLAFQGWLRRGVLLVRAPPACLQVLRDAWRRRALRPPRGFRIRAVGDVFPVQMNPITQSQFVPLGEVLCCAISDMNTAQIVVTQESLLERLMKHYPGIAIPSEDILYTTLGTLIKERKIYHTGEGYFIVTPQTYFITNTTTQENKRMLPSDESRLMPASMTYLDTESGI

SEQ ID NO: 84561 - protein, 989 aa, Homo sapiens; identical to SEQ ID NO: 84558
  Payload ID: 16821
  Gene Symbol: STOX1
  Gene Name: storkhead box 1
  Uniprot ID: Q6ZVD7
  ENSP ID: ENSP00000382121

SEQ ID NO: 84562 - protein, 926 aa, Homo sapiens
  Payload ID: 16822
  Gene Symbol: STOX2
  Gene Name: storkhead box 2
  Uniprot ID: Q9P2F5
  ENSP ID: ENSP00000311257
MKKTRSTTLRRAWPSSDFSDRASDRMRSRSEKDYRLHKRFPAAFAPQASRGYMTSGDVSPISMSPISQSQFIPLGEILCLAISAMNSARKPVTQEALMEHLTTCFPGVPTPSQEILRHTLNTLVRERKIYPTPDGYFIVTPQTYFITPSLIRTNSKWYHLDERIPDRSQCTSPQPGTITPSASGCVRERTLPRNHCDSCHCCREDVHSTHAPTLQRKSAKDCKDPYCPPSLCQVPPTEKSKSTVNFSYKTETLSKPKDSEKQSKKFGLKLFRLSFKKDKTKQLANFSAQFPPEEWPLRDEDTPATIPREVEMEIIRRINPDLTVENVMRHTALMKKLEEEKAQRSKAGSSAHHSGRSKKSRTHRKSHGKSRSHSKTRVSKGDPSDGSHLDIPAEREYDFCDPLTRVPREGCFIIEHKGDNFIMHSNTNVLESHFPMTPEWDVSGELAKRRTEMPFPEPSRGSSHSKVHRSHSHTQDRRSRNERSNKAKERSRSMDNSKGPLGASSLGTPEDLAEGCSQDDQTPSQSYIDDSTLRPAQTVSLQRAHISSTSYKEVCIPEIVSGSKEPSSACSLLEPGKPPESLPSYGELNSCPTKTATDDYFQCNTSSETVLTAPSPLGKNKEDHDTLTLAEGVKKLSPSDRQVPHSSREPVGHKEESPKGPGGGPAASGGVAEGIANGRLVQHHGAEPSSLDKRKEIFSKDTLFKPLHSTLSVNSYHKSSLSLLKSHPKTPADTLPGRCEKLEPSLGTSAAQAMPASQRQQESGGNQEASFDYYNVSDDDDSEEGANKNTEEEKNREDVGTMQWLLEREKERDLQRKFEKNLTLLAPKETDSSSNQRATHSARLDSMDSSSITVDSGFNSPRTRESLASNTSSIVESNRRQNPALSPAHGGAGPAFNFRASAEPPTNEAEKLQKPSNCLQASVTSV

SEQ ID NO: 84563 - protein, 74 aa, Homo sapiens
  Payload ID: 16822
  Gene Symbol: STOX2
  Gene Name: storkhead box 2
  ENSP ID: ENSP00000422118
  MOD_RES (1)..(1): Any amino acid
XDVSPISMSPISQSQFIPLGEILCLAISAMNSARKPVTQEALMEHLTTCFPVLGRAWLPTHQALLKVTVVRTPL

SEQ ID NO: 84564 - protein, 155 aa, Homo sapiens
  Payload ID: 16822
  Gene Symbol: STOX2
  Gene Name: storkhead box 2
  ENSP ID: ENSP00000425388
MSPISQSQFIPLGEILCLAISAMNSARKPVTQEALMEHLTTCFPGVPTPSQEILRHTLNTLVRERKIYPTPDGYFIVTPQTYFITPSLIRTNSKWYHLDERIPDRSQCTSPQPGTITPSASGCVRERTLPRNHCDSCHCCREDVHSTHAPTLQRK

SEQ ID NO: 84565 - protein, 219 aa, Homo sapiens
  Payload ID: 16822
  Gene Symbol: STOX2
  Gene Name: storkhead box 2
  ENSP ID: ENSP00000426209
  MOD_RES (1)..(1): Any amino acid
XSSREPVGHKEESPKGPGGGPAASGGVAEGIANGRLVQHHGAEPSSLDKRKEIFSKDTLFKPLHSTLSVNSYHKSSLSLLKSHPKTPADTLPGRCEKLEPSLGTSAAQAMPASQRQQESGGNQEASFDYYNVSDDDDSEEGANKNTEEEKNREDVGTMQWLLEREKERDLQRKFEKNLTLLAPKETDSSSNQRATHSARLDSMDSSSITVDSGFNSPRN

SEQ ID NO: 84566 - protein, 248 aa, Homo sapiens [sequence omitted]

SEQ ID NO: 84567 - protein, 1392 aa, Homo sapiens
  Payload ID: 16824
  Gene Symbol: SBNO1
  Gene Name: strawberry notch homolog 1 (Drosophila)
  Uniprot ID: A3KN83
  ENSP ID: ENSP00000267176
MVEPGQDLLLAALSESGISPNDLFDIDGGDAGLATPMPTPSVQQSVPLSALELGLETEAAVPVKQEPETVPTPALLNVRQPPSTTTFVLNQINHLPPLGSTIVMTKTPPVTTNRQTITLTKFIQTTASTRPSVSAPTVRNAMTSAPSKDQVQLKDLLKNNSLNELMKLKPPANIAQPVATAATDVSNGTVKKESSNKEGARMWINDMKMRSFSPTMKVPVVKEDDEPEEEDEEEMGHAETYAEYMPIKLKIGLRHPDAVVETSSLSSVTPPDVWYKTSISEETIDNGWLSALQLEAITYAAQQHETFLPNGDRAGFLIGDGAGVGKGRTIAGIIYENYLLSRKRALWFSVSNDLKYDAERDLRDIGAKNILVHSLNKFKYGKISSKHNGSVKKGVIFATYSSLIGESQSGGKYKTRLKQLLHWCGDDFDGVIVFDECHKAKNLCPVGSSKPTKTGLAVLELQNKLPKARVVYASATGASEPRNMAYMNRLGIWGEGTPFREFSDFIQAVERRGVGAMEIVAMDMKLRGMYIARQLSFTGVTFKIEEVLLSQSYVKMYNKAVKLWVIARERFQQAADLIDAEQRMKKSMWGQFWSAHQRFFKYLCIASKVKRVVQLAREEIKNGKCVVIGLQSTGEARTLEALEEGGGELNDFVSTAKGVLQSLIEKHFPAPDRKKLYSLLGIDLTAPSNNSSPRDSPCKENKIKKRKGEEITREAKKARKVGGLTGSSSDDSGSESDASDNEESDYESSKNMSSGDDDDFNPFLDESNEDDENDPWLIRKDHKKNKEKKKKKSIDPDSIQSALLASGLGSKRPSFSSTPVISPAPNSTPANSNTNSNSSLITSQDAVERAQQMKKDLLDKLEKLAEDLPPNTLDELIDELGGPENVAEMTGRKGRVVSNDDGSISYESRSELDVPVEILNITEKQRFMDGDKNIAIISEAASSGISLQADRRAKNQRRRVHMTLELPWSADRAIQQFGRTHRSNQVTAPEYVFLISELAGEQRFASIVAKRLESLGALTHGDRRATESRDLSRFNFDNKYGRNALEIVMKSIVNLDSPMVSPPPDYPGEFFKDVRQGLIGVGLINVEDRSGILTLDKDYNNIGKFLNRILGMEVHQQNALFQYFADTLTAVVQNAKKNGRYDMGILDLGSGDEKVRKSDVKKFLTPGYSTSGHVELYTISVERGMSWEEATKIWAELTGPDDGFYLSLQIRNNKKTAILVKEVNPKKKLFLVYRPNTGKQLKLEIYADLKKKYKKVVSDDALMHWLDQYNSSADTCTHAYWRGNCKKASLGLVCEIGLRCRTYYVLCGSVLSVWTKVEGVLASVSGTNVKMQIVRLRTEDGQRIVGLIIPANCVSPLVNLLSTSDQSQQLAVQQKQLWQQHHPQSITNLSNA

SEQ ID NO: 84568 - protein, 1393 aa, Homo sapiens
  Payload ID: 16824
  Gene Symbol: SBNO1
  Gene Name: strawberry notch homolog 1 (Drosophila)
  Uniprot ID: A3KN83
  ENSP ID: ENSP00000387361
MVEPGQDLLLAALSESGISPNDLFDIDGGDAGLATPMPTPSVQQSVPLSALELGLETEAAVPVKQEPETVPTPALLNVRQQPPSTTTFVLNQINHLPPLGSTIVMTKTPPVTTNRQTITLTKFIQTTASTRPSVSAPTVRNAMTSAPSKDQVQLKDLLKNNSLNELMKLKPPANIAQPVATAATDVSNGTVKKESSNKEGARMWINDMKMRSFSPTMKVPVVKEDDEPEEEDEEEMGHAETYAEYMPIKLKIGLRHPDAVVETSSLSSVTPPDVWYKTSISEETIDNGWLSALQLEAITYAAQQHETFLPNGDRAGFLIGDGAGVGKGRTIAGIIYENYLLSRKRALWFSVSNDLKYDAERDLRDIGAKNILVHSLNKFKYGKISSKHNGSVKKGVIFATYSSLIGESQSGGKYKTRLKQLLHWCGDDFDGVIVFDECHKAKNLCPVGSSKPTKTGLAVLELQNKLPKARVVYASATGASEPRNMAYMNRLGIWGEGTPFREFSDFIQAVERRGVGAMEIVAMDMKLRGMYIARQLSFTGVTFKIEEVLLSQSYVKMYNKAVKLWVIARERFQQAADLIDAEQRMKKSMWGQFWSAHQRFFKYLCIASKVKRVVQLAREEIKNGKCVVIGLQSTGEARTLEALEEGGGELNDFVSTAKGVLQSLIEKHFPAPDRKKLYSLLGIDLTAPSNNSSPRDSPCKENKIKKRKGEEITREAKKARKVGGLTGSSSDDSGSESDASDNEESDYESSKNMSSGDDDDFNPFLDESNEDDENDPWLIRKDHKKNKEKKKKKSIDPDSIQSALLASGLGSKRPSFSSTPVISPAPNSTPANSNTNSNSSLITSQDAVERAQQMKKDLLDKLEKLAEDLPPNTLDELIDELGGPENVAEMTGRKGRVVSNDDGSISYESRSELDVPVEILNITEKQRFMDGDKNIAIISEAASSGISLQADRRAKNQRRRVHMTLELPWSADRAIQQFGRTHRSNQVTAPEYVFLISELAGEQRFASIVAKRLESLGALTHGDRRATESRDLSRFNFDNKYGRNALEIVMKSIVNLDSPMVSPPPDYPGEFFKDVRQGLIGVGLINVEDRSGILTLDKDYNNIGKFLNRILGMEVHQQNALFQYFADTLTAVVQNAKKNGRYDMGILDLGSGDEKVRKSDVKKFLTPGYSTSGHVELYTISVERGMSWEEATKIWAELTGPDDGFYLSLQIRNNKKTAILVKEVNPKKKLFLVYRPNTGKQLKLEIYADLKKKYKKVVSDDALMHWLDQYNSSADTCTHAYWRGNCKKASLGLVCEIGLRCRTYYVLCGSVLSVWTKVEGVLASVSGTNVKMQIVRLRTEDGQRIVGLIIPANCVSPLVNLLSTSDQSQQLAVQQKQLWQQHHPQSITNLSNA

SEQ ID NO: 84569 - protein, 1393 aa, Homo sapiens; identical to SEQ ID NO: 84568
  Payload ID: 16824
  Gene Symbol: SBNO1
  Gene Name: strawberry notch homolog 1 (Drosophila)
  Uniprot ID: A3KN83
  ENSP ID: ENSP00000473665

SEQ ID NO: 84570 - protein, 1366 aa, Homo sapiens
  Payload ID: 16825
  Gene Symbol: SBNO2
  Gene Name: strawberry notch homolog 2 (Drosophila)
  Uniprot ID: Q9Y2G9
  ENSP ID: ENSP00000354733
MLAVGPAMDRDYPQHEPPPAGSLLYSPPPLQSAMLHCPYWNTFSLPPYPAFSSDSRPFMSSASFLGSQPCPDTSYAPVATASSLPPKTCDFAQDSSYFEDFSNISIFSSSVDSLSDIVDTPDFLPADSLNQVSTIWDDNPAPSTHDKLFQLSRPFAGFEDFLPSHSTPLLVSYQEQSVQSQPEEEDEAEEEEAEELGHTETYADYVPSKSKIGKQHPDRVVETSTLSSVPPPDITYTLALPSDSGALSALQLEAITYACQQHEVLLPSGQRAGFLIGDGAGVGKGRTVAGVILENHLRGRKKALWFSVSNDLKYDAERDLRDIEATGIAVHALSKIKYGDTTTSEGVLFATYSALIGESQAGGQHRTRLRQILDWCGEAFEGVIVFDECHKAKNAGSTKMGKAVLDLQNKLPLARVVYASATGASEPRNMIYMSRLGIWGEGTPFRNFEEFLHAIEKRGVGAMEIVAMDMKVSGMYIARQLSFSGVTFRIEEIPLAPAFECVYNRAALLWAEALNVFQQAADWIGLESRKSLWGQFWSAHQRFFKYLCIAAKVRRLVELAREELARDKCVVIGLQSTGEARTREVLGENDGHLNCFVSAAEGVFLSLIQKHFPSTKRKRDRGAGSKRKRRPRGRGAKAPRLACETAGVIRISDDSSTESDPGLDSDFNSSPESLVDDDVVIVDAVGLPSDDRGPLCLLQRDPHGPGVLERVERLKQDLLDKVRRLGRELPVNTLDELIDQLGGPQRVAEMTGRKGRVVSRPDGTVAFESRAEQGLSIDHVNLREKQRFMSGEKLVAIISEASSSGVSLQADRRVQNQRRRVHMTLELPWSADRAIQQFGRTHRSNQVSAPEYVFLISELAGERRFASIVAKRLESLGALTHGDRRATESRDLSKYNFENKYGTRALHCVLTTILSQTENKVPVPQGYPGGVPTFFRDMKQGLLSVGIGGRESRNGCLDVEKDCSITKFLNRILGLEVHKQNALFQYFSDTFDHLIEMDKREGKYDMGILDLAPGIEEIYEESQQVFLAPGHPQDGQVVFYKISVDRGLKWEDAFAKSLALTGPYDGFYLSYKVRGNKPSCLLAEQNRGQFFTVYKPNIGRQSQLEALDSLRRKFHRVTAEEAKEPWESGYALSLTHCSHSAWNRHCRLAQEGKDCLQGLRLRHHYMLCGALLRVWGRIAAVMADVSSSSYLQIVRLKTKDRKKQVGIKIPEGCVRRVLQELRLMDADVKRRQAPALGCPAPPAPRPLALPCGPGEVLDLTYSPPAEAFPPPPHFSFPAPLSLDAGPGVVPLGTPDAQADPAALAHQGCDINFKEVLEDMLRSLHAGPPSEGALGEGAGAGGAAGGGPERQSVIQFSPPFPGAQAPL

SEQ ID NO: 84571 - protein, 1309 aa, Homo sapiens
  Payload ID: 16825
  Gene Symbol: SBNO2
  Gene Name: strawberry notch homolog 2 (Drosophila)
  Uniprot ID: Q9Y2G9
  ENSP ID: ENSP00000400762
MREPLPGSASWGTPGPPSAGTMSQLQLWLQFEALNKDSSYFEDFSNISIFSSSVDSLSDIVDTPDFLPADSLNQVSTIWDDNPAPSTHDKLFQLSRPFAGFEDFLPSHSTPLLVSYQEQSVQSQPEEEDEAEEEEAEELGHTETYADYVPSKSKIGKQHPDRVVETSTLSSVPPPDITYTLALPSDSGALSALQLEAITYACQQHEVLLPSGQRAGFLIGDGAGVGKGRTVAGVILENHLRGRKKALWFSVSNDLKYDAERDLRDIEATGIAVHALSKIKYGDTTTSEGVLFATYSALIGESQAGGQHRTRLRQILDWCGEAFEGVIVFDECHKAKNAGSTKMGKAVLDLQNKLPLARVVYASATGASEPRNMIYMSRLGIWGEGTPFRNFEEFLHAIEKRGVGAMEIVAMDMKVSGMYIARQLSFSGVTFRIEEIPLAPAFECVYNRAALLWAEALNVFQQAADWIGLESRKSLWGQFWSAHQRFFKYLCIAAKVRRLVELAREELARDKCVVIGLQSTGEARTREVLGENDGHLNCFVSAAEGVFLSLIQKHFPSTKRKRDRGAGSKRKRRPRGRGAKAPRLACETAGVIRISDDSSTESDPGLDSDFNSSPESLVDDDVVIVDAVGLPSDDRGPLCLLQRDPHGPGVLERVERLKQDLLDKVRRLGRELPVNTLDELIDQLGGPQRVAEMTGRKGRVVSRPDGTVAFESRAEQGLSIDHVNLREKQRFMSGEKLVAIISEASSSGVSLQADRRVQNQRRRVHMTLELPWSADRAIQQFGRTHRSNQVSAPEYVFLISELAGERRFASIVAKRLESLGALTHGDRRATESRDLSKYNFENKYGTRALHCVLTTILSQTENKVPVPQGYPGGVPTFFRDMKQGLLSVGIGGRESRNGCLDVEKDCSITKFLNRILGLEVHKQNALFQYFSDTFDHLIEMDKREGKYDMGILDLAPGIEEIYEESQQVFLAPGHPQDGQVVFYKISVDRGLKWEDAFAKSLALTGPYDGFYLSYKVRGNKPSCLLAEQNRGQFFTVYKPNIGRQSQLEALDSLRRKFHRVTAEEAKEPWESGYALSLTHCSHSAWNRHCRLAQEGKDCLQGLRLRHHYMLCGALLRVWGRIAAVMADVSSSSYLQIVRLKTKDRKKQVGIKIPEGCVRRVLQELRLMDADVKRRQAPALGCPAPPAPRPLALPCGPGEVLDLTYSPPAEAFPPPPHFSFPAPLSLDAGPGVVPLGTPDAQADPAALAHQGCDINFKEVLEDMLRSLHAGPPSEGALGEGAGAGGAAGGGPERQSVIQFSPPFPGAQAPL

SEQ ID NO: 84572 - protein, 128 aa, Homo sapiens
  Payload ID: 16825
  Gene Symbol: SBNO2
  Gene Name: strawberry notch homolog 2 (Drosophila)
  ENSP ID: ENSP00000466861
MLAVGPAMDRDYPQHEPPPAGSLLYSPPPLQSAMLHCPYWNTFSLPPYPAFSSDSRPFMSSASFLGSQPCPDTSYAPVATASSLPPKTCDFAQDSSYFEDFSNISIFSSSVDSLSDIVDTPDFLPADS

SEQ ID NO: 84573 - protein, 111 aa, Homo sapiens
  Payload ID: 16825
  Gene Symbol: SBNO2
  Gene Name: strawberry notch homolog 2 (Drosophila)
  ENSP ID: ENSP00000468302
MLAVGPAMDRDYPQHEPPPAGSLLYSPPPLQSAMLHCPYWNTFSLPPYPAFSSDSRPFMSSASFLGSQPCPDTSYAPVATASSLPPKTCDFAQDSSYFEDFSNISIFSSSV

SEQ ID NO: 84574 - protein, 1356 aa, Homo sapiens
  Payload ID: 16825
  Gene Symbol: SBNO2
  Gene Name: strawberry notch homolog 2 (Drosophila)
  ENSP ID: ENSP00000468520
MLAVGPAMDRDYPQHEPPPAGSLLYSPPPLQSAMLHCPYWNTFSLPPYPAFSSDSRPFMSSASFLGSQPCPDTSYAPVATASSLPPKTCDFAQDSSYFEDFSNISIFSSSVDSLSDIVDTPDFLPADSLNQVSTIWDDNPAPSTHDKLFQLSRPFAGFEDFLPSHSTPLLVSYQEQSVQSQPEEEDEAEEEEAEELGHTETYADYVPSKSKIGKQHPDRVVETSTLSSVPPPDITYTLALPSDSGALSALQLEAITYACQQHEVLLPSGQRAGFLIGDGAGVGKGRTVAGVILENHLRGRKKALWFSVSNDLKYDAERDLRDIEATGIAVHALSKIKYGDTTTSEGVLFATYSALIGESQAGGQHRTRLRQILDWCGEAFEGVIVFDECHKAKNAGSTKMGKAVLDLQNKLPLARVVYASATGASEPRNMIYMSRLGIWGEGTPFRNFEEFLHAIEKRGVGAMEIVAMDMKVSGMYIARQLSFSGVTFRIEEIPLAPAFECVYNRAALLAADWIGLESRKSLWGQFWSAHQRFFKYLCIAAKVRRLVELAREELARDKCVVIGLQSTGEARTREVLGENDGHLNCFVSAAEGVFLSLIQKHFPSTKRKRDRGAGSKRKRRPRGRGAKAPRLACETAGVIRISDDSSTESDPGLDSDFNSSPESLVDDDVVIVDAVGLPSDDRGPLCLLQRDPHGPGVLERVERLKQDLLDKVRRLGRELPVNTLDELIDQLGGPQRVAEMTGRKGRVVSRPDGTVAFESRAEQGLSIDHVNLREKQRFMSGEKLVAIISEASSSGVSLQADRRVQNQRRRVHMTLELPWSADRAIQQFGRTHRSNQVSAPEYVFLISELAGERRFASIVAKRLESLGALTHGDRRATESRDLSKYNFENKYGTRALHCVLTTILSQTENKVPVPQGYPGGVPTFFRDMKQGLLSVGIGGRESRNGCLDVEKDCSITKFLNRILGLEVHKQNALFQYFSDTFDHLIEMDKREGKYDMGILDLAPGIEEIYEESQQVFLAPGHPQDGQVVFYKISVDRGLKWEDAFAKSLALTGPYDGFYLSYKVRGNKPSCLLAEQNRGQFFTVYKPNIGRQSQLEALDSLRRKFHRVTAEEAKEPWESGYALSLTHCSHSAWNRHCRLAQEGKDCLQGLRLRHHYMLCGALLRVWGRIAAVMADVSSSSYLQIVRLKTKDRKKQVGIKIPEGCVRRVLQELRLMDADVKRRQAPALGCPAPPAPRPLALPCGPGEVLDLTYSPPAEAFPPPPHFSFPAPLSLDAGPGVVPLGTPDAQADPAALAHQGCDINFKEVLEDMLRSLHAGPPSEGALGEGAGAGGAAGGGPERQSVIQFSPPFPGAQAPL

SEQ ID NO: 84575 - protein, 128 aa, Homo sapiens; identical to SEQ ID NO: 84572
  Payload ID: 16825
  Gene Symbol: SBNO2
  Gene Name: strawberry notch homolog 2 (Drosophila)
  ENSP ID: ENSP00000468534

SEQ ID NO: 84576 - protein, 1366 aa, Homo sapiens; identical to SEQ ID NO: 84570
  Payload ID: 16825
  Gene Symbol: SBNO2
  Gene Name: strawberry notch homolog 2 (Drosophila)
  Uniprot ID: Q9Y2G9
  ENSP ID: ENSP00000477651

SEQ ID NO: 84577 - protein, 1309 aa, Homo sapiens; identical to SEQ ID NO: 84571
  Payload ID: 16825
  Gene Symbol: SBNO2
  Gene Name: strawberry notch homolog 2 (Drosophila)
  Uniprot ID: Q9Y2G9
  ENSP ID: ENSP00000482802

SEQ ID NO: 84578 - protein, 111 aa, Homo sapiens; identical to SEQ ID NO: 84573
  Payload ID: 16825
  Gene Symbol: SBNO2
  Gene Name: strawberry notch homolog 2 (Drosophila)
  ENSP ID: ENSP00000488056

SEQ ID NO: 84579 - protein, 128 aa, Homo sapiens; identical to SEQ ID NO: 84572
  Payload ID: 16825
  Gene Symbol: SBNO2
  Gene Name: strawberry notch homolog 2 (Drosophila)
  ENSP ID: ENSP00000488079

SEQ ID NO: 84580 - protein, 1356 aa, Homo sapiens; identical to SEQ ID NO: 84574
  Payload ID: 16825
  Gene Symbol: SBNO2
  Gene Name: strawberry notch homolog 2 (Drosophila)
  ENSP ID: ENSP00000488286

SEQ ID NO: 84581 - protein, 1366 aa, Homo sapiens; identical to SEQ ID NO: 84570
  Payload ID: 16825
  Gene Symbol: SBNO2
  Gene Name: strawberry notch homolog 2 (Drosophila)
  Uniprot ID: Q9Y2G9
  ENSP ID: ENSP00000488808

SEQ ID NO: 84582 - protein, 128 aa, Homo sapiens; identical to SEQ ID NO: 84572
  Payload ID: 16825
  Gene Symbol: SBNO2
  Gene Name: strawberry notch homolog 2 (Drosophila)
  ENSP ID: ENSP00000488832

SEQ ID NO: 84583 - protein, 66 aa, Homo sapiens
  Payload ID: 16826
  Gene Symbol: SERP1
  Gene Name: stress-associated endoplasmic reticulum protein 1
  Uniprot ID: Q9Y6X1
  ENSP ID: ENSP00000239944
MVAKQRIRMANEKHSKNITQRGNVAKTSRNAPEEKASVGPWLLALFIFVVCGSAIFQIIQSIRMGM

SEQ ID NO: 84584 - protein, 78 aa, Homo sapiens
  Payload ID: 16826
  Gene Symbol: SERP1
  Gene Name: stress-associated endoplasmic reticulum protein 1
  ENSP ID: ENSP00000419472
MVAKQRIRMANEKHSKNITQRGNVAKTSRNAPEEKASVGPWLLALFIFVVCGSGKWLGGSHQVESWVERIWDDVVTGQ

SEQ ID NO: 84585 - protein, 55 aa, Homo sapiens
  Payload ID: 16826
  Gene Symbol: SERP1
  Gene Name: stress-associated endoplasmic reticulum protein 1
  ENSP ID: ENSP00000420002
MVAKQRIRMANEKHSKNITQRGNVAKTSQFSRLFKVSGWACEVTDLKMFPFSCEF

SEQ ID NO: 84586 - protein, 66 aa, Homo sapiens; identical to SEQ ID NO: 84583
  Payload ID: 16826
  Gene Symbol: SERP1
  Gene Name: stress-associated endoplasmic reticulum protein 1
  Uniprot ID: Q9Y6X1
  ENSP ID: ENSP00000420076

SEQ ID NO: 84587 - protein, 65 aa, Homo sapiens
  Payload ID: 16827
  Gene Symbol: SERP2
  Gene Name: stress-associated endoplasmic reticulum protein family member 2
  Uniprot ID: Q8N6R1
  ENSP ID: ENSP00000368477
MVAKQRIRMANEKHSKNITQRGNVAKTLRPQEEKYPVGPWLLALFVFVVCGSAIFQIIQSIRMGM

SEQ ID NO: 84588 - protein, 79 aa, Homo sapiens
  Payload ID: 16827
  Gene Symbol: SERP2
  Gene Name: stress-associated endoplasmic reticulum protein family member 2
  ENSP ID: ENSP00000433253
MVAKQRIRMANEKHSKNITQRGNVAKTLRPQEEKYPVGPWLLALFVFVVCGSVSVFSLVYGNKIIVQDPLQIGVVIQEM

SEQ ID NO: 84589 - protein, 84 aa, Homo sapiens
  Payload ID: 16827
  Gene Symbol: SERP2
  Gene Name: stress-associated endoplasmic reticulum protein family member 2
  ENSP ID: ENSP00000435473
MVAKQRIRMANEKHSKNITQRGNVAKTLRPQEEKYPVGPWLLALFVFVVCGSGQPHKLASPGDCQNFLKVVTSRGSHPTPKTGN

SEQ ID NO: 84590 - protein, 41 aa, Homo sapiens
  Payload ID: 16827
  Gene Symbol: SERP2
  Gene Name: stress-associated endoplasmic reticulum protein family member 2
  ENSP ID: ENSP00000477711
LFVFVVCGSGQPHKLASPGDCQNFLKVVTSRGSHPTPKTGN

SEQ ID NO: 84591 - protein, 543 aa, Homo sapiens
  Payload ID: 16828
  Gene Symbol: STIP1
  Gene Name: stress-induced phosphoprotein 1
  Uniprot ID: P31948
  ENSP ID: ENSP00000305958
MEQVNELKEKGNKALSVGNIDDALQCYSEAIKLDPHNHVLYSNRSAAYAKKGDYQKAYEDGCKTVDLKPDWGKGYSRKAAALEFLNRFEEAKRTYEEGLKHEANNPQLKEGLQNMEARLAERKFMNPFNMPNLYQKLESDPRTRTLLSDPTYRELIEQLRNKPSDLGTKLQDPRIMTTLSVLLGVDLGSMDEEEEIATPPPPPPPKKETKPEPMEEDLPENKKQALKEKELGNDAYKKKDFDTALKHYDKAKELDPTNMTYITNQAAVYFEKGDYNKCRELCEKAIEVGRENREDYRQIAKAYARIGNSYFKEEKYKDAIHFYNKSLAEHRTPDVLKKCQQAEKILKEQERLAYINPDLALEEKNKGNECFQKGDYPQAMKHYTEAIKRNPKDAKLYSNRAACYTKLLEFQLALKDCEECIQLEPTFIKGYTRKAAALEAMKDYTKAMDVYQKALDLDSSCKEAADGYQRCMMAQYNRHDSPEDVKRRAMADPEVQQIMSDPAMRLILEQMQKDPQALSEHLKNPVIAQKIQKLMDVGLIAIR

SEQ ID NO: 84592 - protein, 590 aa, Homo sapiens
  Payload ID: 16828
  Gene Symbol: STIP1
  Gene Name: stress-induced phosphoprotein 1
  Uniprot ID: P31948
  ENSP ID: ENSP00000351646
MESGSPMGEVEISRTIRTNGRGQRGYDWQCKRPIRVAEVRSSLHSWSLRWVNELKEKGNKALSVGNIDDALQCYSEAIKLDPHNHVLYSNRSAAYAKKGDYQKAYEDGCKTVDLKPDWGKGYSRKAAALEFLNRFEEAKRTYEEGLKHEANNPQLKEGLQNMEARLAERKFMNPFNMPNLYQKLESDPRTRTLLSDPTYRELIEQLRNKPSDLGTKLQDPRIMTTLSVLLGVDLGSMDEEEEIATPPPPPPPKKETKPEPMEEDLPENKKQALKEKELGNDAYKKKDFDTALKHYDKAKELDPTNMTYITNQAAVYFEKGDYNKCRELCEKAIEVGRENREDYRQIAKAYARIGNSYFKEEKYKDAIHFYNKSLAEHRTPDVLKKCQQAEKILKEQERLAYINPDLALEEKNKGNECFQKGDYPQAMKHYTEAIKRNPKDAKLYSNRAACYTKLLEFQLALKDCEECIQLEPTFIKGYTRKAAALEAMKDYTKAMDVYQKALDLDSSCKEAADGYQRCMMAQYNRHDSPEDVKRRAMADPEVQQIMSDPAMRLILEQMQKDPQALSEHLKNPVIAQKIQKLMDVGLIAIR

SEQ ID NO: 84593 - protein, 138 aa, Homo sapiens
  Payload ID: 16828
  Gene Symbol: STIP1
  Gene Name: stress-induced phosphoprotein 1
  ENSP ID: ENSP00000441036
MEQVNELKEKGNKALSVGNIDDALQCYSEAIKLDPHNHVLYSNRSAAYAKKGDYQKAYEDGCKTVDLKPDWGKGYSRKAAALEFLNRFEEAKRTYEEGLKHEANNPQLKEGLQNMEARLAVQPARQPRRCEATSHGRP

SEQ ID NO: 84594 - protein, 236 aa, Homo sapiens
  Payload ID: 16828
  Gene Symbol: STIP1
  Gene Name: stress-induced phosphoprotein 1
  ENSP ID: ENSP00000442704
MEQVNELKEKGNKALSVGNIDDALQCYSEAIKLDPHNHVLYSNRSAAYAKKGDYQKAYEDGCKTVDLKPDWGKGYSRKAAALEFLNRFEEAKRTYEEGLKHEANNPQLKEGLQNMEARLAERKFMNPFNMPNLYQKLESDPRTRTLLSDPTYRELIEQLRNKPSDLGTKLQDPRIMTTLSVLLGVDLGSMDEEEEIATPPPPPPPKKETKPEPMEEDLPENKKQVLFFSLLTVTYL

SEQ ID NO: 84595 - protein, 137 aa, Homo sapiens
  Payload ID: 16828
  Gene Symbol: STIP1
  Gene Name: stress-induced phosphoprotein 1
  ENSP ID: ENSP00000443416
ACYTKLLEFQLALKDCEECIQLEPTFIKGYTRKAAALEAMKDYTKAMDVYQKALDLDSSCKEAADGYQRCMMAQYNRHDSPEDVKRRAMADPEVQQIMSDPAMRLILEQMQKDPQALSEYVESERRPCWKWRTKAGR

SEQ ID NO: 84596 - protein, 519 aa, Homo sapiens
  Payload ID: 16828
  Gene Symbol: STIP1
  Gene Name: stress-induced phosphoprotein 1
  Uniprot ID: P31948
  ENSP ID: ENSP00000445957
MEQVNELKEKGNKALSVGNIDDALQCYSEAIKLDPHNHVLYSNRSAAYAKKGDYQKAYEDGCKTVDLKPDWGKGLKHEANNPQLKEGLQNMEARLAERKFMNPFNMPNLYQKLESDPRTRTLLSDPTYRELIEQLRNKPSDLGTKLQDPRIMTTLSVLLGVDLGSMDEEEEIATPPPPPPPKKETKPEPMEEDLPENKKQALKEKELGNDAYKKKDFDTALKHYDKAKELDPTNMTYITNQAAVYFEKGDYNKCRELCEKAIEVGRENREDYRQIAKAYARIGNSYFKEEKYKDAIHFYNKSLAEHRTPDVLKKCQQAEKILKEQERLAYINPDLALEEKNKGNECFQKGDYPQAMKHYTEAIKRNPKDAKLYSNRAACYTKLLEFQLALKDCEECIQLEPTFIKGYTRKAAALEAMKDYTKAMDVYQKALDLDSSCKEAADGYQRCMMAQYNRHDSPEDVKRRAMADPEVQQIMSDPAMRLILEQMQKDPQALSEHLKNPVIAQKIQKLMDVGLIAIR

SEQ ID NO: 84597 - protein, 837 aa, Homo sapiens
  Payload ID: 16829
  Gene Symbol: STRIP1
  Gene Name: striatin interacting protein 1
  Uniprot ID: Q5VSL9
  ENSP ID: ENSP00000358810
MEPAVGGPGPLIVNNKQPQPPPPPPPAAAQPPPGAPRAAAGLLPGGKAREFNRNQRKDSEGYSESPDLEFEYADTDKWAAELSELYSYTEGPEFLMNRKCFEEDFRIHVTDKKWTELDTNQHRTHAMRLLDGLEVTAREKRLKVARAILYVAQGTFGECSSEAEVQSWMRYNIFLLLEVGTFNALVELLNMEIDNSAACSSAVRKPAISLADSTDLRVLLNIMYLIVETVHQECEGDKAEWRTMRQTFRAELGSPLYNNEPFAIMLFGMVTKFCSGHAPHFPMKKVLLLLWKTVLCTLGGFEELQSMKAEKRSILGLPPLPEDSIKVIRNMRAASPPASASDLIEQQQKRGRREHKALIKQDNLDAFNERDPYKADDSREEEEENDDDNSLEGETFPLERDEVMPPPLQHPQTDRLTCPKGLPWAPKVREKDIEMFLESSRSKFIGYTLGSDTNTVVGLPRPIHESIKTLKQHKYTSIAEVQAQMEEEYLRSPLSGGEEEVEQVPAETLYQGLLPSLPQYMIALLKILLAAAPTSKAKTDSINILADVLPEEMPTTVLQSMKLGVDVNRHKEVIVKAISAVLLLLLKHFKLNHVYQFEYMAQHLVFANCIPLILKFFNQNIMSYITAKNSISVLDYPHCVVHELPELTAESLEAGDSNQFCWRNLFSCINLLRILNKLTKWKHSRTMMLVVFKSAPILKRALKVKQAMMQLYVLKLLKVQTKYLGRQWRKSNMKTMSAIYQKVRHRLNDDWAYGNDLDARPWDFQAEECALRANIERFNARRYDRAHSNPDFLPVDNCLQSVLGQRVDLPEDFQMNYDLWLEREVFSKPISWEELLQ

SEQ ID NO: 84598 - protein, 742 aa, Homo sapiens
  Payload ID: 16829
  Gene Symbol: STRIP1
  Gene Name: striatin interacting protein 1
  Uniprot ID: Q5VSL9
  ENSP ID: ENSP00000358811
MNRKCFEEDFRIHVTDKKWTELDTNQHRTHAMRLLDGLEVTAREKRLKVARAILYVAQGTFGECSSEAEVQSWMRYNIFLLLEVGTFNALVELLNMEIDNSAACSSAVRKPAISLADSTDLRVLLNIMYLIVETVHQECEGDKAEWRTMRQTFRAELGSPLYNNEPFAIMLFGMVTKFCSGHAPHFPMKKVLLLLWKTVLCTLGGFEELQSMKAEKRSILGLPPLPEDSIKVIRNMRAASPPASASDLIEQQQKRGRREHKALIKQDNLDAFNERDPYKADDSREEEEENDDDNSLEGETFPLERDEVMPPPLQHPQTDRLTCPKGLPWAPKVREKDIEMFLESSRSKFIGYTLGSDTNTVVGLPRPIHESIKTLKQHKYTSIAEVQAQMEEEYLRSPLSGGEEEVEQVPAETLYQGLLPSLPQYMIALLKILLAAAPTSKAKTDSINILADVLPEEMPTTVLQSMKLGVDVNRHKEVIVKAISAVLLLLLKHFKLNHVYQFEYMAQHLVFANCIPLILKFFNQNIMSYITAKNSISVLDYPHCVVHELPELTAESLEAGDSNQFCWRNLFSCINLLRILNKLTKWKHSRTMMLVVFKSAPILKRALKVKQAMMQLYVLKLLKVQTKYLGRQWRKSNMKTMSAIYQKVRHRLNDDWAYGNDLDARPWDFQAEECALRANIERFNARRYDRAHSNPDFLPVDNCLQSVLGQRVDLPEDFQMNYDLWLEREVFSKPISWEELLQ

SEQ ID NO: 84599 - protein, 212 aa, Homo sapiens
  Payload ID: 16829
  Gene Symbol: STRIP1
  Gene Name: striatin interacting protein 1
  Uniprot ID: Q5VSL9
  ENSP ID: ENSP00000476025
MEPAVGGPGPLIVNNKQPQPPPPPPPAAAQPPPGAPRAAAGLLPGGKAREFNRNQRKDSEGYSESPDLEFEYADTDKWAAELSELYSYTEGPEFLMNRKCFEEDFRIHVTDKKWTELDTNQHRTHAMRLLDGLEVTAREKRLKVARAILYVAQGTFGECSSEAEVQSWMRYNIFLLLEVGTFNALVELLNMEIEHCCVRPAVSALAGGQAQD

SEQ ID NO: 84600 - protein, 834 aa, Homo sapiens
  Payload ID: 16830
  Gene Symbol: STRIP2
  Gene Name: striatin interacting protein 2
  Uniprot ID: Q9ULQ0
  ENSP ID: ENSP00000249344
MEDPAAPGTGGPPANGNGNGGGKGKQAAPKGREAFRSQRRESEGSVDCPTLEFEYGDADGHAAELSELYSYTENLEFTNNRRCFEEDFKTQVQGKEWLELEEDAQKAYIMGLLDRLEVVSRERRLKVARAVLYLAQGTFGECDSEVDVLHWSRYNCFLLYQMGTFSTFLELLHMEIDNSQACSSALRKPAVSIADSTELRVLLSVMYLMVENIRLERETDPCGWRTARETFRTELSFSMHNEEPFALLLFSMVTKFCSGLAPHFPIKKVLLLLWKVVMFTLGGFEHLQTLKVQKRAELGLPPLAEDSIQVVKSMRAASPPSYTLDLGESQLAPPPSKLRGRRGSRRQLLTKQDSLDIYNERDLFKTEEPATEEEEESAGDGERTLDGELDLLEQDPLVPPPPSQAPLSAERVAFPKGLPWAPKVRQKDIEHFLEMSRNKFIGFTLGQDTDTLVGLPRPIHESVKTLKQHKYISIADVQIKNEEELEKCPMSLGEEVVPETPCEILYQGMLYSLPQYMIALLKILLAAAPTSKAKTDSINILADVLPEEMPITVLQSMKLGIDVNRHKEIIVKSISTLLLLLLKHFKLNHIYQFEYVSQHLVFANCIPLILKFFNQNILSYITAKNSISVLDYPCCTIQDLPELTTESLEAGDNSQFCWRNLFSCINLLRLLNKLTKWKHSRTMMLVVFKSAPILKRALKVKQAMLQLYVLKLLKLQTKYLGRQWRKSNMKTMSAIYQKVRHRMNDDWAYGNDIDARPWDFQAEECTLRANIEAFNSRRYDRPQDSEFSPVDNCLQSVLGQRLDLPEDFHYSYELWLEREVFSQPICWEELLQNH

SEQ ID NO: 84601 - protein, 758 aa, Homo sapiens
  Payload ID: 16830
  Gene Symbol: STRIP2
  Gene Name: striatin interacting protein 2
  Uniprot ID: Q9ULQ0
  ENSP ID: ENSP00000392393
MEDPAAPGTGGPPANGNGNGGGKGKQAAPKGREAFRSQRRESEGSVDCPTLEFEYGDADGHAAELSELYSYTENLEFTNNRRCFEEDFKTQVQGKEWLELEEDAQKAYIMGLLDRLEVVSRERRLKVARAVLYLAQGTFGECDSEVDVLHWSRYNCFLLYQMGTFSTFLELLHMEIDNSQACSSALRKPAVSIADSTELRVLLSVMYLMVENIRLERETDPCGWRTARETFRTELSFSMHNEEPFALLLFSMVTKFCSGLAPHFPIKKVLLLLWKVVMFTLGGFEHLQTLKVQKRAELGLPPLAEDSIQVVKSMRAASPPSYTLDLGESQLAPPPSKLRGRRGSRRQLLTKQDSLDIYNERDLFKTEEPATEEEEESAGDGERTLDGELDLLEQDPLVPPPPSQAPLSAERVAFPKGLPWAPKVRQKDIEHFLEMSRNKFIGFTLGQDTDTLVGLPRPIHESVKTLKQHKYISIADVQIKNEEELEKCPMSLGEEVVPETPCEILYQGMLYSLPQYMIALLKILLAAAPTSKAKTDSINILADVLPEEMPITVLQSMKLGIDVNRHKEIIVKSISTLLLLLLKHFKLNHIYQFEYVSQHLVFANCIPLILKFFNQNILSYITAKNSISVLDYPCCTIQDLPELTTESLEAGDNSQFCWRNLFSCINLLRLLNKLTKWKHSRTMMLVVFKSAPILKRALKVKQAMLQLYVLKLLKLQTKYLGRQWRKSNMKTMSAIYQKVRHRMNDDWAYGNGESSQSS

SEQ ID NO: 84602 - protein, 780 aa, Homo sapiens
  Payload ID: 16831
  Gene Symbol: STRN
  Gene Name: striatin, calmodulin binding protein
  Uniprot ID: O43815
  ENSP ID: ENSP00000263918
MDEQAGPGVFFSNNHPGAGGAKGLGPLAEAAAAGDGAAAAGAARAQYSLPGILHFLQHEWARFEVERAQWEVERAELQAQIAFLQGERKGQENLKKDLVRRIKMLEYALKQERAKYHKLKYGTELNQGDMKPPSYDSDEGNETEVQPQQNSQLMWKQGRQLLRQYLQEVGYTDTILDVKSKRVRALLGFSSDVTDREDDKNQDSVVNGTEAEVKETAMIAKSELTDSASVLDNFKFLESAAADFSDEDEDDDVDGREKSVIDTSTIVRKKALPDSGEDRDTKEALKEFDFLVTSEEGDNESRSAGDGTDWEKEDQCLMPEAWNVDQGVITKLKEQYKKERKGKKGVKRPNRSKLQDMLANLRDVDELPSLQPSVGSPSRPSSSRLPEHEINRADEVEALTFPPSSGKSFIMGADEALESELGLGELAGLTVANEADSLTYDIANNKDALRKTWNPKFTLRSHFDGIRALAFHPIEPVLITASEDHTLKMWNLQKTAPAKKSTSLDVEPIYTFRAHKGPVLCVVMSSNGEQCYSGGTDGLIQGWNTTNPNIDPYDSYDPSVLRGPLLGHTDAVWGLAYSAAHQRLLSCSADGTLRLWNTTEVAPALSVFNDTKELGIPASVDLVSSDPSHMVASFSKGYTSIFNMETQQRILTLESNVDTTANSSCQINRVISHPTLPISITAHEDRHIKFYDNNTGKLIHSMVAHLEAVTSLAVDPNGLYLMSGSHDCSIRLWNLESKTCIQEFTAHRKKFEESIHDVAFHPSKCYIASAGADALAKVFV

SEQ ID NO: 84603 - protein, 731 aa, Homo sapiens
  Payload ID: 16831
  Gene Symbol: STRN
  Gene Name: striatin, calmodulin binding protein
  Uniprot ID: O43815
  ENSP ID: ENSP00000368513
MDEQAGPGVFFSNNHPGAGGAKGLGPLAGAARAQYSLPGILHFLQHEWARFEVERAQWEVERAELQAQIAFLQGERKGQENLKKDLVRRIKMLEYALKQERAKYHKLKYGTELNQGDMKPPSYDSDEGNETEVQPQQNSQLMWKQGRQLLRQYLQEVGYTDTILDVKSKRVRALLGFSSDVTDREDDKNQDSVVNGTEAEVKETAMIAKSELTDSASVLDNFKFLESAAADFSDEDEDDDVDGREKSVIDTSTIVRKKALPDSGEDRDTKEALKEFDFLVTSEEGDNESRSAGDGTDWGPNRSKLQDMLANLRDVDELPSLQPSVGSPSRPSSSRLPEHEINRADEVEALTFPPSSGKSFIMGADEALESELGLGELAGLTVANEADSLTYDIANNKDALRKTWNPKFTLRSHFDGIRALAFHPIEPVLITASEDHTLKMWNLQKTAPAKKSTSLDVEPIYTFRAHKGPVLCVVMSSNGEQCYSGGTDGLIQGWNTTNPNIDPYDSYDPSVLRGPLLGHTDAVWGLAYSAAHQRLLSCSADGTLRLWNTTEVAPALSVFNDTKELGIPASVDLVSSDPSHMVASFSKGYTSIFNMETQQRILTLESNVDTTANSSCQINRVISHPTLPISITAHEDRHIKFYDNNTGKLIHSMVAHLEAVTSLAVDPNGLYLMSGSHDCSIRLWNLESKTCIQEFTAHRKKFEESIHDVAFHPSKCYIASAGADALAKVFV

SEQ ID NO: 84604 - protein, 713 aa, Homo sapiens
  Payload ID: 16832
  Gene Symbol: STRN3
  Gene Name: striatin, calmodulin binding protein 3
  Uniprot ID: Q13033
  ENSP ID: ENSP00000347909
MDELAGGGGGGPGMAAPPRQQQGPGGNLGLSPGGNGAAGGGGPPASEGAGPAAGPELSRPQQYTIPGILHYIQHEWARFEMERAHWEVERAELQARIAFLQGERKGQENLKKDLVRRIKMLEYALKQERAKYHKLKYGTELNQGDLKMPTFESEETKDTEAPTAPQNSQLTWKQGRQLLRQYLQEVGYTDTILDVRSQRVRSLLGLSNSEPNGSVETKNLEQILNGGESPKQKGQEIKRSSGDVLETFNFLENADDSDEDEENDMIEGIPEGKDKHRMNKHKIGNEGLAADLTDDPDTEEALKEFDFLVTAEDGEGAGEARSSGDGTEWAEPITFPSGGGKSFIMGSDDVLLSVLGLGDLADLTVTNDADYSYDLPANKDAFRKTWNPKYTLRSHFDGVRALAFHPVEPVLVTASEDHTLKLWNLQKTVPAKKSASLDVEPIYTFRAHIGPVLSLAISSNGEQCFSGGIDATIQWWNMPSPSVDPYDTYEPNVLAGTLVGHTDAVWGLAYSGIKNQLLSCSADGTVRLWNPQEKLPCICTYNGDKKHGIPTSVDFIGCDPAHMVTSFNTGSAVIYDLETSQSLVILSSQVDSGLQSNNHINRVVSHPTLPVTITAHEDRHIKFFDNKTGKMIHSMVAHLDAVTSLAVDPNGIYLMSGSHDCSIRLWNLDSKTCVQEITAHRKKLDESIYDVAFHSSKAYIASAGADALAKVFV

SEQ ID NO: 84605 - protein, 797 aa, Homo sapiens
  Payload ID: 16832
  Gene Symbol: STRN3
  Gene Name: striatin, calmodulin binding protein 3
  Uniprot ID: Q13033
  ENSP ID: ENSP00000350071
MDELAGGGGGGPGMAAPPRQQQGPGGNLGLSPGGNGAAGGGGPPASEGAGPAAGPELSRPQQYTIPGILHYIQHEWARFEMERAHWEVERAELQARIAFLQGERKGQENLKKDLVRRIKMLEYALKQERAKYHKLKYGTELNQGDLKMPTFESEETKDTEAPTAPQNSQLTWKQGRQLLRQYLQEVGYTDTILDVRSQRVRSLLGLSNSEPNGSVETKNLEQILNGGESPKQKGQEIKRSSGDVLETFNFLENADDSDEDEENDMIEGIPEGKDKHRMNKHKIGNEGLAADLTDDPDTEEALKEFDFLVTAEDGEGAGEARSSGDGTEWDKDDLSPTAEVWDVDQGLISKLKEQYKKERKGKKGVKRANRTKLYDMIADLGDDELPHIPSGIINQSRSASTRMTDHEGARAEEAEPITFPSGGGKSFIMGSDDVLLSVLGLGDLADLTVTNDADYSYDLPANKDAFRKTWNPKYTLRSHFDGVRALAFHPVEPVLVTASEDHTLKLWNLQKTVPAKKSASLDVEPIYTFRAHIGPVLSLAISSNGEQCFSGGIDATIQWWNMPSPSVDPYDTYEPNVLAGTLVGHTDAVWGLAYSGIKNQLLSCSADGTVRLWNPQEKLPCICTYNGDKKHGIPTSVDFIGCDPAHMVTSFNTGSAVIYDLETSQSLVILSSQVDSGLQSNNHINRVVSHPTLPVTITAHEDRHIKFFDNKTGKMIHSMVAHLDAVTSLAVDPNGIYLMSGSHDCSIRLWNLDSKTCVQEITAHRKKLDESIYDVAFHSSKAYIASAGADALAKVFV

SEQ ID NO: 84606 - protein, 332 aa, Homo sapiens
  Payload ID: 16832
  Gene Symbol: STRN3
  Gene Name: striatin, calmodulin binding protein 3
  ENSP ID: ENSP00000451028
MDELAGGGGGGPGMAAPPRQQQGPGGNLGLSPGGNGAAGGGGPPASEGAGPAAGPELSRPQQYTIPGILHYIQHEWARFEMERAHWEVERAELQARIAFLQGERKGQENLKKDLVRRIKMLEYALKQERAKYHKLKYGTELNQGDLKMPTFESEETKDTEAPTAPQNSQLTWKQGRQLLRQYLQEVGYTDTILDVRSQRVRSLLGLSNSEPNGSVETKNLEQILNGGESPKQKGQEIKRSSGDVLETFNFLENADDSDEDEENDMIEGIPEGKDKHRMNKHKIGNEGLAADLTDDPDTEEALKEFDFLVTAEDGEGAGEARSSGDGTEWVAC

SEQ ID NO: 84607 - protein, 112 aa, Homo sapiens
  Payload ID: 16832
  Gene Symbol: STRN3
  Gene Name: striatin, calmodulin binding protein 3
  ENSP ID: ENSP00000451233
MLEYALKQERAKYHKLKYGTELNQGDLKMPTFESEETKDTEAPTAPQNSQLTWKQGRQLLRQYLQEVGYTDTILDVRSQRVRSLLGLSNSEPNGSVETKNLEQILNGGESPK

SEQ ID NO: 84608 - protein, 172 aa, Homo sapiens
  Payload ID: 16832
  Gene Symbol: STRN3
  Gene Name: striatin, calmodulin binding protein 3
  ENSP ID: ENSP00000452092
  MOD_RES (1)..(1): Any amino acid
XSGDVLETFNFLENADDSDEDEENDMIEGIPEGKDKHRMNKHKIGNEGLAADLTDDPDTEEALKEFDFLVTAEDGEGAGEARSSGDGTEWDKDDLSPTAEVWDVDQGLISKLKEQYKKERKGKKGVKTEPITFPSGGGKSFIMGSDDVLLSVLGLGDLADLTVTNDADYSYD

SEQ ID NO: 84609 - protein, 139 aa, Homo sapiens
  Payload ID: 16832
  Gene Symbol: STRN3
  Gene Name: striatin, calmodulin binding protein 3
  ENSP ID: ENSP00000452542
IGNEGLAADLTDDPDTEEALKEFDFLVTAEDGEGAGEARSSGDGTEWGANRTKLYDMIADLGDDELPHIPSGIINQSRSASTRMTDHEGARAEEAEPITFPSGGGKSFIMGSDDVLLSVLGLGDLADLTVTNDADYSYD

SEQ ID NO: 84610 - protein, 753 aa, Homo sapiens
  Payload ID: 16833
  Gene Symbol: STRN4
  Gene Name: striatin, calmodulin binding protein 4
  Uniprot ID: Q9NRL3
  ENSP ID: ENSP00000263280
MMEERAAAAVAAAASSCRPLGSGAGPGPTGAAPVSAPAPGPGPAGKGGGGGGSPGPTAGPEPLSLPGILHFIQHEWARFEAEKARWEAERAELQAQVAFLQGERKGQENLKTDLVRRIKMLEYALKQERAKYHKLKFGTDLNQGEKKADVSEQVSNGPVESVTLENSPLVWKEGRQLLRQYLEEVGYTDTILDMRSKRVRSLLGRSLELNGAVEPSEGAPRAPPGPAGLSGGESLLVKQIEEQIKRNAAGKDGKERLGGSVLGQIPFLQNCEDEDSDEDDELDSVQHKKQRVKLPSKALVPEMEDEDEEDDSEDAINEFDFLGSGEDGEGAPDPRRCTVDGSPHELESRRVKLQGILADLRDVDGLPPKVTGPPPGTPQPRPHEDVFIMDTIGGGEVSLGDLADLTVTNDNDLSCDLSDSKDAFKKTWNPKFTLRSHYDGIRSLAFHHSQSALLTASEDGTLKLWNLQKAVTAKKNAALDVEPIHAFRAHRGPVLAVAMGSNSEYCYSGGADACIHSWKIPDLSMDPYDGYDPSVLSHVLEGHGDAVWGLAFSPTSQRLASCSADGTVRIWDPSSSSPACLCTFPTASEHGVPTSVAFTSTEPAHIVASFRSGDTVLYDMEVGSALLTLESRGSSGPTQINQVVSHPNQPLTITAHDDRGIRFLDNRTGKPVHSMVAHLDAVTCLAVDPNGAFLMSGSHDCSLRLWSLDNKTCVQEITAHRKKHEEAIHAVACHPSKALIASAGADALAKVFV

SEQ ID NO: 84611 - protein, 760 aa, Homo sapiens
  Payload ID: 16833
  Gene Symbol: STRN4
  Gene Name: striatin, calmodulin binding protein 4
  Uniprot ID: Q9NRL3
  ENSP ID: ENSP00000375777
MMEERAAAAVAAAASSCRPLGSGAGPGPTGAAPVSAPAPGPGPAGKGGGGGGSPGPTAGPEPLSLPGILHFIQHEWARFEAEKARWEAERAELQAQVAFLQGERKGQENLKTDLVRRIKMLEYALKQERAKYHKLKFGTDLNQGEKKADVSEQVSNGPVESVTLENSPLVWKEGRQLLRQYLEEVGYTDTILDMRSKRVRSLLGRSLELNGAVEPSEGAPRAPPGPAGLSGGESLLVKQIEEQIKRNAAGKDGKERLGGSVLGQIPFLQNCEDEDSDEDDELDSVQHKKQRVKLPSKALVPEMEDEDEEDDSEDAINEFDFLGSGEDGEGAPDPRRCTVDGSPHELESRRVKLQGILADLRDVDGLPPKVTGPPPGTPQPRPHEGSFGFSSDVFIMDTIGGGEVSLGDLADLTVTNDNDLSCDLSDSKDAFKKTWNPKFTLRSHYDGIRSLAFHHSQSALLTASEDGTLKLWNLQKAVTAKKNAALDVEPIHAFRAHRGPVLAVAMGSNSEYCYSGGADACIHSWKIPDLSMDPYDGYDPSVLSHVLEGHGDAVWGLAFSPTSQRLASCSADGTVRIWDPSSSSPACLCTFPTASEHGVPTSVAFTSTEPAHIVASFRSGDTVLYDMEVGSALLTLESRGSSGPTQINQVVSHPNQPLTITAHDDRGIRFLDNRTGKPVHSMVAHLDAVTCLAVDPNGAFLMSGSHDCSLRLWSLDNKTCVQEITAHRKKHEEAIHAVACHPSKALIASAGADALAKVFV

SEQ ID NO: 84612 - protein, 634 aa, Homo sapiens
  Payload ID: 16833
  Gene Symbol: STRN4
  Gene Name: striatin, calmodulin binding protein 4
  ENSP ID: ENSP00000440901
MLEYALKQERAKYHKLKFGTDLNQGEKKADVSEQVSNGPVESVTLENSPLVWKEGRQLLRQYLEEVGYTDTILDMRSKRVRSLLGRSLELNGAVEPSEGAPRAPPGPAGLSGGESLLVKQIEEQIKRNAAGKDGKERLGGSVLGQIPFLQNCEDEDSDEDDELDSVQHKKQRVKLPSKALVPEMEDEDEEDDSEDAINEFDFLGSGEDGEGAPDPRRCTVDGSPHELESRRVKLQGILADLRDVDGLPPKVTGPPPGTPQPRPHEDVFIMDTIGGGEVSLGDLADLTVTNDNDLSCDLSDSKDAFKKTWNPKFTLRSHYDGIRSLAFHHSQSALLTASEDGTLKLWNLQKAVTAKKNAALDVEPIHAFRAHRGPVLAVAMGSNSEYCYSGGADACIHSWKIPDLSMDPYDGYDPSVLSHVLEGHGDAVWGLAFSPTSQRLASCSADGTVRIWDPSSSSPACLCTFPTASEHGVPTSVAFTSTEPAHIVASFRSGDTVLYDMEVGSALLTLESRGSSGPTQINQVVSHPNQPLTITAHDDRGIRFLDNRTGKPVHSMVAHLDAVTCLAVDPNGAFLMSGSHDCSLRLWSLDNKTCVQEITAHRKKHEEAIHAVACHPSKALIASAGADALAKVFV

SEQ ID NO: 84613 - protein, 73 aa, Homo sapiens
  Payload ID: 16833
  Gene Symbol: STRN4
  Gene Name: striatin, calmodulin binding protein 4
  ENSP ID: ENSP00000469279
MLEYALKQERAKYHKLKFGTDLNQGEKKADVSEQVSNGPVESVTLENSPLVWKEGRQLLRQYLEEVGYTDTIL

SEQ ID NO: 84614 - protein, 114 aa, Homo sapiens
  Payload ID: 16833
  Gene Symbol: STRN4
  Gene Name: striatin, calmodulin binding protein 4
  ENSP ID: ENSP00000470040
MLEYALKQERAKYHKLKFGTDLNQGEKKADVSEQVSNGPVESVTLENSPLVWKEGRQLLRQYLEEVGYTDTILDMRSKRVRSLLGRSLELNGAVEPSEGAPRAPPGPAGLSGGE

SEQ ID NO: 84615 - protein, 317 aa, Homo sapiens
  Payload ID: 16833
  Gene Symbol: STRN4
  Gene Name: striatin, calmodulin binding protein 4
  ENSP ID: ENSP00000470634
  MOD_RES (1)..(1): Any amino acid
XDGLPPKVTGPPPGTPQPRPHEAVILHLVLSPSLSLALYLFLCLSLSFSLSLALSAPPSPPPTRFLWLLLRRLHHGHYRGRGGEPGGLGRSHRHQRQRPQLRYAFKKTWNPKFTLRSHYDGIRSLAFHHSQSALLTASEDGTLKLWNLQKAVTAKKNAALDVEPIHAFRAHRGPVLAVAMGSNSEYCYSGGADACIHSWKIPDLSMDPYDGYDPSVLSHVLEGHGDAVWGLAFSPTSQRLASCSADGTVRIWDPSSSSPACLCTFPTASEHGVPTSVAFTSTEPAHIVASFRSGDTVLYDMEVGSALLTLESRGSSG

SEQ ID NO: 84616 - protein, 139 aa, Homo sapiens
  Payload ID: 16833
  Gene Symbol: STRN4
  Gene Name: striatin, calmodulin binding protein 4
  ENSP ID: ENSP00000471354
MLEYALKQERAKYHKLKFGTDLNQGEKKADVSEQVSNGPVESVTLENSPLVWKEGRQLLRQYLEEVGYTDTILDMRSKRVRSLLGRSLELNGAVEPSEGAPRAPPGPAGLSGGESLLVKQIEEQIKRNAAGKDGKERLG

SEQ ID NO: 84617 - protein, 180 aa, Homo sapiens
  Payload ID: 16833
  Gene Symbol: STRN4
  Gene Name: striatin, calmodulin binding protein 4
  ENSP ID: ENSP00000471499
  MOD_RES (1)..(1): Any amino acid
XVAAAASSCRPLGSGAGPGPTGAAPVSAPAPGPGPAGKGGGGGGSPGPTAGPEPLSLPGILHFIQHEWARFEAEKARWEAERAELQAQVAFLQGERKGQENLKTDLVRRIKMLEYALKQERAKYHKLKFGTDLNQGEKKADVSEQVSNGPVESVTLENSPLVWKEGRQLLRHPVPAGFSF

SEQ ID NO: 84618 - protein, 103 aa, Homo sapiens
  Payload ID: 16833
  Gene Symbol: STRN4
  Gene Name: striatin, calmodulin binding protein 4
  ENSP ID: ENSP00000472429
MLEYALKQERAKYHKLKFGTDLNQGEKKADVSEQVSNGPVESVTLENSPLVWKEGRQLLRQYLEEVGYTDTILDMRSKRVRSLLGRSLELNGAVEPSEGAPRA

SEQ ID NO: 84619 - protein, 198 aa, Homo sapiens
  Payload ID: 16833
  Gene Symbol: STRN4
  Gene Name: striatin, calmodulin binding protein 4
  ENSP ID: ENSP00000472938
  MOD_RES (1)..(1): Any amino acid
XQRLASCSADGTVRIWDPSSSSPACLCTFPTASEHGVPTSVAFTSTEPAHIVASFRSGDTVLYDMEVGSALLTLESRGSSGPTQINQVVSHPNQPLTITAHDDRGIRFLDNRTGKPVHSMVAHLDAVTCLAVDPNGAFLMSGSHDCSLRLWSLDNKTCVQEITAHRKKHEEAIHAVACHPSKALIASAGADALAKVFV

SEQ ID NO: 84620 - protein, 316 aa, Homo sapiens
  Payload ID: 16833
  Gene Symbol: STRN4
  Gene Name: striatin, calmodulin binding protein 4
  ENSP ID: ENSP00000473446
  MOD_RES (1)..(1): Any amino acid
XEQVSNGPVESVTLENSPLVWKEGRQLLRQYLEEVGYTDTILDMRSKRVRSLLGRSLELNGAVEPSEGAPRAPPGPAGLSGGESLLVKQIEEQIKRNAAGKDGKERLGGSVLGQIPFLQNCEDEDSDEDDELDSVQHKKQRVKLPSKALVPEMEDEDEEDDSEDAINEFDFLGSGEDGEGAPDPRRCTVDGSPHELESRRVKLQGILADLRDVDGLPPKVTGPPPGTPQPRPHEAVILHLVLSPSLSLALYLFLCLSLSFSLSLALSAPPSPPPTRFLWLLLRRLHHGHYRGRGGEPGGLGRSHRHQRQRPQLRSV

SEQ ID NO: 84621 - protein, 257 aa, Homo sapiens
  Payload ID: 16833
  Gene Symbol: STRN4
  Gene Name: striatin, calmodulin binding protein 4
  Uniprot ID: Q9NRL3
  ENSP ID: ENSP00000473607
MLEYALKQERAKYHKLKFGTDLNQGEKKADVSEQVSNGPVESVTLENSPLVWKEGRQLLRQYLEEVGYTDTILDMRSKRVRSLLGRSLELNGAVEPSEGAPRAPPGPAGLSGGESLLVKQIEEQIKRNAAGKDGKERLGGSVLGQIPFLQNCEDEDSDEDDELDSVQHKKQRVKLPSKALVPEMEDEDEEDDSEDAINEFDFLGSGEDGEGAPDPRRCTVDGSPHELGPELHSPTEWQGALSVGKASPMPDWVGTAG

SEQ ID NO: 84622 - protein, 1221 aa, Homo sapiens
  Payload ID: 16834
  Gene Symbol: STAG1
  Gene Name: stromal antigen 1
  Uniprot ID: Q8WVM7
  ENSP ID: ENSP00000236698
MITSELPVLQDSTNETTAHSDAGSELEETEVKGKRKRGRPGRPPSTNKKPRKSPGEKSRIEAGIRGAGRGRANGHPQQNGEGEPVTLFEVVKLGKSAMQSVVDDWIESYKQDRDIALLDLINFFIQCSGCRGTVRIEMFRNMQNAEIIRKMTEEFDEDSGDYPLTMPGPQWKKFRSNFCEFIGVLIRQCQYSIIYDEYMMDTVISLLTGLSDSQVRAFRHTSTLAAMKLMTALVNVALNLSIHQDNTQRQYEAERNKMIGKRANERLELLLQKRKELQENQDEIENMMNSIFKGIFVHRYRDAIAEIRAICIEEIGVWMKMYSDAFLNDSYLKYVGWTLHDRQGEVRLKCLKALQSLYTNRELFPKLELFTNRFKDRIVSMTLDKEYDVAVEAIRLVTLILHGSEEALSNEDCENVYHLVYSAHRPVAVAAGEFLHKKLFSRHDPQAEEALAKRRGRNSPNGNLIRMLVLFFLESELHEHAAYLVDSLWESSQELLKDWECMTELLLEEPVQGEEAMSDRQESALIELMVCTIRQAAEAHPPVGRGTGKRVLTAKERKTQIDDRNKLTEHFIITLPMLLSKYSADAEKVANLLQIPQYFDLEIYSTGRMEKHLDALLKQIKFVVEKHVESDVLEACSKTYSILCSEEYTIQNRVDIARSQLIDEFVDRFNHSVEDLLQEGEEADDDDIYNVLSTLKRLTSFHNAHDLTKWDLFGNCYRLLKTGIEHGAMPEQIVVQALQCSHYSILWQLVKITDGSPSKEDLLVLRKTVKSFLAVCQQCLSNVNTPVKEQAFMLLCDLLMIFSHQLMTGGREGLQPLVFNPDTGLQSELLSFVMDHVFIDQDEENQSMEGDEEDEANKIEALHKRRNLLAAFSKLIIYDIVDMHAAADIFKHYMKYYNDYGDIIKETLSKTRQIDKIQCAKTLILSLQQLFNELVQEQGPNLDRTSAHVSGIKELARRFALTFGLDQIKTREAVATLHKDGIEFAFKYQNQKGQEYPPPNLAFLEVLSEFSSKLLRQDKKTVHSYLEKFLTEQMMERREDVWLPLISYRNSLVTGGEDDRMSVNSGSSSSKTSSVRNKKGRPPLHKKRVEDESLDNTWLNRTDTMIQTPGPLPAPQLTSTVLRENSRPMGDQIQEPESEHGSEPDFLHNRGLMEEDAEPIFEDVMMSSRSQLEDMNEEFEDTMVIDLPPSRNRRERAELRPDFFDSAAIIEDDSGFGMPMF

SEQ ID NO: 84623 - protein, 1258 aa, Homo sapiens
  Payload ID: 16834
  Gene Symbol: STAG1
  Gene Name: stromal antigen 1
  Uniprot ID: Q8WVM7
  ENSP ID: ENSP00000372689
MITSELPVLQDSTNETTAHSDAGSELEETEVKGKRKRGRPGRPPSTNKKPRKSPGEKSRIEAGIRGAGRGRANGHPQQNGEGEPVTLFEVVKLGKSAMQSVVDDWIESYKQDRDIALLDLINFFIQCSGCRGTVRIEMFRNMQNAEIIRKMTEEFDEDSGDYPLTMPGPQWKKFRSNFCEFIGVLIRQCQYSIIYDEYMMDTVISLLTGLSDSQVRAFRHTSTLAAMKLMTALVNVALNLSIHQDNTQRQYEAERNKMIGKRANERLELLLQKRKELQENQDEIENMMNSIFKGIFVHRYRDAIAEIRAICIEEIGVWMKMYSDAFLNDSYLKYVGWTLHDRQGEVRLKCLKALQSLYTNRELFPKLELFTNRFKDRIVSMTLDKEYDVAVEAIRLVTLILHGSEEALSNEDCENVYHLVYSAHRPVAVAAGEFLHKKLFSRHDPQAEEALAKRRGRNSPNGNLIRMLVLFFLESELHEHAAYLVDSLWESSQELLKDWECMTELLLEEPVQGEEAMSDRQESALIELMVCTIRQAAEAHPPVGRGTGKRVLTAKERKTQIDDRNKLTEHFIITLPMLLSKYSADAEKVANLLQIPQYFDLEIYSTGRMEKHLDALLKQIKFVVEKHVESDVLEACSKTYSILCSEEYTIQNRVDIARSQLIDEFVDRFNHSVEDLLQEGEEADDDDIYNVLSTLKRLTSFHNAHDLTKWDLFGNCYRLLKTGIEHGAMPEQIVVQALQCSHYSILWQLVKITDGSPSKEDLLVLRKTVKSFLAVCQQCLSNVNTPVKEQAFMLLCDLLMIFSHQLMTGGREGLQPLVFNPDTGLQSELLSFVMDHVFIDQDEENQSMEGDEEDEANKIEALHKRRNLLAAFSKLIIYDIVDMHAAADIFKHYMKYYNDYGDIIKETLSKTRQIDKIQCAKTLILSLQQLFNELVQEQGPNLDRTSAHVSGIKELARRFALTFGLDQIKTREAVATLHKDGIEFAFKYQNQKGQEYPPPNLAFLEVLSEFSSKLLRQDKKTVHSYLEKFLTEQMMERREDVWLPLISYRNSLVTGGEDDRMSVNSGSSSSKTSSVRNKKGRPPLHKKRVEDESLDNTWLNRTDTMIQTPGPLPAPQLTSTVLRENSRPMGDQIQEPESEHGSEPDFLHNPQMQISWLGQPKLEDLNRKDRTGMNYMKVRTGVRHAVRGLMEEDAEPIFEDVMMSSRSQLEDMNEEFEDTMVIDLPPSRNRRERAELRPDFFDSAAIIEDDSGFGMPMF

SEQ ID NO: 84624 - protein, 998 aa, Homo sapiens
  Payload ID: 16834
  Gene Symbol: STAG1
  Gene Name: stromal antigen 1
  ENSP ID: ENSP00000404396
MKLMTALVNVALNLSIHQDNTQRQYEAERNKMIGKRANERLELLLQKRKELQENQDEIENMMNSIFKGIFVHRYRDAIAEIRAICIEEIGVWMKMYSDAFLNDSYLKYVGWTLHDRQGEVRLKCLKALQSLYTNRELFPKLELFTNRFKDRIVSMTLDKEYDVAVEAIRLVTLILHGSEEALSNEDCENVYHLVYSAHRPVAVAAGEFLHKKLFSRHDPQAEEALAKRRGRNSPNGNLIRMLVLFFLESELHEHAAYLVDSLWESSQELLKDWECMTELLLEEPVQGEEAMSDRQESALIELMVCTIRQAAEAHPPVGRGTGKRVLTAKERKTQIDDRNKLTEHFIITLPMLLSKYSADAEKVANLLQIPQYFDLEIYSTGRMEKHLDALLKQIKFVVEKHVESDVLEACSKTYSILCSEEYTIQNRVDIARSQLIDEFVDRFNHSVEDLLQEGEEADDDDIYNVLSTLKRLTSFHNAHDLTKWDLFGNCYRLLKTGIEHGAMPEQIVVQALQCSHYSILWQLVKITDGSPSKEDLLVLRKTVKSFLAVCQQCLSNVNTPVKEQAFMLLCDLLMIFSHQLMTGGREGLQPLVFNPDTGLQSELLSFVMDHVFIDQDEENQSMEGDEEDEANKIEALHKRRNLLAAFSKLIIYDIVDMHAAADIFKHYMKLFNELVQEQGPNLDRTSAHVSGIKELARRFALTFGLDQIKTREAVATLHKDGIEFAFKYQNQKGQEYPPPNLAFLEVLSEFSSKLLRQDKKTVHSYLEKFLTEQMMERREDVWLPLISYRNSLVTGGEDDRMSVNSGSSSSKTSSVRNKKGRPPLHKKRVEDESLDNTWLNRTDTMIQTPGPLPAPQLTSTVLRENSRPMGDQIQEPESEHGSEPDFLHNPQMQISWLGQPKLEDLNRKDRTGMNYMKVRTGVRHAVRGLMEEDAEPIFEDVMMSSRSQLEDMNEEFEDTMVIDLPPSRNRRERAELRPDFFDSAAIIEDDSGFGMPMF

SEQ ID NO: 84625 - protein, 161 aa, Homo sapiens
  Payload ID: 16834
  Gene Symbol: STAG1
  Gene Name: stromal antigen 1
  ENSP ID: ENSP00000418472
MITSELPVLQDSTNETTAHSDAGSELEETEVKGKRKRGRPGRPPSTNKKPRKSPGEKSRIEAGIRGAGRGRANGHPQQNGEGEPVTLFEVVKLGKSAMQSLHVVCIHLVGRGERKRSSVYFLEAFGPSIYIPLMGTYHILSPWWMTGLNHINKTGTSHFWI

SEQ ID NO: 84626 - protein, 101 aa, Homo sapiens
  Payload ID: 16834
  Gene Symbol: STAG1
  Gene Name: stromal antigen 1
  ENSP ID: ENSP00000419093
MITSELPVLQDSTNETTAHSDAGSELEETEVKGKRKRGRPGRPPSTNKKPRKSPGEKSRIEAGIRGAGRGRANGHPQQNGEGEPVTLFEVVKLGKSAMQRC

SEQ ID NO: 84627 - protein, 190 aa, Homo sapiens
  Payload ID: 16834
  Gene Symbol: STAG1
  Gene Name: stromal antigen 1
  ENSP ID: ENSP00000419317
  MOD_RES (1)..(1): Any amino acid
XQSLYTNRELFPKLELFTNRFKDRIVSMTLDKEYDVAVEAIRLVTLILQLFSRHDPQAEEALAKRRGRNSPNGNLIRMLVLFFLESELHEHAAYLVDSLWESSQELLKDWECMTELLLEEPVQGEEAMSDRQESALIELMVCTIRQAAEAHPPVGRGTGKRVLTAKERKTQIDDRNKLTEHFIITLPMLL

SEQ ID NO: 84628 - protein, 232 aa, Homo sapiens
  Payload ID: 16834
  Gene Symbol: STAG1
  Gene Name: stromal antigen 1
  ENSP ID: ENSP00000420789
MITSELPVLQDSTNETTAHSDAGSELEETEVKGKRKRGRPGRPPSTNKKPRKSPGEKSRIEAGIRGAGRGRANGHPQQNGEGEPVTLFEVVKLGKSAMQSVVDDWIESYKQDRDIALLDLINFFIQCSGCRGTVRIEMFRNMQNAEIIRKMTEEFDEDSGDYPLTMPGPQWKKFRSNFCEFIGVLIRQCQYSIIYDEYMMDTVISLLTGLSDSQVRAFRHTSTLAGQVLGTR

SEQ ID NO: 84629 - protein, 161 aa, Homo sapiens; identical to SEQ ID NO: 84625
  Payload ID: 16834
  Gene Symbol: STAG1
  Gene Name: stromal antigen 1
  ENSP ID: ENSP00000486745

SEQ ID NO: 84630 - protein, 1268 aa, Homo sapiens
  Payload ID: 16835
  Gene Symbol: STAG2
  Gene Name: stromal antigen 2
  Uniprot ID: Q8N3U4
  ENSP ID: ENSP00000218089
MIAAPEIPTDFNLLQESETHFSSDTDFEDIEGKNQKQGKGKTCKKGKKGPAEKGKGGNGGGKPPSGPNRMNGHHQQNGVENMMLFEVVKMGKSAMQSVVDDWIESYKHDRDIALLDLINFFIQCSGCKGVVTAEMFRHMQNSEIIRKMTEEFDEDSGDYPLTMAGPQWKKFKSSFCEFIGVLVRQCQYSIIYDEYMMDTVISLLTGLSDSQVRAFRHTSTLAAMKLMTALVNVALNLSINMDNTQRQYEAERNKMIGKRANERLELLLQKRKELQENQDEIENMMNAIFKGVFVHRYRDAIAEIRAICIEEIGIWMKMYSDAFLNDSYLKYVGWTMHDKQGEVRLKCLTALQGLYYNKELNSKLELFTSRFKDRIVSMTLDKEYDVAVQAIKLLTLVLQSSEEVLTAEDCENVYHLVYSAHRPVAVAAGEFLYKKLFSRRDPEEDGMMKRRGRQGPNANLVKTLVFFFLESELHEHAAYLVDSMWDCATELLKDWECMNSLLLEEPLSGEEALTDRQESALIEIMLCTIRQAAECHPPVGRGTGKRVLTAKEKKTQLDDRTKITELFAVALPQLLAKYSVDAEKVTNLLQLPQYFDLEIYTTGRLEKHLDALLRQIRNIVEKHTDTDVLEACSKTYHALCNEEFTIFNRVDISRSQLIDELADKFNRLLEDFLQEGEEPDEDDAYQVLSTLKRITAFHNAHDLSKWDLFACNYKLLKTGIENGDMPEQIVIHALQCTHYVILWQLAKITESSSTKEDLLRLKKQMRVFCQICQHYLTNVNTTVKEQAFTILCDILMIFSHQIMSGGRDMLEPLVYTPDSSLQSELLSFILDHVFIEQDDDNNSADGQQEDEASKIEALHKRRNLLAAFCKLIVYTVVEMNTAADIFKQYMKYYNDYGDIIKETMSKTRQIDKIQCAKTLILSLQQLFNEMIQENGYNFDRSSSTFSGIKELARRFALTFGLDQLKTREAIAMLHKDGIEFAFKEPNPQGESHPPLNLAFLDILSEFSSKLLRQDKRTVYVYLEKFMTFQMSLRREDVWLPLMSYRNSLLAGGDDDTMSVISGISSRGSTVRSKKSKPSTGKRKVVEGMQLSLTEESSSSDSMWLSREQTLHTPVMMQTPQLTSTIMREPKRLRPEDSFMSVYPMQTEHHQTPLDYNTQVTWMLAQRQQEEARQQQERAAMSYVKLRTNLQHAIRRGTSLMEDDEEPIVEDVMMSSEGRIEDLNEGMDFDTMDIDLPPSKNRRERTELKPDFFDPASIMDESVLGVSMF

SEQ ID NO: 84631 - protein, 1231 aa, Homo sapiens
  Payload ID: 16835
  Gene Symbol: STAG2
  Gene Name: stromal antigen 2
  Uniprot ID: Q8N3U4
  ENSP ID: ENSP00000360186
MIAAPEIPTDFNLLQESETHFSSDTDFEDIEGKNQKQGKGKTCKKGKKGPAEKGKGGNGGGKPPSGPNRMNGHHQQNGVENMMLFEVVKMGKSAMQSVVDDWIESYKHDRDIALLDLINFFIQCSGCKGVVTAEMFRHMQNSEIIRKMTEEFDEDSGDYPLTMAGPQWKKFKSSFCEFIGVLVRQCQYSIIYDEYMMDTVISLLTGLSDSQVRAFRHTSTLAAMKLMTALVNVALNLSINMDNTQRQYEAERNKMIGKRANERLELLLQKRKELQENQDEIENMMNAIFKGVFVHRYRDAIAEIRAICIEEIGIWMKMYSDAFLNDSYLKYVGWTMHDKQGEVRLKCLTALQGLYYNKELNSKLELFTSRFKDRIVSMTLDKEYDVAVQAIKLLTLVLQSSEEVLTAEDCENVYHLVYSAHRPVAVAAGEFLYKKLFSRRDPEEDGMMKRRGRQGPNANLVKTLVFFFLESELHEHAAYLVDSMWDCATELLKDWECMNSLLLEEPLSGEEALTDRQESALIEIMLCTIRQAAECHPPVGRGTGKRVLTAKEKKTQLDDRTKITELFAVALPQLLAKYSVDAEKVTNLLQLPQYFDLEIYTTGRLEKHLDALLRQIRNIVEKHTDTDVLEACSKTYHALCNEEFTIFNRVDISRSQLIDELADKFNRLLEDFLQEGEEPDEDDAYQVLSTLKRITAFHNAHDLSKWDLFACNYKLLKTGIENGDMPEQIVIHALQCTHYVILWQLAKITESSSTKEDLLRLKKQMRVFCQICQHYLTNVNTTVKEQAFTILCDILMIFSHQIMSGGRDMLEPLVYTPDSSLQSELLSFILDHVFIEQDDDNNSADGQQEDEASKIEALHKRRNLLAAFCKLIVYTVVEMNTAADIFKQYMKYYNDYGDIIKETMSKTRQIDKIQCAKTLILSLQQLFNEMIQENGYNFDRSSSTFSGIKELARRFALTFGLDQLKTREAIAMLHKDGIEFAFKEPNPQGESHPPLNLAFLDILSEFSSKLLRQDKRTVYVYLEKFMTFQMSLRREDVWLPLMSYRNSLLAGGDDDTMSVISGISSRGSTVRSKKSKPSTGKRKVVEGMQLSLTEESSSSDSMWLSREQTLHTPVMMQTPQLTSTIMREPKRLRPEDSFMSVYPMQTEHHQTPLDYNRRGTSLMEDDEEPIVEDVMMSSEGRIEDLNEGMDFDTMDIDLPPSKNRRERTELKPDFFDPASIMDESVLGVSMF

SEQ ID NO: 84632 - protein, 1268 aa, Homo sapiens; identical to SEQ ID NO: 84630
  Payload ID: 16835
  Gene Symbol: STAG2
  Gene Name: stromal antigen 2
  Uniprot ID: Q8N3U4
  ENSP ID: ENSP00000360187

SEQ ID NO: 84633 - protein, 1231 aa, Homo sapiens; identical to SEQ ID NO: 84631
  Payload ID: 16835
  Gene Symbol: STAG2
  Gene Name: stromal antigen 2
  Uniprot ID: Q8N3U4
  ENSP ID: ENSP00000360199

SEQ ID NO: 84634 - protein, 1231 aa, Homo sapiens; identical to SEQ ID NO: 84631
  Payload ID: 16835
  Gene Symbol: STAG2
  Gene Name: stromal antigen 2
  Uniprot ID: Q8N3U4
  ENSP ID: ENSP00000360202

SEQ ID NO: 84635 - protein, 70 aa, Homo sapiens
  Payload ID: 16835
  Gene Symbol: STAG2
  Gene Name: stromal antigen 2
  ENSP ID: ENSP00000377987
MIAAPEIPTDFNLLQESETHFSSDTDFEDIEGKNQKQGKGKTCKKGKKGPAEKGKGGNGGGKPPSGPNRM

SEQ ID NO: 84636 - protein, 115 aa, Homo sapiens
  Payload ID: 16835
  Gene Symbol: STAG2
  Gene Name: stromal antigen 2
  ENSP ID: ENSP00000377988
MIAAPEIPTDFNLLQESETHFSSDTDFEDIEGKNQKQGKGKTCKKGKKGPAEKGKGGNGGGKPPSGPNRMNGHHQQNGVENMMLFEVVKMGKSAMQSVVDDWIESYKHDRDIALL

SEQ ID NO: 84637 - protein, 207 aa, Homo sapiens
  Payload ID: 16835
  Gene Symbol: STAG2
  Gene Name: stromal antigen 2
  ENSP ID: ENSP00000392118
MIAAPEIPTDFNLLQESETHFSSDTDFEDIEGKNQKQGKGKTCKKGKKGPAEKGKGGNGGGKPPSGPNRMNGHHQQNGVENMMLFEVVKMGKSAMQSVVDDWIESYKHDRDIALLDLINFFIQCSGCKGVVTAEMFRHMQNSEIIRKMTEEFDEDSGDYPLTMAGPQWKKFKSSFCEFIGVLVRQCQYSIIYDEYMMDTVISLLTGL

SEQ ID NO: 84638 - protein, 548 aa, Homo sapiens
  Payload ID: 16835
  Gene Symbol: STAG2
  Gene Name: stromal antigen 2
  ENSP ID: ENSP00000397265
MIAAPEIPTDFNLLQESETHFSSDTDFEDIEGKNQKQGKGKTCKKGKKGPAEKGKGGNGGGKPPSGPNRMNGHHQQNGVENMMLFEVVKMGKSAMQSVVDDWIESYKHDRDIALLDLINFFIQCSGCKGVVTAEMFRHMQNSEIIRKMTEEFDEDSGDYPLTMAGPQWKKFKSSFCEFIGVLVRQCQYSIIYDEYMMDTVISLLTGLSDSQVRAFRHTSTLAAMKLMTALVNVALNLSINMDNTQRQYEAERNKMIGKRANERLELLLQKRKELQENQDEIENMMNAIFKGVFVHRYRDAIAEIRAICIEEIGIWMKMYSDAFLNDSYLKYVGWTMHDKQGEVRLKCLTALQGLYYNKELNSKLELFTSRFKDRIVSMTLDKEYDVAVQAIKLLTLVLQSSEEVLTAEDCENVYHLVYSAHRPVAVAAGEFLYKKLFSRRDPEEDGMMKRRGRQGPNANLVKTLVFFFLESELHEHAAYLVDSMWDCATELLKDWECMNSLLLEEPLSGEEALTDRQESALIEIMLCTIRQAAECHPPVGRGTGKRVL

SEQ ID NO: 84639 - protein, 58 aa, Homo sapiens
  Payload ID: 16835
  Gene Symbol: STAG2
  Gene Name: stromal antigen 2
  ENSP ID: ENSP00000401309
MIAAPEIPTDFNLLQESETHFSSDTDFEDIEGKNQKQGKGKHLFFKMNFGFILSHDIL

SEQ ID NO: 84640 - protein, 40 aa, Homo sapiens
  Payload ID: 16835
  Gene Symbol: STAG2
  Gene Name: stromal antigen 2
  ENSP ID: ENSP00000405555
MIAAPEIPTDFNLLQESETHFSSDTDFEDIEGKNQKQGKG

SEQ ID NO: 84641 - protein, 154 aa, Homo sapiens
  Payload ID: 16835
  Gene Symbol: STAG2
  Gene Name: stromal antigen 2
  ENSP ID: ENSP00000405874
MIAAPEIPTDFNLLQESETHFSSDTDFEDIEGKNQKQGKGKTCKKGKKGPAEKGKGGNGGGKPPSGPNRMNGHHQQNGVENMMLFEVVKMGKSAMQSVVDDWIESYKHDRDIALLDLINFFIQCSGCKGVVTAEMFRHMQNSEIIRKMTEEFDE

SEQ ID NO: 84642 - protein, 169 aa, Homo sapiens
  Payload ID: 16835
  Gene Symbol: STAG2
  Gene Name: stromal antigen 2
  ENSP ID: ENSP00000415103
MIAAPEIPTDFNLLQESETHFSSDTDFEDIEGKNQKQGKGKTCKKGKKGPAEKGKGGNGGGKPPSGPNRMNGHHQQNGVENMMLFEVVKMGKSAMQSVVDDWIESYKHDRDIALLDLINFFIQCSGCKGVVTAEMFRHMQNSEIIRKMTEEFDEDSGDYPLTMAGPQWK

SEQ ID NO: 84643 - protein, 1225 aa, Homo sapiens
  Payload ID: 16836
  Gene Symbol: STAG3
  Gene Name: stromal antigen 3
  Uniprot ID: Q9UJ98
  ENSP ID: ENSP00000319318
MSSPLQRAVGDTKRALSASSSSSASLPFDDRDSNHTSEGNGDSLLADEDTDFEDSLNRNVKKRAAKRPPKTTPVAKHPKKGSRVVHRHSRKQSEPPANDLFNAVKAAKSDMQSLVDEWLDSYKQDQDAGFLELVNFFIQSCGCKGIVTPEMFKKMSNSEIIQHLTEQFNEDSGDYPLIAPGPSWKKFQGSFCEFVRTLVCQCQYSLLYDGFPMDDLISLLTGLSDSQVRAFRHTSTLAAMKLMTSLVKVALQLSVHQDNNQRQYEAERNKGPGQRAPERLESLLEKRKELQEHQEEIEGMMNALFRGVFVHRYRDVLPEIRAICIEEIGCWMQSYSTSFLTDSYLKYIGWTLHDKHREVRLKCVKALKGLYGNRDLTTRLELFTSRFKDRMVSMVMDREYDVAVEAVRLLILILKNMEGVLTDADCESVYPVVYASHRGLASAAGEFLYWKLFYPECEIRMMGGREQRQSPGAQRTFFQLLLSFFVESELHDHAAYLVDSLWDCAGARLKDWEGLTSLLLEKDQNLGDVQESTLIEILVSSARQASEGHPPVGRVTGRKGLTSKERKTQADDRVKLTEHLIPLLPQLLAKFSADAEKVTPLLQLLSCFDLHIYCTGRLEKHLELFLQQLQEVVVKHAEPAVLEAGAHALYLLCNPEFTFFSRADFARSQLVDLLTDRFQQELEELLQSSFLDEDEVYNLAATLKRLSAFYNTHDLTRWELYEPCCQLLQKAVDTGEVPHQVILPALTLVYFSILWTLTHISKSDASQKQLSSLRDRMVAFCELCQSCLSDVDTEIQEQAFVLLSDLLLIFSPQMIVGGRDFLRPLVFFPEATLQSELASFLMDHVFIQPGDLGSGDSQEDHLQIERLHQRRRLLAGFCKLLLYGVLEMDAASDVFKHYNKFYNDYGDIIKETLTRARQIDRSHCSRILLLSLKQLYTELLQEHGPQGLNELPAFIEMRDLARRFALSFGPQQLQNRDLVVMLHKEGIQFSLSELPPAGSSNQPPNLAFLELLSEFSPRLFHQDKQLLLSYLEKCLQHVSQAPGHPWGPVTTYCHSLSPVENTAETSPQVLPSSKRRRVEGPAKPNREDVSSSQEESLQLNSIPPTPTLTSTAVKSRQPLWGLKEMEEEDGSELDFAQGQPVAGTERSRFLGPQYFQTPHNPSGPGLGNQLMRLSLMEEDEEEELEIQDESNEERQDTDMQASSYSSTSERGLDLLDSTELDIEDF

SEQ ID NO: 84644 - protein, 1167 aa, Homo sapiens
  Payload ID: 16836
  Gene Symbol: STAG3
  Gene Name: stromal antigen 3
  Uniprot ID: Q9UJ98
  ENSP ID: ENSP00000377586
MSSPLQRAVGDTKRALSASSSSSASLPFDDRDSNHTSEGNGDSLLADEDTDFEDSLNRNVKKRAAKRPPKTTPVAKHPKKGSRVVHRHSRKQSEPPANDLFNAVKAAKSDMQDSGDYPLIAPGPSWKKFQGSFCEFVRTLVCQCQYSLLYDGFPMDDLISLLTGLSDSQVRAFRHTSTLAAMKLMTSLVKVALQLSVHQDNNQRQYEAERNKGPGQRAPERLESLLEKRKELQEHQEEIEGMMNALFRGVFVHRYRDVLPEIRAICIEEIGCWMQSYSTSFLTDSYLKYIGWTLHDKHREVRLKCVKALKGLYGNRDLTTRLELFTSRFKDRMVSMVMDREYDVAVEAVRLLILILKNMEGVLTDADCESVYPVVYASHRGLASAAGEFLYWKLFYPECEIRMMGGREQRQSPGAQRTFFQLLLSFFVESELHDHAAYLVDSLWDCAGARLKDWEGLTSLLLEKDQNLGDVQESTLIEILVSSARQASEGHPPVGRVTGRKGLTSKERKTQADDRVKLTEHLIPLLPQLLAKFSADAEKVTPLLQLLSCFDLHIYCTGRLEKHLELFLQQLQEVVVKHAEPAVLEAGAHALYLLCNPEFTFFSRADFARSQLVDLLTDRFQQELEELLQSSFLDEDEVYNLAATLKRLSAFYNTHDLTRWELYEPCCQLLQKAVDTGEVPHQVILPALTLVYFSILWTLTHISKSDASQKQLSSLRDRMVAFCELCQSCLSDVDTEIQEQAFVLLSDLLLIFSPQMIVGGRDFLRPLVFFPEATLQSELASFLMDHVFIQPGDLGSGDSQEDHLQIERLHQRRRLLAGFCKLLLYGVLEMDAASDVFKHYNKFYNDYGDIIKETLTRARQIDRSHCSRILLLSLKQLYTELLQEHGPQGLNELPAFIEMRDLARRFALSFGPQQLQNRDLVVMLHKEGIQFSLSELPPAGSSNQPPNLAFLELLSEFSPRLFHQDKQLLLSYLEKCLQHVSQAPGHPWGPVTTYCHSLSPVENTAETSPQVLPSSKRRRVEGPAKPNREDVSSSQEESLQLNSIPPTPTLTSTAVKSRQPLWGLKEMEEEDGSELDFAQGQPVAGTERSRFLGPQYFQTPHNPSGPGLGNQLMRLSLMEEDEEEELEIQDESNEERQDTDMQASSYSSTSERGLDLLDSTELDIEDF

SEQ ID NO: 84645 - protein, 172 aa, Homo sapiens
  Payload ID: 16836
  Gene Symbol: STAG3
  Gene Name: stromal antigen 3
  ENSP ID: ENSP00000393790
PSSKRRRVEGPAKPNREDVSSSQEESLQLNSIPPTPTLTSTAVKSRQPLWGLKEMEEEDGSELDFAQGSQPVAGTERSRFLGPQYFQTPHNPSGPGLGNQLMRLSLMEEDEEEELEIQDESNEERQDTDMQASSYSSTSERGLDLLDSTELDIEITESLPLLGKSPHPYNSR

SEQ ID NO: 84646 - protein, 184 aa, Homo sapiens
  Payload ID: 16836
  Gene Symbol: STAG3
  Gene Name: stromal antigen 3
  ENSP ID: ENSP00000395039
GHPWGPVTTYCHSLSPVENTAETSPQVLPSSKRRRVEGPAKPNREDVSSSQEESLQLNSIPPTPTLTSTAVKSRQPLWGLKEMEEEDGSELDFAQGSQPVAGTERSRFLGPQYFQTPHNPSGPGLGNQLMRLSLMEEDEEEELEIQDESNEERQDTDMQASSYSSTSERGLDLLDSTELDIEDF

SEQ ID NO: 84647 - protein, 188 aa, Homo sapiens
  Payload ID: 16836
  Gene Symbol: STAG3
  Gene Name: stromal antigen 3
  ENSP ID: ENSP00000397067
MSSPLQRAVGDTKRALSASSSSSASLPFDDRDSNHTSEGNGDSLLADEDTDFEDSLNRNVKKRAAKRPPKTTPVAKHPKKGSRVVHRHSRKQSEPPANDLFNAVKAAKSDMQDSGDYPLIAPGPSWKKFQGSFCEFVRTLVCQCQYSLLYDGFPMDDLISLLTGLSDSQVRAFRHTSTLAAMKLMTSL

SEQ ID NO: 84648 - protein, 1225 aa, Homo sapiens; identical to SEQ ID NO: 84643
  Payload ID: 16836
  Gene Symbol: STAG3
  Gene Name: stromal antigen 3
  Uniprot ID: Q9UJ98
  ENSP ID: ENSP00000400359

SEQ ID NO: 84649 - protein, 112 aa, Homo sapiens
  Payload ID: 16836
  Gene Symbol: STAG3
  Gene Name: stromal antigen 3
  ENSP ID: ENSP00000407884
MSSPLQRAVGDTKRALSASSSSSASLPFDDRDSNHTSEGNGDSLLADEDTDFEDSLNRNVKKRAAKRPPKTTPVAKHPKKGSRVVHRHSRKQSEPPANDLFNAVKAAKSDMQ

SEQ ID NO: 84650 - protein, 144 aa, Homo sapiens
  Payload ID: 16836
  Gene Symbol: STAG3
  Gene Name: stromal antigen 3
  ENSP ID: ENSP00000409283
MSSPLQRAVGDTKRALSASSSSSASLPFDDRDSNHTSEGNGDSLLADEDTDFEDSLNRNVKKRAAKRPPKTTPVAKHPKKGSRVVHRHSRKQSEPPANDLFNAVKAAKSDMQSLVDEWLDSYKQDQDAGFLELVNFFIQSCGCK

SEQ ID NO: 84651 - protein, 1226 aa, Homo sapiens
  Payload ID: 16836
  Gene Symbol: STAG3
  Gene Name: stromal antigen 3
  ENSP ID: ENSP00000477973
MSSPLQRAVGDTKRALSASSSSSASLPFDDRDSNHTSEGNGDSLLADEDTDFEDSLNRNVKKRAAKRPPKTTPVAKHPKKGSRVVHRHSRKQSEPPANDLFNAVKAAKSDMQSLVDEWLDSYKQDQDAGFLELVNFFIQSCGCKGIVTPEMFKKMSNSEIIQHLTEQFNEDSGDYPLIAPGPSWKKFQGSFCEFVRTLVCQCQYSLLYDGFPMDDLISLLTGLSDSQVRAFRHTSTLAAMKLMTSLVKVALQLSVHQDNNQRQYEAERNKGPGQRAPERLESLLEKRKELQEHQEEIEGMMNALFRGVFVHRYRDVLPEIRAICIEEIGCWMQSYSTSFLTDSYLKYIGWTLHDKHREVRLKCVKALKGLYGNRDLTTRLELFTSRFKDRMVSMVMDREYDVAVEAVRLLILILKNMEGVLTDADCESVYPVVYASHRGLASAAGEFLYWKLFYPECEIRMMGGREQRQSPGAQRTFFQLLLSFFVESELHDHAAYLVDSLWDCAGARLKDWEGLTSLLLEKDQNLGDVQESTLIEILVSSARQASEGHPPVGRVTGRKGLTSKERKTQADDRVKLTEHLIPLLPQLLAKFSADAEKVTPLLQLLSCFDLHIYCTGRLEKHLELFLQQLQEVVVKHAEPAVLEAGAHALYLLCNPEFTFFSRADFARSQLVDLLTDRFQQELEELLQSSFLDEDEVYNLAATLKRLSAFYNTHDLTRWELYEPCCQLLQKAVDTGEVPHQVILPALTLVYFSILWTLTHISKSDASQKQLSSLRDRMVAFCELCQSCLSDVDTEIQEQAFVLLSDLLLIFSPQMIVGGRDFLRPLVFFPEATLQSELASFLMDHVFIQPGDLGSGDSQEDHLQIERLHQRRRLLAGFCKLLLYGVLEMDAASDVFKHYNKFYNDYGDIIKETLTRARQIDRSHCSRILLLSLKQLYTELLQEHGPQGLNELPAFIEMRDLARRFALSFGPQQLQNRDLVVMLHKEGIQFSLSELPPAGSSNQPPNLAFLELLSEFSPRLFHQDKQLLLSYLEKCLQHVSQAPGHPWGPVTTYCHSLSPVENTAETSPQVLPSSKRRRVEGPAKPNREDVSSSQEESLQLNSIPPTPTLTSTAVKSRQPLWGLKEMEEEDGSELDFAQGSQPVAGTERSRFLGPQYFQTPHNPSGPGLGNQLMRLSLMEEDEEEELEIQDESNEERQDTDMQASSYSSTSERGLDLLDSTELDIEDF

SEQ ID NO: 84652 - protein, 1167 aa, Homo sapiens; identical to SEQ ID NO: 84644
  Payload ID: 16836
  Gene Symbol: STAG3
  Gene Name: stromal antigen 3
  Uniprot ID: Q9UJ98
  ENSP ID: ENSP00000484098

SEQ ID NO: 84653 - protein, 348 aa, Homo sapiens
  Payload ID: 16837
  Gene Symbol: SDF4
  Gene Name: stromal cell derived factor 4
  Uniprot ID: Q9BRK5
  ENSP ID: ENSP00000263741
MVWPWVAMASRWGPLIGLAPCCLWLLGAVLLMDASARPANHSSTRERVANREENEILPPDHLNGVKLEMDGHLNRGFHQEVFLGKDLGGFDEDAEPRRSRRKLMVIFSKVDVNTDRKISAKEMQRWIMEKTAEHFQEAMEESKTHFRAVDPDGDGHVSWDEYKVKFLASKGHSEKEVADAIRLNEELKVDEETQEVLENLKDRWYQADSPPADLLLTEEEFLSFLHPEHSRGMLRFMVKEIVRDLDQDGDKQLSVPEFISLPVGTVENQQGQDIDDNWVKDRKKEFEELIDSNHDGIVTAEELENVPTLPLQPIGTLNSHFVRLAAELGGGKATLTCAPLARRATWTP

SEQ ID NO: 84654 - protein, 362 aa, Homo sapiens
  Payload ID: 16837
  Gene Symbol: SDF4
  Gene Name: stromal cell derived factor 4
  Uniprot ID: Q9BRK5
  ENSP ID: ENSP00000353094
MVWPWVAMASRWGPLIGLAPCCLWLLGAVLLMDASARPANHSSTRERVANREENEILPPDHLNGVKLEMDGHLNRGFHQEVFLGKDLGGFDEDAEPRRSRRKLMVIFSKVDVNTDRKISAKEMQRWIMEKTAEHFQEAMEESKTHFRAVDPDGDGHVSWDEYKVKFLASKGHSEKEVADAIRLNEELKVDEETQEVLENLKDRWYQADSPPADLLLTEEEFLSFLHPEHSRGMLRFMVKEIVRDLDQDGDKQLSVPEFISLPVGTVENQQGQDIDDNWVKDRKKEFEELIDSNHDGIVTAEELESYMDPMNEYNALNEAKQMIAVADENQNHHLEPEEVLKYSEFFTGSKLVDYARSVHEEF

SEQ ID NO: 84655 - protein, 243 aa, Homo sapiens
  Payload ID: 16837
  Gene Symbol: SDF4
  Gene Name: stromal cell derived factor 4
  ENSP ID: ENSP00000384207
  MOD_RES (1)..(1): Any amino acid
XLEMDGHLNRGFHQEVFLGKDLGGFDEDAEPRRSRRKLMVIFSKVDVNTDRKISAKEMQRWIMEKTAEHFQEAMEESKTHFRAVDPDGDGHVSWDEYKVKFLASKGHSEKEVADAIRLNEELKVDEESSTSRNFLDLRAGVCRPRYPQAAPLSAQEVLENLKDRWYQADSPPADLLLTEEEFLSFLHPEHSRGMLRFMVKEIVRDLDQDGDKQLSVPEFISLPVGTVENQQGQDIDDNWVKDR

SEQ ID NO: 84656 - protein, 254 aa, Homo sapiens
  Payload ID: 16837
  Gene Symbol: SDF4
  Gene Name: stromal cell derived factor 4
  ENSP ID: ENSP00000435962
MVWPWVAMASRWGPLIGLAPCCLWLLGAVLLMDASARPANHSSTRERVANREENEILPPDHLNGVKLEMDGHLNRGFHQEVFLGKDLGGFDEDAEPRRSRRKLMVIFSKVDVNTDRKISAKEMQRWIMEKTAEHFQEAMEESKTHFRAVDPDGDGHVSWDEYKVKFLASKGHSEKEVADAIRLNEELKVDEESCAPLSTGSPGEPEGPLVPGGQPPCRPAADGGGVPVVPPPRAQPGNAQVHGEGDRPGPGPGR

SEQ ID NO: 84657 - protein, 211 aa, Homo sapiens
  Payload ID: 16838
  Gene Symbol: SDF2
  Gene Name: stromal cell-derived factor 2
  Uniprot ID: Q99470
  ENSP ID: ENSP00000247020
MAVVPLLLLGGLWSAVGASSLGVVTCGSVVKLLNTRHNVRLHSHDVRYGSGSGQQSVTGVTSVDDSNSYWRIRGKSATVCERGTPIKCGQPIRLTHVNTGRNLHSHHFTSPLSGNQEVSAFGEEGEGDYLDDWTVLCNGPYWVRDGEVRFKHSSTEVLLSVTGEQYGRPISGQKEVHGMAQPSQNNYWKAMEGIFMKPSELLKAEAHHAEL

SEQ ID NO: 84658 - protein, 50 aa, Homo sapiens
  Payload ID: 16838
  Gene Symbol: SDF2
  Gene Name: stromal cell-derived factor 2
  ENSP ID: ENSP00000466083
  MOD_RES (1)..(1): Any amino acid
XRNLHSHHFTSPLSGNQENNMVDLSVGKKRCMAWPSQVRTTTGKPWKASS

SEQ ID NO: 84659 - protein, 104 aa, Homo sapiens
  Payload ID: 16838
  Gene Symbol: SDF2
  Gene Name: stromal cell-derived factor 2
  ENSP ID: ENSP00000466102
SLGVVTCGSVVKLLNTRHNVRLHSHDVRYGSGSGQQSVTGVTSVDDSNSYWRIRGKSATVCERGTPIKCGQPIRLTHVNTGRNLHSHHFTSPLSGNQLLCKVIL

SEQ ID NO: 84660 - protein, 221 aa, Homo sapiens
  Payload ID: 16839
  Gene Symbol: SDF2L1
  Gene Name: stromal cell-derived factor 2-like 1
  Uniprot ID: Q9HCN8
  ENSP ID: ENSP00000248958
MWSAGRGGAAWPVLLGLLLALLVPGGGAAKTGAELVTCGSVLKLLNTHHRVRLHSHDIKYGSGSGQQSVTGVEASDDANSYWRIRGGSEGGCPRGSPVRCGQAVRLTHVLTGKNLHTHHFPSPLSNNQEVSAFGEDGEGDDLDLWTVRCSGQHWEREAAVRFQHVGTSVFLSVTGEQYGSPIRGQHEVHGMPSANTHNTWKAMEGIFIKPSVEPSAGHDEL

SEQ ID NO: 84661 - protein, 685 aa, Homo sapiens
  Payload ID: 16840
  Gene Symbol: STIM1
  Gene Name: stromal interaction molecule 1
  Uniprot ID: Q13586
  ENSP ID: ENSP00000300737
MDVCVRLALWLLWGLLLHQGQSLSHSHSEKATGTSSGANSEESTAAEFCRIDKPLCHSEDEKLSFEAVRNIHKLMDDDANGDVDVEESDEFLREDLNYHDPTVKHSTFHGEDKLISVEDLWKAWKSSEVYNWTVDEVVQWLITYVELPQYEETFRKLQLSGHAMPRLAVTNTTMTGTVLKMTDRSHRQKLQLKALDTVLFGPPLLTRHNHLKDFMLVVSIVIGVGGCWFAYIQNRYSKEHMKKMMKDLEGLHRAEQSLHDLQERLHKAQEEHRTVEVEKVHLEKKLRDEINLAKQEAQRLKELREGTENERSRQKYAEEELEQVREALRKAEKELESHSSWYAPEALQKWLQLTHEVEVQYYNIKKQNAEKQLLVAKEGAEKIKKKRNTLFGTFHVAHSSSLDDVDHKILTAKQALSEVTAALRERLHRWQQIEILCGFQIVNNPGIHSLVAALNIDPSWMGSTRPNPAHFIMTDDVDDMDEEIVSPLSMQSPSLQSSVRQRLTEPQHGLGSQRDLTHSDSESSLHMSDRQRVAPKPPQMSRAADEALNAMTSNGSHRLIEGVHPGSLVEKLPDSPALAKKALLALNHGLDKAHSLMELSPSAPPGGSPHLDSSRSHSPSSPDPDTPSPVGDSRALQASRNTRIPHLAGKKAVAEEDNGSIGEETDSSPGRKKFPLKIFKKPLKK

SEQ ID NO: 84662 - protein, 82 aa, Homo sapiens
  Payload ID: 16840
  Gene Symbol: STIM1
  Gene Name: stromal interaction molecule 1
  ENSP ID: ENSP00000431191
MDDDANGDVDVEESDEFLREDLNYHDPTVKHSTFHGEDKLISVEDLWKAWKSSEVYNWTVDEVVQWLITYVELPQYEETFRK

SEQ ID NO: 84663 - protein, 80 aa, Homo sapiens
  Payload ID: 16840
  Gene Symbol: STIM1
  Gene Name: stromal interaction molecule 1
  ENSP ID: ENSP00000431878
MDDDANGDVDVEESDEFLREDLNYHDPTVKHSTFHGEDKLISVEDLWKAWKSSEVYNWTVDEVVQWLITYVELPQYEETF

SEQ ID NO: 84664 - protein, 110 aa, Homo sapiens
  Payload ID: 16840
  Gene Symbol: STIM1
  Gene Name: stromal interaction molecule 1
  ENSP ID: ENSP00000432210
MDDDANGDVDVEESDEFLREDLNYHDPTVKHSTFHGEDKLISVEDLWKAWKSSEVYNWTVDEVVQWLITYVELPQYEETFRKLQLSGHAMPRLAVTNTTMTGTVLKMTDR

SEQ ID NO: 84665 - protein, 117 aa, Homo sapiens
  Payload ID: 16840
  Gene Symbol: STIM1
  Gene Name: stromal interaction molecule 1
  ENSP ID: ENSP00000432378
MDDDANGDVDVEESDEFLREDLNYHDPTVKHSTFHGEDKLISVEDLWKAWKSSEVYNWTVDEVVQWLITYVELPQYEETFRKLQLSGHAMPRLAVTNTTMTGTVLKMTDRSHRQKLQ

SEQ ID NO: 84666 - protein, 67 aa, Homo sapiens
  Payload ID: 16840
  Gene Symbol: STIM1
  Gene Name: stromal interaction molecule 1
  ENSP ID: ENSP00000432383
MDDDANGDVDVEESDEFLREDLNYHDPTVKHSTFHGEDKLISVEDLWKAWKSSEVYNWTVDEVVQWL

SEQ ID NO: 84667 - protein, 405 aa, Homo sapiens
  Payload ID: 16840
  Gene Symbol: STIM1
  Gene Name: stromal interaction molecule 1
  ENSP ID: ENSP00000433266
  MOD_RES (1)..(1): Any amino acid
XEHRTVEVEKVHLEKKLRDEINLAKQEAQRLKELREGTENERSRQKYAEEELEQVREALRKAEKELESHSSWYAPEALQKWLQLTHEVEVQYYNIKKQNAEKQLLVAKEGAEKIKKKRNTLFGTFHVAHSSSLDDVDHKILTAKQALSEVTAALRERLHRWQQIEILCGFQIVNNPGIHSLVAALNIDPSWMGSTRPNPAHFIMTDDVDDMDEEIVSPLSMQYAAWLMGRRFSDRSLCSTSAGSDDQSLWKYPAPSLQSSVRQRLTEPQHGLGSQRDLTHSDSESSLHMSDRQRVAPKPPQMSRAADEALNAMTSNGSHRLIEGVHPGSLVEKLPDSPALAKKALLALNHGLDKAHSLMELSPSAPPGGSPHLDSSRSHSPSSPDPDTPSPVGDSRALQASRNTR

SEQ ID NO: 84668 - protein, 139 aa, Homo sapiens
  Payload ID: 16840
  Gene Symbol: STIM1
  Gene Name: stromal interaction molecule 1
  ENSP ID: ENSP00000433949
MDDDANGDVDVEESDEFLREDLNYHDPTVKHSTFHGEDKLISVEDLWKAWKSSEVYNWTVDEVVQWLITYVELPQYEETFRKLQLSGHAMPRLAVTNTTMTGTVLKMTDRSHRQKLQLKALDTVLFGPPLLTRHNHLKD

SEQ ID NO: 84669 - protein, 54 aa, Homo sapiens
  Payload ID: 16840
  Gene Symbol: STIM1
  Gene Name: stromal interaction molecule 1
  ENSP ID: ENSP00000434200
MDDDANGDVDVEESDEFLREDLNYHDPTVKHSTFHGEDKLISVEDLWKAWKSSE

SEQ ID NO: 84670 - protein, 512 aa, Homo sapiens
  Payload ID: 16840
  Gene Symbol: STIM1
  Gene Name: stromal interaction molecule 1
  ENSP ID: ENSP00000434767
MTGTVLKMTDRSHRQKLQLKALDTVLFGPPLLTRHNHLKDFMLVVSIVIGVGGCWFAYIQNRYSKEHMKKMMKDLEGLHRAEQSLHDLQERLHKAQEEHRTVEVEKVHLEKKLRDEINLAKQEAQRLKELREGTENERSRQKYAEEELEQVREALRKAEKELESHSSWYAPEALQKWLQLTHEVEVQYYNIKKQNAEKQLLVAKEGAEKIKKKRNTLFGTFHVAHSSSLDDVDHKILTAKQALSEVTAALRERLHRWQQIEILCGFQIVNNPGIHSLVAALNIDPSWMGSTRPNPAHFIMTDDVDDMDEEIVSPLSMQSPSLQSSVRQRLTEPQHGLGSQRDLTHSDSESSLHMSDRQRVAPKPPQMSRAADEALNAMTSNGSHRLIEGVHPGSLVEKLPDSPALAKKALLALNHGLDKAHSLMELSPSAPPGGSPHLDSSRSHSPSSPDPDTPSPVGDSRALQASRNTRIPHLAGKKAVAEEDNGSIGEETDSSPGRKKFPLKIFKKPLKK

SEQ ID NO: 84671 - protein, 132 aa, Homo sapiens
  Payload ID: 16840
  Gene Symbol: STIM1
  Gene Name: stromal interaction molecule 1
  ENSP ID: ENSP00000434848
MDDDANGDVDVEESDEFLREDLNYHDPTVKHSTFHGEDKLISVEDLWKAWKSSEVYNWTVDEVVQWLITYVELPQYEETFRKLQLSGHAMPRLAVTNTTMTGTVLKMTDRSHRQKLQLKALDTVLFGPPLCE

SEQ ID NO: 84672 - protein, 540 aa, Homo sapiens
  Payload ID: 16840
  Gene Symbol: STIM1
  Gene Name: stromal interaction molecule 1
  Uniprot ID: Q13586
  ENSP ID: ENSP00000436208
MDVCVRLALWLLWGLLLHQGQSLSHSHSEKATGTSSGANSEESTAAEFCRIDKPLCHSEDEKLSFEAVRNIHKLMDDDANGDVDVEESDEFLREDLNYHDPTVKHSTFHGEDKLISVEDLWKAWKSSEVYNWTVDEVVQWLITYVELPQYEETFRKLQLSGHAMPRLAVTNTTMTGTVLKMTDRSHRQKLQLKALDTVLFGPPLLTRHNHLKDFMLVVSIVIGVGGCWFAYIQNRYSKEHMKKMMKDLEGLHRAEQSLHDLQERLHKAQEEHRTVEVEKVHLEKKLRDEINLAKQEAQRLKELREGTENERSRQKYAEEELEQVREALRKAEKELESHSSWYAPEALQKWLQLTHEVEVQYYNIKKQNAEKQLLVAKEGAEKIKKKRNTLFGTFHVAHSSSLDDVDHKILTAKQALSEVTAALRERLHRWQQIEILCGFQIVNNPGIHSLVAALNIDPSWMGSTRPNPAHFIMTDDVDDMDEEIVSPLSMQSPSLQSSVRQRLTEPQHGLGSQRGSSLKANRLSSKGFDPFRFGVLPPHE

SEQ ID NO: 84673 - protein, 791 aa, Homo sapiens
  Payload ID: 16840
  Gene Symbol: STIM1
  Gene Name: stromal interaction molecule 1
  ENSP ID: ENSP00000478059
MDVCVRLALWLLWGLLLHQGQSLSHSHSEKATGTSSGANSEESTAAEFCRIDKPLCHSEDEKLSFEAVRNIHKLMDDDANGDVDVEESDEFLREDLNYHDPTVKHSTFHGEDKLISVEDLWKAWKSSEVYNWTVDEVVQWLITYVELPQYEETFRKLQLSGHAMPRLAVTNTTMTGTVLKMTDRSHRQKLQLKALDTVLFGPPLLTRHNHLKDFMLVVSIVIGVGGCWFAYIQNRYSKEHMKKMMKDLEGLHRAEQSLHDLQERLHKAQEEHRTVEVEKVHLEKKLRDEINLAKQEAQRLKELREGTENERSRQKYAEEELEQVREALRKAEKELESHSSWYAPEALQKWLQLTHEVEVQYYNIKKQNAEKQLLVAKEGAEKIKKKRNTLFGTFHVAHSSSLDDVDHKILTAKQALSEVTAALRERLHRWQQIEILCGFQIVNNPGIHSLVAALNIDPSWMGSTRPNPAHFIMTDDVDDMDEEIVSPLSMQSPSLQSSVRQRLTEPQHGLGSQRLVEGEAGHFLTSRVSLRRMRSLSSGQSFSSEGYGTSSPSASAAASCSSSITTITTTTTTTTTFTTVHVHPVYYHHSTSYFLQMEPYPDTPPSDSTAVMPGHSESLGDLTHSDSESSLHMSDRQRVAPKPPQMSRAADEALNAMTSNGSHRLIEGVHPGSLVEKLPDSPALAKKALLALNHGLDKAHSLMELSPSAPPGGSPHLDSSRSHSPSSPDPDTPSPVGDSRALQASRNTRIPHLAGKKAVAEEDNGSIGEETDSSPGRKKFPLKIFKKPLKK

SEQ ID NO: 84674 - protein, 754 aa, Homo sapiens
  Payload ID: 16841
  Gene Symbol: STIM2
  Gene Name: stromal interaction molecule 2
  ENSP ID: ENSP00000417569
LLVLGLLVAGAADGCELVPRHLRGRRATGSAATAASSPAAAAGDSPALMTDPCMSLSPPCFTEEDRFSLEALQTIHKQMDDDKDGGIEVEESDEFIREDMKYKDATNKHSHLHREDKHITIEDLWKRWKTSEVHNWTLEDTLQWLIEFVELPQYEKNFRDNNVKGTTLPRIAVHEPSFMISQLKISDRSHRQKLQLKALDVVLFGPLTRPPHNWMKDFILTVSIVIGVGGCWFAYTQNKTSKEHVAKMMKDLESLQTAEQSLMDLQERLEKAQEENRNVAVEKQNLERKMMDEINYAKEEACRLRELREGAECELSRRQYAEQELEQVRMALKKAEKEFELRSSWSVPDALQKWLQLTHEVEVQYYNIKRQNAEMQLAIAKDEVAASYLIQAEKIKKKRSTVFGTLHVAHSSSLDEVDHKILEAKKALSELTTCLRERLFRWQQIEKICGFQIAHNSGLPSLTSSLYSDHSWVVMPRVSIPPYPIAGGVDDLDEDTPPIVSQFPGTMAKPPGSLARSSSLCRSRRSIVPSSPQPQRAQLAPHAPHPSHPRHPHHPQHTPHSLPSPDPDILSVSSCPALYRNEEEEEAIYFSAEKQWEVPDTASECDSLNSSIGRKQSPPLSLEIYQTLSPRKISRDEVSLEDSSRGDSPVTVDVSWGSPDCVGLTETKSMIFSPASKVYNGILEKSCSMNQLSSGIPVPKPRHTSCSSAGNDSKPVQEAPSVARISSIPHDLCHNGEKSKKPSKIKSLFKKKSK

SEQ ID NO: 84675 - protein, 746 aa, Homo sapiens
  Payload ID: 16841
  Gene Symbol: STIM2
  Gene Name: stromal interaction molecule 2
  Uniprot ID: Q9P246
  ENSP ID: ENSP00000419073
LLVLGLLVAGAADGCELVPRHLRGRRATGSAATAASSPAAAAGDSPALMTDPCMSLSPPCFTEEDRFSLEALQTIHKQMDDDKDGGIEVEESDEFIREDMKYKDATNKHSHLHREDKHITIEDLWKRWKTSEVHNWTLEDTLQWLIEFVELPQYEKNFRDNNVKGTTLPRIAVHEPSFMISQLKISDRSHRQKLQLKALDVVLFGPLTRPPHNWMKDFILTVSIVIGVGGCWFAYTQNKTSKEHVAKMMKDLESLQTAEQSLMDLQERLEKAQEENRNVAVEKQNLERKMMDEINYAKEEACRLRELREGAECELSRRQYAEQELEQVRMALKKAEKEFELRSSWSVPDALQKWLQLTHEVEVQYYNIKRQNAEMQLAIAKDEAEKIKKKRSTVFGTLHVAHSSSLDEVDHKILEAKKALSELTTCLRERLFRWQQIEKICGFQIAHNSGLPSLTSSLYSDHSWVVMPRVSIPPYPIAGGVDDLDEDTPPIVSQFPGTMAKPPGSLARSSSLCRSRRSIVPSSPQPQRAQLAPHAPHPSHPRHPHHPQHTPHSLPSPDPDILSVSSCPALYRNEEEEEAIYFSAEKQWEVPDTASECDSLNSSIGRKQSPPLSLEIYQTLSPRKISRDEVSLEDSSRGDSPVTVDVSWGSPDCVGLTETKSMIFSPASKVYNGILEKSCSMNQLSSGIPVPKPRHTSCSSAGNDSKPVQEAPSVARISSIPHDLCHNGEKSKKPSKIKSLFKKKSK

SEQ ID NO: 84676 - protein, 599 aa, Homo sapiens
  Payload ID: 16841
  Gene Symbol: STIM2
  Gene Name: stromal interaction molecule 2
  ENSP ID: ENSP00000419383
LLVLGLLVAGAADGCELVPRHLRGRRATGSAATAASSPAAAAGDSPALMTDPCMSLSPPCFTEEDRFSLEALQTIHKQMDDDKDGGIEVEESDEFIREDMKYKDATNKHSHLHREDKHITIEDLWKRWKTSEVHNWTLEDTLQWLIEFVELPQYEKNFRDNNVKGTTLPRIAVHEPSFMISQLKISDRSHRQKLQLKALDVVLFGPLTRPPHNWMKDFILTVSIVIGVGGCWFAYTQNKTSKEHVAKMMKDLESLQTAEQSLMDLQERLEKAQEENRNVAVEKQNLERKMMDEINYAKEEACRLRELREGAECELSRRQYAEQELEQVRMALKKAEKEFELRSSWSVPDALQKWLQLTHEVEVQYYNIKRQNAEMQLAIAKDEAEKIKKKRSTVFGTLHVAHSSSLDEVDHKILEAKKALSELTTCLRERLFRWQQIEKICGFQIAHNSGLPSLTSSLYSDHSWVVMPRVSIPPYPIAGGVDDLDEDTPPIVSQFPGTMAKPPGSLARSSSLCRSRRSIVPSSPQPQRAQLAPHAPHPSHPRHPHHPQHTPHSLPSPDPDILSVSSCPALYRNEEEEEAIYFSAEKQCIHLGLGACKSE

SEQ ID NO: 84677 - protein, 221 aa, Homo sapiens
  Payload ID: 16841
  Gene Symbol: STIM2
  Gene Name: stromal interaction molecule 2
  ENSP ID: ENSP00000419536
HVAHSSSLDEVDHKILEAKKALSELTTCLRERLFRWQQIEKICGFQIAHNSGLPSLTSSLYSDHSWVVMPRVSIPPYPIAGGVDDLDEDTPPIVSQFPGTMAKPPGSLARSSSLCRSRRSIVPSSPQPQRAQLAPHAPHPSHPRHPHHPQHTPHSLPSPDPDILSVSSCPALYRNEEEEEAIYFSAEKQCMIIVTSKMPLLTELVLCGFWKSEGKLESCTV

SEQ ID NO: 84678 - protein, 347 aa, Homo sapiens
  Payload ID: 16841
  Gene Symbol: STIM2
  Gene Name: stromal interaction molecule 2
  ENSP ID: ENSP00000420113
EINYAKEEACRLRELREGAECELSRRQYAEQELEQVRMALKKAEKEFELRSSWSVPDALQKWLQLTHEVEVQYYNIKRQNAEMQLAIAKDEAEKIKKKRSTVFGTLHVAHSSSLDEVDHKILEAKKALSELTTCLRERLFRWQQIEKICGFQIAHNSGLPSLTSSLYSDHSWVVMPRVSIPPYPIAGGVDDLDEDTPPIVSQFPGTMAKPPGSLARSSSLCRSRRSIVPSSPQPQRAQLAPHAPHPSHPRHPHHPQHTPHSLPSPDPDILSVSSCPALYRNEEEEEAIYFSAEKQWNTRECAVGDSQGPHVHGLVRFDKDFGSYSEYERKHWEVSRKCQTQLQNVTP

SEQ ID NO: 84679 - protein, 214 aa, Homo sapiens
  Payload ID: 16841
  Gene Symbol: STIM2
  Gene Name: stromal interaction molecule 2
  ENSP ID: ENSP00000473283
MSLSPPCFTEEDRFSLEALQTIHKQMDDDKDGGIEVEESDEFIREDMKYKDATNKHSHLHREDKHITIEDLWKRWKTSEVHNWTLEDTLQWLIEFVELPQYEKNFRDNNVKGTTLPRIAVHEPSFMISQLKISDRSHRQKLQLKALDVVLFGPLTRPPHNWMKDFILTVSIVIGVGGCWFAYTQNKTSKEHVAKMMKDLESLQTAEQSLMDLQE

SEQ ID NO: 84680 - protein, 159 aa, Homo sapiens
  Payload ID: 16841
  Gene Symbol: STIM2
  Gene Name: stromal interaction molecule 2
  ENSP ID: ENSP00000473527
MSLSPPCFTEEDRFSLEALQTIHKQMDDDKDGGIEVEESDEFIREDMKYKDATNKHSHLHREDKHITIEDLWKRWKTSEVHNWTLEDTLQWLIEFVELPQYEKNFRDNNVKGTTLPRIAVHEPSFMISQLKISDRSHRQKLQLKALDVVLFGPLTRPPH

SEQ ID NO: 84681 - protein, 87 aa, Homo sapiens
  Payload ID: 16841
  Gene Symbol: STIM2
  Gene Name: stromal interaction molecule 2
  ENSP ID: ENSP00000473581
MSLSPPCFTEEDRFSLEALQTIHKQMDDDKDGGIEVEESDEFIREDMKYKDATNKHSHLHREDKHITIEDLWKRWKTSEVHNWTLED

SEQ ID NO: 84682 - protein, 1233 aa, Homo sapiens
  Payload ID: 16842
  Gene Symbol: SMC1A
  Gene Name: structural maintenance of chromosomes 1A
  Uniprot ID: Q14683
  ENSP ID: ENSP00000323421
MGFLKLIEIENFKSYKGRQIIGPFQRFTAIIGPNGSGKSNLMDAISFVLGEKTSNLRVKTLRDLIHGAPVGKPAANRAFVSMVYSEEGAEDRTFARVIVGGSSEYKINNKVVQLHEYSEELEKLGILIKARNFLVFQGAVESIAMKNPKERTALFEEISRSGELAQEYDKRKKEMVKAEEDTQFNYHRKKNIAAERKEAKQEKEEADRYQRLKDEVVRAQVQLQLFKLYHNEVEIEKLNKELASKNKEIEKDKKRMDKVEDELKEKKKELGKMMREQQQIEKEIKEKDSELNQKRPQYIKAKENTSHKIKKLEAAKKSLQNAQKHYKKRKGDMDELEKEMLSVEKARQEFEERMEEESQSQGRDLTLEENQVKKYHRLKEEASKRAATLAQELEKFNRDQKADQDRLDLEERKKVETEAKIKQKLREIEENQKRIEKLEEYITTSKQSLEEQKKLEGELTEEVEMAKRRIDEINKELNQVMEQLGDARIDRQESSRQQRKAEIMESIKRLYPGSVYGRLIDLCQPTQKKYQIAVTKVLGKNMDAIIVDSEKTGRDCIQYIKEQRGEPETFLPLDYLEVKPTDEKLRELKGAKLVIDVIRYEPPHIKKALQYACGNALVCDNVEDARRIAFGGHQRHKTVALDGTLFQKSGVISGGASDLKAKARRWDEKAVDKLKEKKERLTEELKEQMKAKRKEAELRQVQSQAHGLQMRLKYSQSDLEQTKTRHLALNLQEKSKLESELANFGPRINDIKRIIQSREREMKDLKEKMNQVEDEVFEEFCREIGVRNIREFEEEKVKRQNEIAKKRLEFENQKTRLGIQLDFEKNQLKEDQDKVHMWEQTVKKDENEIEKLKKEEQRHMKIIDETMAQLQDLKNQHLAKKSEVNDKNHEMEEIRKKLGGANKEMTHLQKEVTAIETKLEQKRSDRHNLLQACKMQDIKLPLSKGTMDDISQEEGSSQGEDSVSGSQRISSIYAREALIEIDYGDLCEDLKDAQAEEEIKQEMNTLQQKLNEQQSVLQRIAAPNMKAMEKLESVRDKFQETSDEFEAARKRAKKAKQAFEQIKKERFDRFNACFESVATNIDEIYKALSRNSSAQAFLGPENPEEPYLDGINYNCVAPGKRFRPMDNLSGGEKTVAALALLFAIHSYKPAPFFVLDEIDAALDNTNIGKVANYIKEQSTCNFQAIVISLKEEFYTKAESLIGVYPEQGDCVISKVLTFDLTKYPDANPNPNEQ

SEQ ID NO: 84683 - protein, 1211 aa, Homo sapiens
  Payload ID: 16842
  Gene Symbol: SMC1A
  Gene Name: structural maintenance of chromosomes 1A
  ENSP ID: ENSP00000364489
MLEVSIPTPHRYVRGKSNLMDAISFVLGEKTSNLRVKTLRDLIHGAPVGKPAANRAFVSMVYSEEGAEDRTFARVIVGGSSEYKINNKVVQLHEYSEELEKLGILIKARNFLVFQGAVESIAMKNPKERTALFEEISRSGELAQEYDKRKKEMVKAEEDTQFNYHRKKNIAAERKEAKQEKEEADRYQRLKDEVVRAQVQLQLFKLYHNEVEIEKLNKELASKNKEIEKDKKRMDKVEDELKEKKKELGKMMREQQQIEKEIKEKDSELNQKRPQYIKAKENTSHKIKKLEAAKKSLQNAQKHYKKRKGDMDELEKEMLSVEKARQEFEERMEEESQSQGRDLTLEENQVKKYHRLKEEASKRAATLAQELEKFNRDQKADQDRLDLEERKKVETEAKIKQKLREIEENQKRIEKLEEYITTSKQSLEEQKKLEGELTEEVEMAKRRIDEINKELNQVMEQLGDARIDRQESSRQQRKAEIMESIKRLYPGSVYGRLIDLCQPTQKKYQIAVTKVLGKNMDAIIVDSEKTGRDCIQYIKEQRGEPETFLPLDYLEVKPTDEKLRELKGAKLVIDVIRYEPPHIKKALQYACGNALVCDNVEDARRIAFGGHQRHKTVALDGTLFQKSGVISGGASDLKAKARRWDEKAVDKLKEKKERLTEELKEQMKAKRKEAELRQVQSQAHGLQMRLKYSQSDLEQTKTRHLALNLQEKSKLESELANFGPRINDIKRIIQSREREMKDLKEKMNQVEDEVFEEFCREIGVRNIREFEEEKVKRQNEIAKKRLEFENQKTRLGIQLDFEKNQLKEDQDKVHMWEQTVKKDENEIEKLKKEEQRHMKIIDETMAQLQDLKNQHLAKKSEVNDKNHEMEEIRKKLGGANKEMTHLQKEVTAIETKLEQKRSDRHNLLQACKMQDIKLPLSKGTMDDISQEEGSSQGEDSVSGSQRISSIYAREALIEIDYGDLCEDLKDAQAEEEIKQEMNTLQQKLNEQQSVLQRIAAPNMKAMEKLESVRDKFQETSDEFEAARKRAKKAKQAFEQIKKERFDRFNACFESVATNIDEIYKALSRNSSAQAFLGPENPEEPYLDGINYNCVAPGKRFRPMDNLSGGEKTVAALALLFAIHSYKPAPFFVLDEIDAALDNTNIGKVANYIKEQSTCNFQAIVISLKEEFYTKAESLIGVYPEQGDCVISKVLTFDLTKYPDANPNPNEQ

SEQ ID NO: 84684 - protein, 262 aa, Homo sapiens
  Payload ID: 16842
  Gene Symbol: SMC1A
  Gene Name: structural maintenance of chromosomes 1A
  ENSP ID: ENSP00000413509
MLEVSIPTPHRYVRGKSNLMDAISFVLGEKTSNLRVKTLRDLIHGAPVGKPAANRAFVSMVYSEEGAEDRTFARVIVGGSSEYKINNKVVQLHEYSEELEKLGILIKARNFLVFQGAVESIAMKNPKERTALFEEISRSGELAQEYDKRKKEMVKAEEDTQFNYHRKKNIAAERKEAKQEKEEADRYQRLKDEVVRAQVQLQLFKLYHNEVEIEKLNKELASKNKEIEKDKKRMDKVEDELKEKKKELGKMMREQQQIEKEI

SEQ ID NO: 84685 - protein, 279 aa, Homo sapiens
  Payload ID: 16842
  Gene Symbol: SMC1A
  Gene Name: structural maintenance of chromosomes 1A
  ENSP ID: ENSP00000476416
  MOD_RES (1)..(1): Any amino acid
XMTHLQKEVTAIETKLEQKRSDRHNLLQACKMQDIKLPLSKGTMDDISQEEGSSQGEDSVSGSQRISSIYAREALIEIDYGDLCEDLKDAQAEEEIKQEMNTLQQKLNEQQSVLQRIAAPNMKAMEKLESVRDKFQETSDEFEAARKRAKKAKQAFEQIKKERFDRFNACFESVATNIDEIYKALSRNSSAQAFLGPENPEEPYLDGINYNCVAPGKRFRPMDNLSGGEKTVAALALLFAIHRWQITSRSSRLATSRPSSSLSRRSSTPRPRASLESIL

SEQ ID NO: 84686 - protein, 54 aa, Homo sapiens
  Payload ID: 16842
  Gene Symbol: SMC1A
  Gene Name: structural maintenance of chromosomes 1A
  ENSP ID: ENSP00000476958
MGFLKLIEIENFKSYKGRQIIGPFQRFTAIIGPNGSGCCGIYCHEEPQREDSSI

SEQ ID NO: 84687 - protein, 1235 aa, Homo sapiens
  Payload ID: 16843
  Gene Symbol: SMC1B
  Gene Name: structural maintenance of chromosomes 1B
  Uniprot ID: Q8NDV3
  ENSP ID: ENSP00000350036
MAHLELLLVENFKSWRGRQVIGPFRRFTCIIGPNGSGKSNVMDALSFVMGEKIANLRVKNIQELIHGAHIGKPISSSASVKIIYVEESGEEKTFARIIRGGCSEFRFNDNLVSRSVYIAELEKIGIIVKAQNCLVFQGTVESISVKKPKERTQFFEEISTSGELIGEYEEKKRKLQKAEEDAQFNFNKKKNIAAERRQAKLEKEEAERYQSLLEELKMNKIQLQLFQLYHNEKKIHLLNTKLEHVNRDLSVKRESLSHHENIVKARKKEHGMLTRQLQQTEKELKSVETLLNQKRPQYIKAKENTSHHLKKLDVAKKSIKDSEKQCSKQEDDIKALETELADLDAAWRSFEKQIEEEILHKKRDIELEASQLDRYKELKEQVRKKVATMTQQLEKLQWEQKTDEERLAFEKRRHGEVQGNLKQIKEQIEDHKKRIEKLEEYTKTCMDCLKEKKQQEETLVDEIEKTKSRMSEVNEELNLIRSELQNAGIDTHEGKRQQKRAEVLEHLKRLYPDSVFGRLFDLCHPIHKKYQLAVTKVFGRFITAIVVASEKVAKDCIRFLKEERAEPETFLALDYLDIKPINERLRELKGCKMVIDVIKTQFPQLKKVIQFVCGNGLVCETMEEARHIALSGPERQKTVALDGTLFLKSGVISGGSSDLKYKARCWDEKELKNLRDRRSQKIQELKGLMKTLRKETDLKQIQTLIQGTQTRLKYSQNELEMIKKKHLVAFYQEQSQLQSELLNIESQCIMLSEGIKERQRRIKEFQEKIDKVEDDIFQHFCEEIGVENIREFENKHVKRQQEIDQKRLEFEKQKTRLNVQLEYSRSHLKKKLNKINTLKETIQKGSEDIDHLKKAEENCLQTVNELMAKQQQLKDIRVTQNSSAEKVQTQIEEERKKFLAVDREVGKLQKEVVSIQTSLEQKRLEKHNLLLDCKVQDIEIILLSGSLDDIIEVEMGTEAESTQATIDIYEKEEAFEIDYSSLKEDLKALQSDQEIEAHLRLLLQQVASQEDILLKTAAPNLRALENLKTVRDKFQESTDAFEASRKEARLCRQEFEQVKKRRYDLFTQCFEHVSISIDQIYKKLCRNNSAQAFLSPENPEEPYLEGISYNCVAPGKRFMPMDNLSGGEKCVAALALLFAVHSFRPAPFFVLDEVDAALDNTNIGKVSSYIKEQTQDQFQMIVISLKEEFYSRADALIGIYPEYDDCMFSRVLTLDLSQYPDTEGQESSKRHGESR

SEQ ID NO: 84688 - protein, 1161 aa, Homo sapiens
  Payload ID: 16843
  Gene Symbol: SMC1B
  Gene Name: structural maintenance of chromosomes 1B
  Uniprot ID: Q8NDV3
  ENSP ID: ENSP00000385902
MAHLELLLVENFKSWRGRQVIGPFRRFTCIIGPNGSGKSNVMDALSFVMGEKIANLRVKNIQELIHGAHIGKPISSSASVKIIYVEESGEEKTFARIIRGGCSEFRFNDNLVSRSVYIAELEKIGIIVKAQNCLVFQGTVESISVKKPKERTQFFEEISTSGELIGEYEEKKRKLQKAEEDAQFNFNKKKNIAAERRQAKLEKEEAERYQSLLEELKMNKIQLQLFQLYHNEKKIHLLNTKLEHVNRDLSVKRESLSHHENIVKARKKEHGMLTRQLQQTEKELKSVETLLNQKRPQYIKAKENTSHHLKKLDVAKKSIKDSEKQCSKQEDDIKALETELADLDAAWRSFEKQIEEEILHKKRDIELEASQLDRYKELKEQVRKKVATMTQQLEKLQWEQKTDEERLAFEKRRHGEVQGNLKQIKEQIEDHKKRIEKLEEYTKTCMDCLKEKKQQEETLVDEIEKTKSRMSEVNEELNLIRSELQNAGIDTHEGKRQQKRAEVLEHLKRLYPDSVFGRLFDLCHPIHKKYQLAVTKVFGRFITAIVVASEKVAKDCIRFLKEERAEPETFLALDYLDIKPINERLRELKGCKMVIDVIKTQFPQLKKVIQFVCGNGLVCETMEEARHIALSGPERQKTVALDGTLFLKSGVISGGSSDLKYKARCWDEKELKNLRDRRSQKIQELKGLMKTLRKETDLKQIQTLIQGTQTRLKYSQNELEMIKKKHLVAFYQEQSQLQSELLNIESQCIMLSEGIKERQRRIKEFQEKIDKVEDDIFQHFCEEIGVENIREFENKHVKRQQEIDQKRLEFEKQKTRLNVQLEYSRSHLKKKLNKINTLKETIQKGSEDIDHLKKAEENCLQTVNELMAKQQQLKDIRVTQNSSAEKVQTQIEEERKKFLAVDREVGKLQKEVVSIQTSLEQKRLEKHNLLLDCKVQDIEIILLSGSLDDIIEVEMGTEAESTQATIDIYEKEEAFEIDYSSLKEDLKALQSDQEIEAHLRLLLQQVASQEDILLKTAAPNLRALENLKTVRDKFQESTDAFEASRKEARLCRQEFEQVKKRRYDLFTQCFEHVSISIDQIYKKLCRNNSAQVSSYIKEQTQDQFQMIVISLKEEFYSRADALIGIYPEYDDCMFSRVLTLDLSQYPDTEGQESSKRHGESR

SEQ ID NO: 84689 - protein, 1197 aa, Homo sapiens
  Payload ID: 16844
  Gene Symbol: SMC2
  Gene Name: structural maintenance of chromosomes 2
  Uniprot ID: O95347
  ENSP ID: ENSP00000286398
MHIKSIILEGFKSYAQRTEVNGFDPLFNAITGLNGSGKSNILDSICFLLGISNLSQVRASNLQDLVYKNGQAGITKASVSITFDNSDKKQSPLGFEVHDEITVTRQVVIGGRNKYLINGVNANNTRVQDLFCSVGLNVNNPHFLIMQGRITKVLNMKPPEILSMIEEAAGTRMYEYKKIAAQKTIEKKEAKLKEIKTILEEEITPTIQKLKEERSSYLEYQKVMREIEHLSRLYIAYQFLLAEDTKVRSAEELKEMQDKVIKLQEELSENDKKIKALNHEIEELEKRKDKETGGILRSLEDALAEAQRVNTKSQSAFDLKKKNLACEESKRKELEKNMVEDSKTLAAKEKEVKKITDGLHALQEASNKDAEALAAAQQHFNAVSAGLSSNEDGAEATLAGQMMACKNDISKAQTEAKQAQMKLKHAQQELKNKQAEVKKMDSGYRKDQEALEAVKRLKEKLEAEMKKLNYEENKEESLLEKRRQLSRDIGRLKETYEALLARFPNLRFAYKDPEKNWNRNCVKGLVASLISVKDTSATTALELVAGERLYNVVVDTEVTGKKLLERGELKRRYTIIPLNKISARCIAPETLRVAQNLVGPDNVHVALSLVEYKPELQKAMEFVFGTTFVCDNMDNAKKVAFDKRIMTRTVTLGGDVFDPHGTLSGGARSQAASILTKFQELKDVQDELRIKENELRALEEELAGLKNTAEKYRQLKQQWEMKTEEADLLQTKLQQSSYHKQQEELDALKKTIEESEETLKNTKEIQRKAEEKYEVLENKMKNAEAERERELKDAQKKLDCAKTKADASSKKMKEKQQEVEAITLELEELKREHTSYKQQLEAVNEAIKSYESQIEVMAAEVAKNKESVNKAQEEVTKQKEVITAQDTVIKAKYAEVAKHKEQNNDSQLKIKELDHNISKHKREAEDGAAKVSKMLKDYDWINAERHLFGQPNSAYDFKTNNPKEAGQRLQKLQEMKEKLGRNVNMRAMNVLTEAEERYNDLMKKKRIVENDKSKILTTIEDLDQKKNQALNIAWQKVNKDFGSIFSTLLPGANAMLAPPEGQTVLDGLEFKVALGNTWKENLTELSGGQRSLVALSLILSMLLFKPAPIYILDEVDAALDLSHTQNIGQMLRTHFTHSQFIVVSLKEGMFNNANVLFKTKFVDGVSTVARFTQCQNGKISKEAKSKAKPPKGAHVEV

SEQ ID NO: 84690 - protein, 1197 aa, Homo sapiens; identical to SEQ ID NO: 84689
  Payload ID: 16844
  Gene Symbol: SMC2
  Gene Name: structural maintenance of chromosomes 2
  Uniprot ID: O95347
  ENSP ID: ENSP00000363919

SEQ ID NO: 84691 - protein, 1197 aa, Homo sapiens; identical to SEQ ID NO: 84689
  Payload ID: 16844
  Gene Symbol: SMC2
  Gene Name: structural maintenance of chromosomes 2
  Uniprot ID: O95347
  ENSP ID: ENSP00000363925

SEQ ID NO: 84692 - protein, 145 aa, Homo sapiens
  Payload ID: 16844
  Gene Symbol: SMC2
  Gene Name: structural maintenance of chromosomes 2
  ENSP ID: ENSP00000414999
MQGRITKVLNMKPPEILSMIEEAAGTRMYEYKKIAAQKTIEKKEAKLKEIKTILEEEITPTIQKLKEERSSYLEYQKVMREIEHLSRLYIAYQFLLAEDTKVRSAEELKEMQDKVIKLQEELSENDKKIKALNHEIEELEKRKDK

SEQ ID NO: 84693 - protein, 166 aa, Homo sapiens
  Payload ID: 16844
  Gene Symbol: SMC2
  Gene Name: structural maintenance of chromosomes 2
  ENSP ID: ENSP00000431534
MLKDYDWINAERHLFGQPNSAYDFKTNNPKEAGQRLQKLQEMKEKLGRNVNMRAMNVLTEAEERYNDLMKKKRIVENDKSKILTTIEDLDQKKNQALNIAWQKVNKDFGSIFSTLLPGANAMLAPPEGQTVLDGLEFKVALGNTWKENLTELSGGQRQKQQNHTTG

SEQ ID NO: 84694 - protein, 1217 aa, Homo sapiens
  Payload ID: 16845
  Gene Symbol: SMC3
  Gene Name: structural maintenance of chromosomes 3
  Uniprot ID: Q9UQE7
  ENSP ID: ENSP00000354720
MYIKQVIIQGFRSYRDQTIVDPFSSKHNVIVGRNGSGKSNFFYAIQFVLSDEFSHLRPEQRLALLHEGTGPRVISAFVEIIFDNSDNRLPIDKEEVSLRRVIGAKKDQYFLDKKMVTKNDVMNLLESAGFSRSNPYYIVKQGKINQMATAPDSQRLKLLREVAGTRVYDERKEESISLMKETEGKREKINELLKYIEERLHTLEEEKEELAQYQKWDKMRRALEYTIYNQELNETRAKLDELSAKRETSGEKSRQLRDAQQDARDKMEDIERQVRELKTKISAMKEEKEQLSAERQEQIKQRTKLELKAKDLQDELAGNSEQRKRLLKERQKLLEKIEEKQKELAETEPKFNSVKEKEERGIARLAQATQERTDLYAKQGRGSQFTSKEERDKWIKKELKSLDQAINDKKRQIAAIHKDLEDTEANKEKNLEQYNKLDQDLNEVKARVEELDRKYYEVKNKKDELQSERNYLWREENAEQQALAAKREDLEKKQQLLRAATGKAILNGIDSINKVLDHFRRKGINQHVQNGYHGIVMNNFECEPAFYTCVEVTAGNRLFYHIVDSDEVSTKILMEFNKMNLPGEVTFLPLNKLDVRDTAYPETNDAIPMISKLRYNPRFDKAFKHVFGKTLICRSMEVSTQLARAFTMDCITLEGDQVSHRGALTGGYYDTRKSRLELQKDVRKAEEELGELEAKLNENLRRNIERINNEIDQLMNQMQQIETQQRKFKASRDSILSEMKMLKEKRQQSEKTFMPKQRSLQSLEASLHAMESTRESLKAELGTDLLSQLSLEDQKRVDALNDEIRQLQQENRQLLNERIKLEGIITRVETYLNENLRKRLDQVEQELNELRETEGGTVLTATTSELEAINKRVKDTMARSEDLDNSIDKTEAGIKELQKSMERWKNMEKEHMDAINHDTKELEKMTNRQGMLLKKKEECMKKIRELGSLPQEAFEKYQTLSLKQLFRKLEQCNTELKKYSHVNKKALDQFVNFSEQKEKLIKRQEELDRGYKSIMELMNVLELRKYEAIQLTFKQVSKNFSEVFQKLVPGGKATLVMKKGDVEGSQSQDEGEGSGESERGSGSQSSVPSVDQFTGVGIRVSFTGKQGEMREMQQLSGGQKSLVALALIFAIQKCDPAPFYLFDEIDQALDAQHRKAVSDMIMELAVHAQFITTTFRPELLESADKFYGVKFRNKVSHIDVITAEMAKDFVEDDTTHG

SEQ ID NO: 84695 - protein, 1288 aa, Homo sapiens
  Payload ID: 16846
  Gene Symbol: SMC4
  Gene Name: structural maintenance of chromosomes 4
  Uniprot ID: Q9NTJ3
  ENSP ID: ENSP00000341382
MPRKGTQPSTARRREEGPPPPSPDGASSDAEPEPPSGRTESPATAAETASEELDNRSLEEILNSIPPPPPPAMTNEAGAPRLMITHIVNQNFKSYAGEKILGPFHKRFSCIIGPNGSGKSNVIDSMLFVFGYRAQKIRSKKLSVLIHNSDEHKDIQSCTVEVHFQKIIDKEGDDYEVIPNSNFYVSRTACRDNTSVYHISGKKKTFKDVGNLLRSHGIDLDHNRFLILQGEVEQIAMMKPKGQTEHDEGMLEYLEDIIGCGRLNEPIKVLCRRVEILNEHRGEKLNRVKMVEKEKDALEGEKNIAIEFLTLENEIFRKKNHVCQYYIYELQKRIAEMETQKEKIHEDTKEINEKSNILSNEMKAKNKDVKDTEKKLNKITKFIEENKEKFTQLDLEDVQVREKLKHATSKAKKLEKQLQKDKEKVEEFKSIPAKSNNIINETTTRNNALEKEKEKEEKKLKEVMDSLKQETQGLQKEKESREKELMGFSKSVNEARSKMDVAQSELDIYLSRHNTAVSQLTKAKEALIAASETLKERKAAIRDIEGKLPQTEQELKEKEKELQKLTQEETNFKSLVHDLFQKVEEAKSSLAMNRSRGKVLDAIIQEKKSGRIPGIYGRLGDLGAIDEKYDVAISSCCHALDYIVVDSIDIAQECVNFLKRQNIGVATFIGLDKMAVWAKKMTEIQTPENTPRLFDLVKVKDEKIRQAFYFALRDTLVADNLDQATRVAYQKDRRWRVVTLQGQIIEQSGTMTGGGSKVMKGRMGSSLVIEISEEEVNKMESQLQNDSKKAMQIQEQKVQLEERVVKLRHSEREMRNTLEKFTASIQRLIEQEEYLNVQVKELEANVLATAPDKKKQKLLEENVSAFKTEYDAVAEKAGKVEAEVKRLHNTIVEINNHKLKAQQDKLDKINKQLDECASAITKAQVAIKTADRNLQKAQDSVLRTEKEIKDTEKEVDDLTAELKSLEDKAAEVVKNTNAAEESLPEIQKEHRNLLQELKVIQENEHALQKDALSIKLKLEQIDGHIAEHNSKIKYWHKEISKISLHPIEDNPIEEISVLSPEDLEAIKNPDSITNQIALLEARCHEMKPNLGAIAEYKKKEELYLQRVAELDKITYERDSFRQAYEDLRKQRLNEFMAGFYIITNKLKENYQMLTLGGDAELELVDSLDPFSEGIMFSVRPPKKSWKKIFNLSGGEKTLSSLALVFALHHYKPTPLYFMDEIDAALDFKNVSIVAFYIYEQTKNAQFIIISLRNNMFEISDRLIGIYKTYNITKSVAVNPKEIASKGLC

SEQ ID NO: 84696 - protein, 1288 aa, Homo sapiens; identical to SEQ ID NO: 84695
  Payload ID: 16846
  Gene Symbol: SMC4
  Gene Name: structural maintenance of chromosomes 4
  Uniprot ID: Q9NTJ3
  ENSP ID: ENSP00000349961

SEQ ID NO: 84697 - protein, 157 aa, Homo sapiens
  Payload ID: 16846
  Gene Symbol: SMC4
  Gene Name: structural maintenance of chromosomes 4
  ENSP ID: ENSP00000417612
MTNEAGAPRLMITHIVNQNFKSYAGEKILGPFHKRFSCIIGPNGSGKSNVIDSMLFVFGYRAQKIRSKKLSVLIHNSDEHKDIQSCTVEVHFQKIIDKEGDDYEVIPNSNFYVSRTACRDNTSVYHISGKKKTFKDVGNLLRSHGIDLDHNRFLILQ

SEQ ID NO: 84698 - protein, 1263 aa, Homo sapiens
  Payload ID: 16846
  Gene Symbol: SMC4
  Gene Name: structural maintenance of chromosomes 4
  ENSP ID: ENSP00000417964
MPRKGTQPSTARRREEGPPPPSPDGASSDAEPEPPSGRTESPATAAAMTNEAGAPRLMITHIVNQNFKSYAGEKILGPFHKRFSCIIGPNGSGKSNVIDSMLFVFGYRAQKIRSKKLSVLIHNSDEHKDIQSCTVEVHFQKIIDKEGDDYEVIPNSNFYVSRTACRDNTSVYHISGKKKTFKDVGNLLRSHGIDLDHNRFLILQGEVEQIAMMKPKGQTEHDEGMLEYLEDIIGCGRLNEPIKVLCRRVEILNEHRGEKLNRVKMVEKEKDALEGEKNIAIEFLTLENEIFRKKNHVCQYYIYELQKRIAEMETQKEKIHEDTKEINEKSNILSNEMKAKNKDVKDTEKKLNKITKFIEENKEKFTQLDLEDVQVREKLKHATSKAKKLEKQLQKDKEKVEEFKSIPAKSNNIINETTTRNNALEKEKEKEEKKLKEVMDSLKQETQGLQKEKESREKELMGFSKSVNEARSKMDVAQSELDIYLSRHNTAVSQLTKAKEALIAASETLKERKAAIRDIEGKLPQTEQELKEKEKELQKLTQEETNFKSLVHDLFQKVEEAKSSLAMNRSRGKVLDAIIQEKKSGRIPGIYGRLGDLGAIDEKYDVAISSCCHALDYIVVDSIDIAQECVNFLKRQNIGVATFIGLDKMAVWAKKMTEIQTPENTPRLFDLVKVKDEKIRQAFYFALRDTLVADNLDQATRVAYQKDRRWRVVTLQGQIIEQSGTMTGGGSKVMKGRMGSSLVIEISEEEVNKMESQLQNDSKKAMQIQEQKVQLEERVVKLRHSEREMRNTLEKFTASIQRLIEQEEYLNVQVKELEANVLATAPDKKKQKLLEENVSAFKTEYDAVAEKAGKVEAEVKRLHNTIVEINNHKLKAQQDKLDKINKQLDECASAITKAQVAIKTADRNLQKAQDSVLRTEKEIKDTEKEVDDLTAELKSLEDKAAEVVKNTNAAEESLPEIQKEHRNLLQELKVIQENEHALQKDALSIKLKLEQIDGHIAEHNSKIKYWHKEISKISLHPIEDNPIEEISVLSPEDLEAIKNPDSITNQIALLEARCHEMKPNLGAIAEYKKKEELYLQRVAELDKITYERDSFRQAYEDLRKQRLNEFMAGFYIITNKLKENYQMLTLGGDAELELVDSLDPFSEGIMFSVRPPKKSWKKIFNLSGGEKTLSSLALVFALHHYKPTPLYFMDEIDAALDFKNVSIVAFYIYEQTKNAQFIIISLRNNMFEISDRLIGIYKTYNITKSVAVNPKEIASKGLC

SEQ ID NO: 84699 - protein, 139 aa, Homo sapiens
  Payload ID: 16846
  Gene Symbol: SMC4
  Gene Name: structural maintenance of chromosomes 4
  ENSP ID: ENSP00000417999
MLFVFGYRAQKIRSKKLSVLIHNSDEHKDIQSCTVEVHFQKIIDKEGDDYEVIPNSNFYVSRTACRDNTSVYHISGKKKTFKDVGNLLRSHGIDLDHNRFLILQGEVEQIAMMKPKGQTEHDEGMLEYLEDIIGCGRLN

SEQ ID NO: 84700 - protein, 50 aa, Homo sapiens
  Payload ID: 16846
  Gene Symbol: SMC4
  Gene Name: structural maintenance of chromosomes 4
  ENSP ID: ENSP00000418434
MPRKGTQPSTARRREEGPPPPSPDGASSDAEPEPPSGRTESPATAAETAR

SEQ ID NO: 84701 - protein, 173 aa, Homo sapiens
  Payload ID: 16846
  Gene Symbol: SMC4
  Gene Name: structural maintenance of chromosomes 4
  ENSP ID: ENSP00000418820
MPRKGTQPSTARRREEGPPPPSPDGASSDAEPEPPSGRTESPATAAETASEELDNRSLEEILNSIPPPPPPAMTNEAGAPRLMITHIVNQNFKSYAGEKILGPFHKRFSCIIGPNGSGKSNVIDSMLFVFGYRAQKIRSKKLSVLIHNSDEHKDIQSCTVEVHFQKIIDKEGD

SEQ ID NO: 84702 - protein, 170 aa, Homo sapiens
  Payload ID: 16846
  Gene Symbol: SMC4
  Gene Name: structural maintenance of chromosomes 4
  ENSP ID: ENSP00000419247
MPRKGTQPSTARRREEGPPPPSPDGASSDAEPEPPSGRTESPATAAETASEELDNRSLEEILNSIPPPPPPAMTNEAGAPRLMITHIVNQNFKSYAGEKILGPFHKRFSCIIGPNGSGKSNVIDSMLFVFGYRAQKIRSKKLSVLIHNSDEHKDIQSCTVEVHFQKIIDK

SEQ ID NO: 84703 - protein, 119 aa, Homo sapiens
  Payload ID: 16846
  Gene Symbol: SMC4
  Gene Name: structural maintenance of chromosomes 4
  ENSP ID: ENSP00000419360
MLFVFGYRAQKIRSKKLSVLIHNSDEHKDIQSCTVEVHFQKIIDKEGDDYEVIPNSNFYVSRTACRDNTSVYHISGKKKTFKDVGNLLRSHGIDLDHNRFLILQGEVEQIAMMKPKGQT

SEQ ID NO: 84704 - protein, 423 aa, Homo sapiens
  Payload ID: 16846
  Gene Symbol: SMC4
  Gene Name: structural maintenance of chromosomes 4
  ENSP ID: ENSP00000420121
MPRKGTQPSTARRREEGPPPPSPDGASSDAEPEPPSGRTESPATAAETASEELDNRSLEEILNSIPPPPPPAMTNEAGAPRLMITHIVNQNFKSYAGEKILGPFHKRFSCIIGPNGSGKSNVIDSMLFVFGYRAQKIRSKKLSVLIHNSDEHKDIQSCTVEVHFQKIIDKEGDDYEVIPNSNFYVSRTACRDNTSVYHISGKKKTFKDVGNLLRSHGIDLDHNRFLILQGEVEQIAMMKPKGQTEHDEGMLEYLEDIIGCGRLNEPIKVLCRRVEILNEHRGEKLNRVKMVEKEKDALEGEKNIAIEFLTLENEIFRKKNHVCQYYIYELQKRIAEMETQKEKIHEDTKEINEKSNILSNEMKAKNKDVKDTEKKLNKITKFIEENKEKFTQLDLEDVQVREKLKHATSKAKKLEKQLQKDKE

SEQ ID NO: 84705 - protein, 173 aa, Homo sapiens; identical to SEQ ID NO: 84701
  Payload ID: 16846
  Gene Symbol: SMC4
  Gene Name: structural maintenance of chromosomes 4
  ENSP ID: ENSP00000420644

SEQ ID NO: 84706 - protein, 1230 aa, Homo sapiens
  Payload ID: 16846
  Gene Symbol: SMC4
  Gene Name: structural maintenance of chromosomes 4
  Uniprot ID: Q9NTJ3
  ENSP ID: ENSP00000420734
MPRKGTQPSTARRREEGPPPPSPDGASSDAEPEPPSGRTESPATAAETASEELDNRSLEEILNSIPPPPPPAMTNEAGAPRLMITHIVNQNFKSYAGEKILGPFHKRFSCIIGPNGSGKSNVIDSMLFVFGYRAQKIRSKKLSVLIHNSDEHKDIQSCTVEVHFQKIIDKEGDDYEVIPNSNFYVSRTACRDNTSVYHISGKKKTFKDVGNLLRSHGIDLDHNRFLILQGEVEQIAMMKPKGQTEHDEGMLEYLEDIIGCGRLNEPIKVLCRRVEILNEHRGEKLNRVKMVEKEKDALEGEKNIAIEFLTLENEIFRKKNHVCQYYIYELQKRIAEMETQKEKIHEDTKEINEKSNILSNEMKAKNKDVKDTEKKLNKITKFIEENKEKFTQLDLEDVQVREKLKHATSKAKKLEKQLQKDKEKVEEFKSIPAKSNNIINETTTRNNALEKEKEKEEKKLKEVMDSLKQETQGLQKEKESREKELMGFSKSVNEARSKMDVAQSELDIYLSRHNTAVSQLTKAKEALIAASETLKERKAAIRDIEGKLPQTEQELKEKEKELQKLTQEETNFKSLVHDLFQKVEEAKSSLAMNRSRGKVLDAIIQEKKSGRIPGIYGRLGDLGAIDEKYDVAISSCCHALDYIVVDSIDIAQECVNFLKRQNIGVATFIGLDKMAVWAKKMTEIQTPENTPRLFDLVKVKDEKIRQAFYFALRDTLVADNLDQATRVAYQKDRRWRVVTLQGQIIEQSGTMTGGGSKVMKGRMGSSLVIEISEEEVNKMESQLQNDSKKAMQIQEQKVQLEERVVKLRHSEREMRNTLEKFTASIQRLIEQEEYLNVQVKELEANVLATAPDKKKQKLLEENVSAFKTEYDAVAEKAGKVEAEVKRLHNTIVEINNHKLKAQQDKLDKINKQLDECASAITKAQVAIKTADRNLQKAQDSVLRTEKEIKDTEKEVDDLTAELKSLEDKAAEVVKNTNAAEISKISLHPIEDNPIEEISVLSPEDLEAIKNPDSITNQIALLEARCHEMKPNLGAIAEYKKKEELYLQRVAELDKITYERDSFRQAYEDLRKQRLNEFMAGFYIITNKLKENYQMLTLGGDAELELVDSLDPFSEGIMFSVRPPKKSWKKIFNLSGGEKTLSSLALVFALHHYKPTPLYFMDEIDAALDFKNVSIVAFYIYEQTKNAQFIIISLRNNMFEISDRLIGIYKTYNITKSVAVNPKEIASKGLC

SEQ ID NO: 84707 - protein, 180 aa, Homo sapiens
  Payload ID: 16846
  Gene Symbol: SMC4
  Gene Name: structural maintenance of chromosomes 4
  ENSP ID: ENSP00000420817
MPRKGTQPSTARRREEGPPPPSPDGASSDAEPEPPSGRTESPATAAETASEELDNRSLEEILNSIPPPPPPAMTNEAGAPRLMITHIVNQNFKSYAGEKILGPFHKRFSCIIGPNGSGKSNVIDSMLFVFGYRAQKIRSKKLSVLIHNSDEHKDIQSCTVEVHFQKIIDKEGDDYEVIPN

SEQ ID NO: 84708 - protein, 1101 aa, Homo sapiens
  Payload ID: 16847
  Gene Symbol: SMC5
  Gene Name: structural maintenance of chromosomes 5
  Uniprot ID: Q8IY18
  ENSP ID: ENSP00000354957
MATPSKKTSTPSPQPSKRALPRDPSSEVPSKRKNSAPQLPLLQSSGPFVEGSIVRISMENFLTYDICEVSPGPHLNMIVGANGTGKSSIVCAICLGLAGKPAFMGRADKVGFFVKRGCSRGMVEIELFRASGNLVITREIDVAKNQSFWFINKKSTTQKIVEEKVAALNIQVGNLCQFLPQDKVGEFAKLSKIELLEATEKSIGPPEMHKYHCELKNLREKEKQLETSCKEKTEYLQKMVQRNERYKQDVERFYERKRHLDLIEMLEAKRPWVEYENVRQEYEEVKLVRDRVKEEVRKLKEGQIPVTCRIEEMENERHNLEARIKEKATDIKEASQKCKQKQDVIERKDKHIEELQQALIVKQNEELDRQRRIGNTRKMIEDLQNELKTTENCENLQPQIDAITNDLRRIQDEKALCEGEIIDKRRERETLEKEKKSVDDHIVRFDNLMNQKEDKLRQRFRDTYDAVLWLRNNRDKFKQRVCEPIMLTINMKDNKNAKYIENHIPSNDLRAFVFESQEDMEVFLKEVRDNKKLRVNAVIAPKSSYADKAPSRSLNELKQYGFFSYLRELFDAPDPVMSYLCCQYHIHEVPVGTEKTRERIERVIQETRLKQIYTAEEKYVVKTSFYSNKVISSNTSLKVAQFLTVTVDLEQRRHLEEQLKEIHRKLQAVDSGLIALRETSKHLEHKDNELRQKKKELLERKTKKRQLEQKISSKLGSLKLMEQDTCNLEEEERKASTKIKEINVQKAKLVTELTNLIKICTSLHIQKVDLILQNTTVISEKNKLESDYMAASSQLRLTEQHFIELDENRQRLLQKCKELMKRARQVCNLGAEQTLPQEYQTQVPTIPNGHNSSLPMVFQDLPNTLDEIDALLTEERSRASCFTGLNPTIVQEYTKREEEIEQLTEELKGKKVELDQYRENISQVKERWLNPLKELVEKINEKFSNFFSSMQCAGEVDLHTENEEDYDKYGIRIRVKFRSSTQLHELTPHHQSGGERSVSTMLYLMALQELNRCPFRVVDEINQGMDPINERRVFEMVVNTACKENTSQYFFITPKLLQNLPYSEKMTVLFVYNGPHMLEPNTWNLKAFQRRRRRITFTQPS

SEQ ID NO: 84709 - protein, 1091 aa, Homo sapiens
  Payload ID: 16848
  Gene Symbol: SMC6
  Gene Name: structural maintenance of chromosomes 6
  Uniprot ID: Q96SB8
  ENSP ID: ENSP00000323439
MAKRKEENFSSPKNAKRPRQEELEDFDKDGDEDECKGTTLTAAEVGIIESIHLKNFMCHSMLGPFKFGSNVNFVVGNNGSGKSAVLTALIVGLGGRAVATNRGSSLKGFVKDGQNSADISITLRNRGDDAFKASVYGNSILIQQHISIDGSRSYKLKSATGSVVSTRKEELIAILDHFNIQVDNPVSVLTQEMSKQFLQSKNEGDKYKFFMKATQLEQMKEDYSYIMETKERTKEQIHQGEERLTELKRQCVEKEERFQSIAGLSTMKTNLESLKHEMAWAVVNEIEKQLNAIRDNIKIGEDRAARLDRKMEEQQVRLNEAEQKYKDIQDKLEKISEETNARAPECMALKADVVAKKRAYNEAEVLYNRSLNEYKALKKDDEQLCKRIEELKKSTDQSLEPERLERQKKISWLKERVKAFQNQENSVNQEIEQFQQAIEKDKEEHGKIKREELDVKHALSYNQRQLKELKDSKTDRLKRFGPNVPALLEAIDDAYRQGHFTYKPVGPLGACIHLRDPELALAIESCLKGLLQAYCCHNHADERVLQALMKRFYLPGTSRPPIIVSEFRNEIYDVRHRAAYHPDFPTVLTALEIDNAVVANSLIDMRGIETVLLIKNNSVARAVMQSQKPPKNCREAFTADGDQVFAGRYYSSENTRPKFLSRDVDSEISDLENEVENKTAQILNLQQHLSALEKDIKHNEELLKRCQLHYKELKMKIRKNISEIRELENIEEHQSVDIATLEDEAQENKSKMKMVEEHMEQQKENMEHLKSLKIEAENKYDAIKFKINQLSELADPLKDELNLADSEVDNQKRGKRHYEEKQKEHLDTLNKKKRELDMKEKELEEKMSQARQICPERIEVEKSASILDKEINRLRQKIQAEHASHGDREEIMRQYQEARETYLDLDSKVRTLKKFIKLLGEIMEHRFKTYQQFRRCLTLRCKLYFDNLLSQRAYCGKMNFDHKNETLSISVQPGEGNKAAFNDMRALSGGERSFSTVCFILSLWSIAESPFRCLDEFDVYMDMVNRRIAMDLILKMADSQRFRQFILLTPQSMSSLPSSKLIRILRMSDPERGQTTLPFRPVTQEEDDDQR

SEQ ID NO: 84710 - protein, 445 aa, Homo sapiens
  Payload ID: 16848
  Gene Symbol: SMC6
  Gene Name: structural maintenance of chromosomes 6
  ENSP ID: ENSP00000370672
MAKRKEENFSSPKNAKRPRQEELEDFDKDGDEDECKGTTLTAAEVGIIESIHLKNFMCHSMLGPFKFGSNVNFVVGNNGSGKSAVLTALIVGLGGRAVATNRGSSLKGFVKDGQNSADISITLRNRGDDAFKASVYGNSILIQQHISIDGSRSYKLKSATGSVVSTRKEELIAILDHFNIQVDNPVSVLTQEMSKQFLQSKNEGDKYKFFMKATQLEQMKEDYSYIMETKERTKEQIHQGEERLTELKRQCVEKEERFQSIAGLSTMKTNLESLKHEMAWAVVNEIEKQLNAIRDNIKIGEDRAARLDRKMEEQQVRLNEAEQKYKDIQDKLEKISEETNARAPECMALKADVVAKKRAYNEAEVLYNRSLNEYKALKKDDEQLCKRIEELKKSTDQSLEPERLERQKKISWLKERVKAFQNQENSVNQEIEQFQQAIEKDKEEH

SEQ ID NO: 84711 - protein, 1091 aa, Homo sapiens; identical to SEQ ID NO: 84709
  Payload ID: 16848
  Gene Symbol: SMC6
  Gene Name: structural maintenance of chromosomes 6
  Uniprot ID: Q96SB8
  ENSP ID: ENSP00000384539

SEQ ID NO: 84712 - protein, 1091 aa, Homo sapiens; identical to SEQ ID NO: 84709
  Payload ID: 16848
  Gene Symbol: SMC6
  Gene Name: structural maintenance of chromosomes 6
  Uniprot ID: Q96SB8
  ENSP ID: ENSP00000404092

SEQ ID NO: 84713 - protein, 740 aa, Homo sapiens
  Payload ID: 16848
  Gene Symbol: SMC6
  Gene Name: structural maintenance of chromosomes 6
  ENSP ID: ENSP00000408644
MAKRKEENFSSPKNAKRPRQEELEDFDKDGDEDECKGTTLTAAEVGIIESIHLKNFMCHSMLGPFKFGSNVNFVVGNNGSWSAVVRSRLNATSASQVQAILLFQPCGKSAVLTALIVGLGGRAVATNRGSSLKGFVKDGQNSADISITLRNRGDDAFKASVYGNSILIQQHISIDGSRSYKLKSATGSVVSTRKEELIAILDHFNIQVDNPVSVLTQEMSKQFLQSKNEGDKYKFFMKATQLEQMKEDYSYIMETKERTKEQIHQGEERLTELKRQCVEKEERFQSIAGLSTMKTNLESLKHEMAWAVVNEIEKQLNAIRDNIKIGEDRAARLDRKMEEQQVRLNEAEQKYKDIQDKLEKISEETNARAPECMALKADVVAKKRAYNEAEVLYNRSLNEYKALKKDDEQLCKRIEELKKSTDQSLEPERLERQKKISWLKERVKAFQNQENSVNQEIEQFQQAIEKDKEEHGKIKREELDVKHALSYNQRQLKELKDSKTDRLKRFGPNVPALLEAIDDAYRQGHFTYKPVGPLGACIHLRDPELALAIESCLKGLLQAYCCHNHADERVLQALMKRFYLPGTSRPPIIVSEFRNEIYDVRHRAAYHPDFPTVLTALEIDNAVVANSLIDMRGIETVLLIKNNSVARAVMQSQKPPKNCREAFTADGDQVFAGRYYSSENTRPKFLSRDVDSEISDLENEVENKTAQILNLQQHLSALEKDIKHNEELLKRCQLHYKELK

SEQ ID NO: 84714 - protein, 22 aa, Homo sapiens
  Payload ID: 16848
  Gene Symbol: SMC6
  Gene Name: structural maintenance of chromosomes 6
  ENSP ID: ENSP00000412246
YDVRHRTKENSPGHSGGACSVN

SEQ ID NO: 84715 - protein, 57 aa, Homo sapiens
  Payload ID: 16848
  Gene Symbol: SMC6
  Gene Name: structural maintenance of chromosomes 6
  ENSP ID: ENSP00000415352
MAKRKEENFSSPKNAKRPRQEELEDFDKDGDEDECKGTTLTAAEVGIIESIHLKNFM

SEQ ID NO: 84716 - protein, 76 aa, Homo sapiens
  Payload ID: 16848
  Gene Symbol: SMC6
  Gene Name: structural maintenance of chromosomes 6
  ENSP ID: ENSP00000480257
MAKRKEENFSSPKNAKRPRQEELEDFDKDGDEDECKGTTLTAAEVGIIESIHLKNFMCHSMLGPFKFGSNVNFVVG

SEQ ID NO: 84717 - protein, 2005 aa, Homo sapiens
  Payload ID: 16849
  Gene Symbol: SMCHD1
  Gene Name: structural maintenance of chromosomes flexible hinge domain containing 1
  Uniprot ID: A6NHR9
  ENSP ID: ENSP00000326603
MAAADGGGPGGASVGTEEDGGGVGHRTVYLFDRREKESELGDRPLQVGERSDYAGFRACVCQTLGISPEEKFVITTTSRKEITCDNFDETVKDGVTLYLLQSVNQLLLTATKERIDFLPHYDTLVKSGMYEYYASEGQNPLPFALAELIDNSLSATSRNIGVRRIQIKLLFDETQGKPAVAVIDNGRGMTSKQLNNWAVYRLSKFTRQGDFESDHSGYVRPVPVPRSLNSDISYFGVGGKQAVFFVGQSARMISKPADSQDVHELVLSKEDFEKKEKNKEAIYSGYIRNRKPSDSVHITNDDERFLHHLIIEEKEKDSFTAVVITGVQPEHIQYLKNYFHLWTRQLAHIYHYYIHGPKGNEIRTSKEVEPFNNIDIEISMFEKGKVPKIVNLREIQDDMQTLYVNTAADSFEFKAHVEGDGVVEGIIRYHPFLYDRETYPDDPCFPSKLKDEDDEDDCFILEKAARGKRPIFECFWNGRLIPYTSVEDFDWCTPPKKRGLAPIECYNRISGALFTNDKFQVSTNKLTFMDLELKLKDKNTLFTRILNGQEQRMKIDREFALWLKDCHEKYDKQIKFTLFKGVITRPDLPSKKQGPWATYAAIEWDGKIYKAGQLVKTIKTLPLFYGSIVRFFLYGDHDGEVYATGGEVQIAMEPQALYDEVRTVPIAKLDRTVAEKAVKKYVEDEMARLPDRLSVTWPEGDELLPNEVRPAGTPIGALRIEILNKKGEAMQKLPGTSHGGSKKLLVELKVILHSSSGNKEIISHISQHGGKWPYWFKKMENIQKLGNYTLKLQVVLNESNADTYAGRPLPSKAIKFSVKEGKPEKFSFGLLDLPFRVGVPFNIPLEFQDEFGHTSQLVTDIQPVLEASGLSLHYEEITKGPNCVIRGVTAKGPVNSCQGKNYNLKVTLPGLKEDSQILKIRLLPGHPRRLKVKPDSEILVIENGTAFPFQVEVLDESDNITAQPKLIVHCKFSGAPNLPVYVVDCSSSGTSILTGSAIQVQNIKKDQTLKARIEIPSCKDVAPVEKTIKLLPSSHVARLQIFSVEGQKAIQIKHQDEVNWIAGDIMHNLIFQMYDEGEREINITSALAEKIKVNWTPEINKEHLLQGLLPDVQVPTSVKDMRYCQVSFQDDHVSLESAFTVRPLPDEPKHLKCEMKGGKTVQMGQELQGEVVIIITDQYGNQIQAFSPSSLSSLSIAGVGLDSSNLKTTFQENTQSISVRGIKFIPGPPGNKDLCFTWREFSDFIRVQLISGPPAKLLLIDWPELKESIPVINGRDLQNPIIVQLCDQWDNPAPVQHVKISLTKASNLKLMPSNQQHKTDEKGRANLGVFSVFAPRGEHTLQVKAIYNKSIIEGPIIKLMILPDPEKPVRLNVKYDKDASFLAGGLFTDFMISVISEDDSIIKNINPARISMKMWKLSTSGNRPPANAETFSCNKIKDNDKEDGCFYFRDKVIPNKVGTYCIQFGFMMDKTNILNSEQVIVEVLPNQPVKLVPKIKPPTPAVSNVRSVASRTLVRDLHLSITDDYDNHTGIDLVGTIIATIKGSNEEDTDTPLFIGKVRTLEFPFVNGSAEIMSLVLAESSPGRDSTEYFIVFEPRLPLLSRTLEPYILPFMFYNDVKKQQQMAALTKEKDQLSQSIVMYKSLFEASQQLLNEMKCQVEEARLKEAQLRNELKIHNIDIPTTQQVPHIEALLKRKLSEQEELKKKPRRSCTLPNYTKGSGDVLGKIAHLAQIEDDRAAMVISWHLASDMDCVVTLTTDAARRIYDETQGRQQVLPLDSIYKKTLPDWKRSLPHFRNGKLYFKPIGDPVFARDLLTFPDNVEHCETVFGMLLGDTIILDNLDAANHYRKEVVKITHCPTLLTRDGDRIRSNGKFGGLQNKAPPMDKLRGMVFGAPVPKQCLILGEQIDLLQQYRSAVCKLDSVNKDLNSQLEYLRTPDMRKKKQELDEHEKNLKLIEEKLGMTPIRKCNDSLRHSPKVETTDCPVPPKRMRREATRQNRIITKTDV

SEQ ID NO: 84718 - protein, 49 aa, Homo sapiens
  Payload ID: 16849
  Gene Symbol: SMCHD1
  Gene Name: structural maintenance of chromosomes flexible hinge domain containing 1
  ENSP ID: ENSP00000462050
  MOD_RES (1)..(1): Any amino acid
XIECYNRISGALFTNDKFQVSTNKLTFMDLELKLKDKNTLFTRILNGQV

SEQ ID NO: 84719 - protein, 48 aa, Homo sapiens
  Payload ID: 16849
  Gene Symbol: SMCHD1
  Gene Name: structural maintenance of chromosomes flexible hinge domain containing 1
  ENSP ID: ENSP00000463036
  MOD_RES (1)..(1): Any amino acid
XKLGMTPIRKCNDSLRHSPKVETTDCPVPPKRMRREATRQNRDGVLLC

SEQ ID NO: 84720 - protein, 1388 aa, Homo sapiens
  Payload ID: 16849
  Gene Symbol: SMCHD1
  Gene Name: structural maintenance of chromosomes flexible hinge domain containing 1
  ENSP ID: ENSP00000463049
DLELKLKDKNTLFTRILNGQEQRMKIDREFALWLKDCHEKYDKQIKFTLFKGVITRPDLPSKKQGPWATYAAIEWDGKIYKAGQLVKTIKTLPLFYGSIVRFFLYGDHDGEVYATGGEVQIAMEPQALYDEVRTVPIAKLDRTVAEKAVKKYVEDEMARLPDRLSVTWPEGDELLPNEVRPAGTPIGALRIEILNKKGEAMQKLPGTSHGGSKKLLVELKVILHSSSGNKEIISHISQHGGKWPYWFKKMENIQKLGNYTLKLQVVLNESNADTYAGRPLPSKAIKFSVKEGKPEKFSFGLLDLPFRVGVPFNIPLEFQDEFGHTSQLVTDIQPVLEASGLSLHYEEITKGPNCVIRGVTAKGPVNSCQGKNYNLKVTLPGLKEDSQILKIRLLPGHPRRLKVKPDSEILVIENGTAFPFQVEVLDESDNITAQPKLIVHCKFSGAPNLPVYVVDCSSSGTSILTGSAIQVQNIKKDQTLKARIEIPSCKDVAPVEKTIKLLPSSHVARLQIFSVEGQKAIQIKHQDEVNWIAGDIMHNLIFQMYDEGEREINITSALAEKIKVNWTPEINKEHLLQGLLPDVQVPTSVKDMRYCQVSFQDDHVSLESAFTVRPLPDEPKHLKCEMKGGKTVQMGQELQGEVVIIITDQYGNQIQAFSPSSLSSLSIAGVGLDSSNLKTTFQENTQSISVRGIKFIPGPPGNKDLCFTWREFSDFIRVQLISGPPAKLLLIDWPELKESIPVINGRDLQNPIIVQLCDQWDNPAPVQHVKISLTKASNLKLMPSNQQHKTDEKGRANLGVFSVFAPRGEHTLQVKAIYNKSIIEGPIIKLMILPDPEKPVRLNVKYDKDASFLAGGLFTDFMISVISEDDSIIKNINPARISMKMWKLSTSGNRPPANAETFSCNKIKDNDKEDGCFYFRDKVIPNKVGTYCIQFGFMMDKTNILNSEQVIVEVLPNQPVKLVPKIKPPTPAVSNVRSVASRTLVRDLHLSITDDYDNHTGIDLVGTIIATIKGSNEEDTDTPLFIGKVRTLEFPFVNGSAEIMSLVLAESSPGRDSTEYFIVFEPRLPLLSRTLEPYILPFMFYNDVKKQQQMAALTKEKDQLSQSIVMYKSLFEASQQLLNEMKCQVEEARLKEAQLRNELKIHNIDIPTTQQVPHIEALLKRKLSEQEELKKKPRRSCTLPNYTKGSGDVLGKIAHLAQIEDDRAAMVISWHLASDMDCVVTLTTDAARRIYDETQGRQQVLPLDSIYKKTLPDWKRSLPHFRNGKLYFKPIGDPVFARDLLTFPDNVEHCETVFGMLLGDTIILDNLDAANHYRKEVVKITHCPTLLTRDGDRIRSNGKFGGLQNKAPPMDKLRGMVFGAPVPKQCLILGEQIVHACVPSYSGG

SEQ ID NO: 84721 - protein, 150 aa, Homo sapiens
  Payload ID: 16849
  Gene Symbol: SMCHD1
  Gene Name: structural maintenance of chromosomes flexible hinge domain containing 1
  ENSP ID: ENSP00000464684
  MOD_RES (1)..(1): Any amino acid
XKYVEDEMARLPDRLSVTWPEGDELLPNEVRPAGTPIGALRIEILNKKGEAMQKLPGTSHGGSKKLLVELKVILHSSSGNKEIISHISQHGGKWPYWFKKMENIQKLGNYTLKLQVVLNESNADTYAGRPLPSKAIKFSVKVVYLYIMKK

SEQ ID NO: 84722 - protein, 709 aa, Homo sapiens
  Payload ID: 16850
  Gene Symbol: SSRP1
  Gene Name: structure specific recognition protein 1
  Uniprot ID: Q08945
  ENSP ID: ENSP00000278412
MAETLEFNDVYQEVKGSMNDGRLRLSRQGIIFKNSKTGKVDNIQAGELTEGIWRRVALGHGLKLLTKNGHVYKYDGFRESEFEKLSDFFKTHYRLELMEKDLCVKGWNWGTVKFGGQLLSFDIGDQPVFEIPLSNVSQCTTGKNEVTLEFHQNDDAEVSLMEVRFYVPPTQEDGVDPVEAFAQNVLSKADVIQATGDAICIFRELQCLTPRGRYDIRIYPTFLHLHGKTFDYKIPYTTVLRLFLLPHKDQRQMFFVISLDPPIKQGQTRYHFLILLFSKDEDISLTLNMNEEEVEKRFEGRLTKNMSGSLYEMVSRVMKALVNRKITVPGNFQGHSGAQCITCSYKASSGLLYPLERGFIYVHKPPVHIRFDEISFVNFARGTTTTRSFDFEIETKQGTQYTFSSIEREEYGKLFDFVNAKKLNIKNRGLKEGMNPSYDEYADSDEDQHDAYLERMKEEGKIREENANDSSDDSGEETDESFNPGEEEEDVAEEFDSNASASSSSNEGDSDRDEKKRKQLKKAKMAKDRKSRKKPVEVKKGKDPNAPKRPMSAYMLWLNASREKIKSDHPGISITDLSKKAGEIWKGMSKEKKEEWDRKAEDARRDYEKAMKEYEGGRGESSKRDKSKKKKKVKVKMEKKSTPSRGSSSKSSSRQLSESFKSKEFVSSDESSSGENKSKKKRRRSEDSEEEELASTPPSSEDSASGSDE

SEQ ID NO: 84723 - protein, 173 aa, Homo sapiens
  Payload ID: 16850
  Gene Symbol: SSRP1
  Gene Name: structure specific recognition protein 1
  ENSP ID: ENSP00000431154
MEKDLCVKGWNWGTVKFGGQLLSFDIGDQPVFEIPLSNVSQCTTGKNEVTLEFHQNDDAEVSLMEVRFYVPPTQEDGVDPVEAFAQNVLSKADVIQATGDAICIFRELQCLTPRGRYDIRIYPTFLHLHGKTFDYKIPYTTVLRLFLLPHKDQRQMFFVISLDPPIKQGQTRY

SEQ ID NO: 84724 - protein, 89 aa, Homo sapiens
  Payload ID: 16850
  Gene Symbol: SSRP1
  Gene Name: structure specific recognition protein 1
  ENSP ID: ENSP00000434546
MEKDLCVKGWNWGTVKFGGQLLSFDIGDQPVFEIPLSNVSQCTTGKNEVTLEFHQNDDAEVSLMEVRFYVPPTQEDGVDPVEAFAQNVL

SEQ ID NO: 84725 - protein, 225 aa, Homo sapiens
  Payload ID: 16850
  Gene Symbol: SSRP1
  Gene Name: structure specific recognition protein 1
  ENSP ID: ENSP00000489564
  MOD_RES (1)..(1): Any amino acid
XEEYGKLFDFVNAKKLNIKNRGLKEKKEGMNPSYDEYADSDEDQHDAYLERMKEEGKIREENANDSSDDSGEETDESFNPGEEEEDVAEEFDSNASASSSSNEGDSDRDEKKRKQLKKAKMAKDRKSRKKPVEVKKGKDPNAPKRPMSAYMLWLNASREKIKSDHPGISITDLSKKAGEIWKGMSKEKKEEWDRKAEDARRDYEKAMKEYEGGRGESSKRDKSKK

SEQ ID NO: 84726 - protein, 705 aa, Homo sapiens
  Payload ID: 16851
  Gene Symbol: STT3A
  Gene Name: STT3A, subunit of the oligosaccharyltransferase complex (catalytic)
  Uniprot ID: P46977
  ENSP ID: ENSP00000376472
MTKFGFLRLSYEKQDTLLKLLILSMAAVLSFSTRLFAVLRFESVIHEFDPYFNYRTTRFLAEEGFYKFHNWFDDRAWYPLGRIIGGTIYPGLMITSAAIYHVLHFFHITIDIRNVCVFLAPLFSSFTTIVTYHLTKELKDAGAGLLAAAMIAVVPGYISRSVAGSYDNEGIAIFCMLLTYYMWIKAVKTGSICWAAKCALAYFYMVSSWGGYVFLINLIPLHVLVLMLTGRFSHRIYVAYCTVYCLGTILSMQISFVGFQPVLSSEHMAAFGVFGLCQIHAFVDYLRSKLNPQQFEVLFRSVISLVGFVLLTVGALLMLTGKISPWTGRFYSLLDPSYAKNNIPIIASVSEHQPTTWSSYYFDLQLLVFMFPVGLYYCFSNLSDARIFIIMYGVTSMYFSAVMVRLMLVLAPVMCILSGIGVSQVLSTYMKNLDISRPDKKSKKQQDSTYPIKNEVASGMILVMAFFLITYTFHSTWVTSEAYSSPSIVLSARGGDGSRIIFDDFREAYYWLRHNTPEDAKVMSWWDYGYQITAMANRTILVDNNTWNNTHISRVGQAMASTEEKAYEIMRELDVSYVLVIFGGLTGYSSDDINKFLWMVRIGGSTDTGKHIKENDYYTPTGEFRVDREGSPVLLNCLMYKMCYYRFGQVYTEAKRPPGFDRVRNAEIGNKDFELDVLEEAYTTEHWLVRIYKVKDLDNRGLSRT

SEQ ID NO: 84727 - protein, 613 aa, Homo sapiens
  Payload ID: 16851
  Gene Symbol: STT3A
  Gene Name: STT3A, subunit of the oligosaccharyltransferase complex (catalytic)
  Uniprot ID: P46977
  ENSP ID: ENSP00000432820
MITSAAIYHVLHFFHITIDIRNVCVFLAPLFSSFTTIVTYHLTKELKDAGAGLLAAAMIAVVPGYISRSVAGSYDNEGIAIFCMLLTYYMWIKAVKTGSICWAAKCALAYFYMVSSWGGYVFLINLIPLHVLVLMLTGRFSHRIYVAYCTVYCLGTILSMQISFVGFQPVLSSEHMAAFGVFGLCQIHAFVDYLRSKLNPQQFEVLFRSVISLVGFVLLTVGALLMLTGKISPWTGRFYSLLDPSYAKNNIPIIASVSEHQPTTWSSYYFDLQLLVFMFPVGLYYCFSNLSDARIFIIMYGVTSMYFSAVMVRLMLVLAPVMCILSGIGVSQVLSTYMKNLDISRPDKKSKKQQDSTYPIKNEVASGMILVMAFFLITYTFHSTWVTSEAYSSPSIVLSARGGDGSRIIFDDFREAYYWLRHNTPEDAKVMSWWDYGYQITAMANRTILVDNNTWNNTHISRVGQAMASTEEKAYEIMRELDVSYVLVIFGGLTGYSSDDINKFLWMVRIGGSTDTGKHIKENDYYTPTGEFRVDREGSPVLLNCLMYKMCYYRFGQVYTEAKRPPGFDRVRNAEIGNKDFELDVLEEAYTTEHWLVRIYKVKDLDNRGLSRT

SEQ ID NO: 84728 - protein, 117 aa, Homo sapiens
  Payload ID: 16851
  Gene Symbol: STT3A
  Gene Name: STT3A, subunit of the oligosaccharyltransferase complex (catalytic)
  ENSP ID: ENSP00000432912
MTKFGFLRLSYEKQDTLLKLLILSMAAVLSFSTRLFAVLRFESVIHEFDPYFNYRTTRFLAEEGFYKFHNWFDDRAWYPLGRIIGGTIYPGLMITSAAIYHVLHFFHITIDIRNVCV

SEQ ID NO: 84729 - protein, 102 aa, Homo sapiens
  Payload ID: 16851
  Gene Symbol: STT3A
  Gene Name: STT3A, subunit of the oligosaccharyltransferase complex (catalytic)
  ENSP ID: ENSP00000435810
MTKFGFLRLSYEKQDTLLKLLILSMAAVLSFSTRLFAVLRFESVIHEFDPYFNYRTTRFLAEEGFYKFHNWFDDRAWYPLGRIIGGTIYPGLMITSAAIYHV

SEQ ID NO: 84730 - protein, 194 aa, Homo sapiens
  Payload ID: 16851
  Gene Symbol: STT3A
  Gene Name: STT3A, subunit of the oligosaccharyltransferase complex (catalytic)
  ENSP ID: ENSP00000436523
  MOD_RES (1)..(1): Any amino acid
XYCLGTILSMQISFVGFQPVLSSEHMAAFGVFGLCQIHAFVDYLRSKLNPQQFEVLFRSVISLEKYLPGRGVSTRCWIPLMLRTTSPSLLLCLSISPQPGPHTILTCSSSSSCFQVRLMLVLAPVMCILSGIGVSQVLSTYMKNLDISRPDKKSKKQQDSTYPIKNEVASGMILVMAFFLITYTFHSTWVTSEA

SEQ ID NO: 84731 - protein, 119 aa, Homo sapiens
  Payload ID: 16851
  Gene Symbol: STT3A
  Gene Name: STT3A, subunit of the oligosaccharyltransferase complex (catalytic)
  ENSP ID: ENSP00000436558
MTKFGFLRLSYEKQDTLLKLLILSMAAVLSFSTRLFAVLRFESVIHEFDPYFNYRTTRFLAEEGFYKFHNWFDDRAWYPLGRIIGGTIYPGLMITSAAIYHVLHFFHITIDIRNVCVFL

SEQ ID NO: 84732 - protein, 705 aa, Homo sapiens; identical to SEQ ID NO: 84726
  Payload ID: 16851
  Gene Symbol: STT3A
  Gene Name: STT3A, subunit of the oligosaccharyltransferase complex (catalytic)
  Uniprot ID: P46977
  ENSP ID: ENSP00000436962

SEQ ID NO: 84733 - protein, 826 aa, Homo sapiens
  Payload ID: 16852
  Gene Symbol: STT3B
  Gene Name: STT3B, subunit of the oligosaccharyltransferase complex (catalytic)
  Uniprot ID: Q8TCJ2
  ENSP ID: ENSP00000295770
MAEPSAPESKHKSSLNSSPWSGLMALGNSRHGHHGPGAQCAHKAAGGAAPPKPAPAGLSGGLSQPAGWQSLLSFTILFLAWLAGFSSRLFAVIRFESIIHEFDPWFNYRSTHHLASHGFYEFLNWFDERAWYPLGRIVGGTVYPGLMITAGLIHWILNTLNITVHIRDVCVFLAPTFSGLTSISTFLLTRELWNQGAGLLAACFIAIVPGYISRSVAGSFDNEGIAIFALQFTYYLWVKSVKTGSVFWTMCCCLSYFYMVSAWGGYVFIINLIPLHVFVLLLMQRYSKRVYIAYSTFYIVGLILSMQIPFVGFQPIRTSEHMAAAGVFALLQAYAFLQYLRDRLTKQEFQTLFFLGVSLAAGAVFLSVIYLTYTGYIAPWSGRFYSLWDTGYAKIHIPIIASVSEHQPTTWVSFFFDLHILVCTFPAGLWFCIKNINDERVFVALYAISAVYFAGVMVRLMLTLTPVVCMLSAIAFSNVFEHYLGDDMKRENPPVEDSSDEDDKRNQGNLYDKAGKVRKHATEQEKTEEGLGPNIKSIVTMLMLMLLMMFAVHCTWVTSNAYSSPSVVLASYNHDGTRNILDDFREAYFWLRQNTDEHARVMSWWDYGYQIAGMANRTTLVDNNTWNNSHIALVGKAMSSNETAAYKIMRTLDVDYVLVIFGGVIGYSGDDINKFLWMVRIAEGEHPKDIRESDYFTPQGEFRVDKAGSPTLLNCLMYKMSYYRFGEMQLDFRTPPGFDRTRNAEIGNKDIKFKHLEEAFTSEHWLVRIYKVKAPDNRETLDHKPRVTNIFPKQKYLSKKTTKRKRGYIKNKLVFKKGKKISKKTV

SEQ ID NO: 84734 - protein, 382 aa, Homo sapiens
  Payload ID: 16853
  Gene Symbol: STX16-NPEPL1
  Gene Name: STX16-NPEPL1 readthrough (NMD candidate)
  ENSP ID: ENSP00000457522
MATRRLTDAFLLLRNNSIQNRQLLAEQVSSHITSSPLHSRSIAAELDELADDRMALVSGISLDPEAAIGVTKRPPPKWVDGVDEIQYDVGRIKQKMKELASLHDKHLNRPTLDDSSEEEHAIEITTQEITQLFHRCQRAVQALPSRARACSEQEGRLLGNVVASLAQALQELSTSFRHAQSGYLKRMKNREERSQHFFDTSVPLMDDGDDNTLYHRGFTEDQLVLVEQNTLMVEEREREIRQIVQSISDLNEIFRDLGAMIVEQGTVLDRIDYNVEQSCIKTEDGLKQLHKDFSHVEGLLSQSLRLWKSYYICQGMALVSHPLGRSSSCLSPLECRVPVCNVFANRKKSERSSYTLACSVPGTGGKKNNKKSKRPAFRMLKL

SEQ ID NO: 84735 - protein, 127 aa, Homo sapiens
  Payload ID: 16854
  Gene Symbol: SUB1
  Gene Name: SUB1 homolog, transcriptional regulator
  Uniprot ID: P53999
  ENSP ID: ENSP00000265073
MPKSKELVSSSSSGSDSDSEVDKKLKRKKQVAPEKPVKKQKTGETSRALSSSKQSSSSRDDNMFQIGKMRYVSVRDFKGKVLIDIREYWMDPEGEMKPGRKGISLNPEQWSQLKEQISDIDDAVRKL

SEQ ID NO: 84736 - protein, 127 aa, Homo sapiens; identical to SEQ ID NO: 84735
  Payload ID: 16854
  Gene Symbol: SUB1
  Gene Name: SUB1 homolog, transcriptional regulator
  Uniprot ID: P53999
  ENSP ID: ENSP00000422078

SEQ ID NO: 84737 - protein, 127 aa, Homo sapiens; identical to SEQ ID NO: 84735
  Payload ID: 16854
  Gene Symbol: SUB1
  Gene Name: SUB1 homolog, transcriptional regulator
  Uniprot ID: P53999
  ENSP ID: ENSP00000422806

SEQ ID NO: 84738 - protein, 84 aa, Homo sapiens
  Payload ID: 16854
  Gene Symbol: SUB1
  Gene Name: SUB1 homolog, transcriptional regulator
  ENSP ID: ENSP00000423356
MPKSKELVSSSSSGSDSDSEVDKKLKRKKQVAPEKPVKKQKTGETSRALSSSKQSSSSRDDNMFQELFITFITGVPPAQEVSGV

SEQ ID NO: 84739 - protein, 65 aa, Homo sapiens
  Payload ID: 16854
  Gene Symbol: SUB1
  Gene Name: SUB1 homolog, transcriptional regulator
  ENSP ID: ENSP00000423893
MPKSKELVSSSSSGSDSDSEVDKKLKRKKQVAPEKPVKKQKTGETSRALSSSKQSSSSRDDNMFQ

SEQ ID NO: 84740 - protein, 127 aa, Homo sapiens; identical to SEQ ID NO: 84735
  Payload ID: 16854
  Gene Symbol: SUB1
  Gene Name: SUB1 homolog, transcriptional regulator
  Uniprot ID: P53999
  ENSP ID: ENSP00000426850

SEQ ID NO: 84741 - protein, 127 aa, Homo sapiens; identical to SEQ ID NO: 84735
  Payload ID: 16854
  Gene Symbol: SUB1
  Gene Name: SUB1 homolog, transcriptional regulator
  Uniprot ID: P53999
  ENSP ID: ENSP00000427100

SEQ ID NO: 84742 - protein, 134 aa, Homo sapiens
  Payload ID: 16855
  Gene Symbol: SMR3A
  Gene Name: submaxillary gland androgen regulated protein 3A
  Uniprot ID: Q99954
  ENSP ID: ENSP00000226460
MKSLTWILGLWALAACFTPGESQRGPRGPYPPGPLAPPPPPCFPFGTGFVPPPHPPPYGPGRFPPPLSPPYGPGRIPPSPPPPYGPGRIQSHSLPPPYGPGYPQPPSQPRPYPPGPPFFPVNSPTDPALPTPAP

SEQ ID NO: 84743 - protein, 79 aa, Homo sapiens
  Payload ID: 16856
  Gene Symbol: SMR3B
  Gene Name: submaxillary gland androgen regulated protein 3B
  Uniprot ID: P02814
  ENSP ID: ENSP00000302400
MKSLTWILGLWALAACFTPGESQRGPRGPYPPGPLAPPQPFGPGFVPPPPPPPYGPGRIPPPPPAPYGPGIFPPPPPQP

SEQ ID NO: 84744 - protein, 79 aa, Homo sapiens; identical to SEQ ID NO: 84743
  Payload ID: 16856
  Gene Symbol: SMR3B
  Gene Name: submaxillary gland androgen regulated protein 3B
  Uniprot ID: P02814
  ENSP ID: ENSP00000423138

SEQ ID NO: 84745 - protein, 79 aa, Homo sapiens; identical to SEQ ID NO: 84743
  Payload ID: 16856
  Gene Symbol: SMR3B
  Gene Name: submaxillary gland androgen regulated protein 3B
  Uniprot ID: P02814
  ENSP ID: ENSP00000481313

SEQ ID NO: 84746 - protein, 115 aa, Homo sapiens
  Payload ID: 16857
  Gene Symbol: SDHAF1
  Gene Name: succinate dehydrogenase complex assembly factor 1
  Uniprot ID: A6NFY7
  ENSP ID: ENSP00000368165
MSRHSRLQRQVLSLYRDLLRAGRGKPGAEARVRAEFRQHAGLPRSDVLRIEYLYRRGRRQLQLLRSGHATAMGAFVRPRAPTGEPGGVGCQPDDGDSPRNPHDSTGAPETRPDGR

SEQ ID NO: 84747 - protein, 166 aa, Homo sapiens
  Payload ID: 16858
  Gene Symbol: SDHAF2
  Gene Name: succinate dehydrogenase complex assembly factor 2
  Uniprot ID: Q9NX18
  ENSP ID: ENSP00000301761
MAVSTVFSTSSLMLALSRHSLLSPLLSVTSFRRFYRGDSPTDSQKDMIEIPLPPWQERTDESIETKRARLLYESRKRGMLENCILLSLFAKEHLQHMTEKQLNLYDRLINEPSNDWDIYYWATEAKPAPEIFENEVMALLRDFAKNKNKEQRLRAPDLEYLFEKPR

SEQ ID NO: 84748 - protein, 129 aa, Homo sapiens
  Payload ID: 16858
  Gene Symbol: SDHAF2
  Gene Name: succinate dehydrogenase complex assembly factor 2
  ENSP ID: ENSP00000352630
MAVSTVFSTSSLMLALSRHSLLSPLLSVTSFRRFYRGDSPTDSQKDMIEIPLPPWQERTDESIETKRARLLYESRKRGMLENCILLSLFAKEHLQHMTEKQLNLYDRLINEPSNDWDIYYWATGWSAMA

SEQ ID NO: 84749 - protein, 65 aa, Homo sapiens
  Payload ID: 16858
  Gene Symbol: SDHAF2
  Gene Name: succinate dehydrogenase complex assembly factor 2
  ENSP ID: ENSP00000439983
MAVSTVFSTSSLGIGLFVAVGSVSPSGKEDLGFPTPPSSPLAEVTTLTSYLDKLSTSLDWEPLGD

SEQ ID NO: 84750 - protein, 88 aa, Homo sapiens
  Payload ID: 16858
  Gene Symbol: SDHAF2
  Gene Name: succinate dehydrogenase complex assembly factor 2
  ENSP ID: ENSP00000443660
MAVSTVFSTSSLMLALSRHSLLSPLLSVTSFRRFYRGDSPTDSQKDMIEIPLPPWQERTDESIETKRARLLYESRKRGMLENCILLRS

SEQ ID NO: 84751 - protein, 28 aa, Homo sapiens
  Payload ID: 16858
  Gene Symbol: SDHAF2
  Gene Name: succinate dehydrogenase complex assembly factor 2
  ENSP ID: ENSP00000469670
MAVSTVFSTSSLKLNQPQKYLKMKSWPC

SEQ ID NO: 84752 - protein, 133 aa, Homo sapiens
  Payload ID: 16858
  Gene Symbol: SDHAF2
  Gene Name: succinate dehydrogenase complex assembly factor 2
  ENSP ID: ENSP00000469951
MAVSTVFSTSSLMLALSRHSLLSPLLSVTSFRRFYRGDSPTDSQKDMIEIPLPPWQERTDESIETKRARLLYESRKRGMLENCILLSLFAKEHLQHMTEKQLNLYDRLINEPSNDWDIYYWATGSSDSPASAS

SEQ ID NO: 84753 - protein, 141 aa, Homo sapiens
  Payload ID: 16858
  Gene Symbol: SDHAF2
  Gene Name: succinate dehydrogenase complex assembly factor 2
  ENSP ID: ENSP00000471030
MAVSTVFSTSSLMLALSRHSLLSPLLSVTSFRRFYRGDSPTDSQKDMIEIPLPPWQERTDESIETKRARLLYESRKRGMLENCILLSLFAKEHLQHMTEKQLNLYDRLINEPSNDWDIYYWATGTGYDKQHNVKIGQFRLI

SEQ ID NO: 84754 - protein, 65 aa, Homo sapiens; identical to SEQ ID NO: 84749
  Payload ID: 16858
  Gene Symbol: SDHAF2
  Gene Name: succinate dehydrogenase complex assembly factor 2
  ENSP ID: ENSP00000471120

SEQ ID NO: 84755 - protein, 68 aa, Homo sapiens
  Payload ID: 16859
  Gene Symbol: SDHAF3
  Gene Name: succinate dehydrogenase complex assembly factor 3
  ENSP ID: ENSP00000353548
MPGRHVSRVRALYKRVLQLHRVLPPDLKSLGDQYVKDEFRRHKTVGSDEAQRFLQEWEGMSRNLDACI

SEQ ID NO: 84756 - protein, 125 aa, Homo sapiens
  Payload ID: 16859
  Gene Symbol: SDHAF3
  Gene Name: succinate dehydrogenase complex assembly factor 3
  Uniprot ID: Q9NRP4
  ENSP ID: ENSP00000414066
MPGRHVSRVRALYKRVLQLHRVLPPDLKSLGDQYVKDEFRRHKTVGSDEAQRFLQEWEVYATALLQQANENRQNSTGKACFGTFLPEEKLNDFRDEQIGQLQELMQEATKPNRQFSISESMKPKF

SEQ ID NO: 84757 - protein, 108 aa, Homo sapiens
  Payload ID: 16860
  Gene Symbol: SDHAF4
  Gene Name: succinate dehydrogenase complex assembly factor 4
  Uniprot ID: Q5VUM1
  ENSP ID: ENSP00000359505
MTPSRLPWLLSWVSATAWRAARSPLLCHSLRKTSSSQGGKSELVKQSLKKPKLPEGRFDAPEDSHLEKEPLEKFPDDVNPVTKEKGGPRGPEPTRYGDWERKGRCIDF

SEQ ID NO: 84758 - protein, 664 aa, Homo sapiens
  Payload ID: 16861
  Gene Symbol: SDHA
  Gene Name: succinate dehydrogenase complex, subunit A, flavoprotein (Fp)
  Uniprot ID: P31040
  ENSP ID: ENSP00000264932
MSGVRGLSRLLSARRLALAKAWPTVLQTGTRGFHFTVDGNKRASAKVSDSISAQYPVVDHEFDAVVVGAGGAGLRAAFGLSEAGFNTACVTKLFPTRSHTVAAQGGINAALGNMEEDNWRWHFYDTVKGSDWLGDQDAIHYMTEQAPAAVVELENYGMPFSRTEDGKIYQRAFGGQSLKFGKGGQAHRCCCVADRTGHSLLHTLYGRSLRYDTSYFVEYFALDLLMENGECRGVIALCIEDGSIHRIRAKNTVVATGGYGRTYFSCTSAHTSTGDGTAMITRAGLPCQDLEFVQFHPTGIYGAGCLITEGCRGEGGILINSQGERFMERYAPVAKDLASRDVVSRSMTLEIREGRGCGPEKDHVYLQLHHLPPEQLATRLPGISETAMIFAGVDVTKEPIPVLPTVHYNMGGIPTNYKGQVLRHVNGQDQIVPGLYACGEAACASVHGANRLGANSLLDLVVFGRACALSIEESCRPGDKVPPIKPNAGEESVMNLDKLRFADGSIRTSELRLSMQKSMQNHAAVFRVGSVLQEGCGKISKLYGDLKHLKTFDRGMVWNTDLVETLELQNLMLCALQTIYGAEARKESRGAHAREDYKVRIDEYDYSKPIQGQQKKPFEEHWRKHTLSYVDVGTGKVTLEYRPVIDKTLNEADCATVPPAIRSY

SEQ ID NO: 84759 - protein, 101 aa, Homo sapiens
  Payload ID: 16861
  Gene Symbol: SDHA
  Gene Name: succinate dehydrogenase complex, subunit A, flavoprotein (Fp)
  ENSP ID: ENSP00000421911
GMVWNTDLVETLELQNLMLCALQTIYGAEARKESRGAHAREDYKSNKKRDGVSGLRCGLMSTITPSPSRGNRRSPLRSTGGSTPCPMWTLALGRSLWNIDP

SEQ ID NO: 84760 - protein, 126 aa, Homo sapiens
  Payload ID: 16861
  Gene Symbol: SDHA
  Gene Name: succinate dehydrogenase complex, subunit A, flavoprotein (Fp)
  ENSP ID: ENSP00000422404
  MOD_RES (1)..(1): Any amino acid
XNRLGANSLLDLVVFGRACALSIEESCRPGDKVPPIKPNAGEESVMNLDKLRFADGSIRTSELRLSMQKSNKKRDGVSGLRCGLMSTITPSPSRGNRRSPLRSTGGSTPCPMWTLALGRSLWNIDP

SEQ ID NO: 84761 - protein, 89 aa, Homo sapiens
  Payload ID: 16861
  Gene Symbol: SDHA
  Gene Name: succinate dehydrogenase complex, subunit A, flavoprotein (Fp)
  ENSP ID: ENSP00000425077
MSGVRGLSRLLSARRLALAKACTDTACKLFESSLIRGKRKPRNFNSYWLTAYFSGQQCCKQEPEVFTSLLMGTRGHLLKFQIPFLLSIQ

SEQ ID NO: 84762 - protein, 583 aa, Homo sapiens
  Payload ID: 16861
  Gene Symbol: SDHA
  Gene Name: succinate dehydrogenase complex, subunit A, flavoprotein (Fp)
  ENSP ID: ENSP00000426514
MSGVRGLSRLLSARRLALAKAWPTVLQTGTRGFHFTVDGNKRASAKVSDSISAQYPVVDHEFDAVVVGAGGAGLRAAFGLSEAGFNTACVTKLFPTRSHTVAAQGGINAALGNMEEDNWRWHFYDTVKGSDWLGDQDAIHYMTEQAPAAVVELENYGMPFSRTEDGKIYQRAFGGQSLKFGKGGQAHRCCCVADRTGHSLLHTLYGRSLRYDTSYFVEYFALDLLMENGECRGVIALCIEDGSIHRIRAKNTVVATGGYGRTYFSCTSAHTSTGDGTAMITRAGLPCQDLEFVQFHPTGIYGAGCLITEGCRGEGGILINSQGERFMERYAPVAKDLASRDVVSRSMTLEIREGRGCGPEKDHVYLQLHHLPPEQLATRLPGISETAMIFAGVDVTKEPIPVLPTVHYNMGGIPTNYKGQVLRHVNGQDQIVPGLYACGEAACASVHGANRLGANSLLDLVVFGRACALSIEESCRPGDKVPPIKPNAGEESVMNLDKLRFADGSIRTSELRLSMQKVRIDEYDYSKPIQGQQKKPFEEHWRKHTLSYVDVGTGKVTLEYRPVIDKTLNEADCATVPPAIRSY

SEQ ID NO: 84763 - protein, 616 aa, Homo sapiens
  Payload ID: 16861
  Gene Symbol: SDHA
  Gene Name: succinate dehydrogenase complex, subunit A, flavoprotein (Fp)
  Uniprot ID: P31040
  ENSP ID: ENSP00000427703
MSGVRGLSRLLSARRLALAKAWPTVLQTGTRGFHFTVDGNKRASAKVSDSISAQYPVVDHEFDAVVVGAGGAGLRAAFGLSEAGFNTACVTKLFPTRSHTVAAQLENYGMPFSRTEDGKIYQRAFGGQSLKFGKGGQAHRCCCVADRTGHSLLHTLYGRSLRYDTSYFVEYFALDLLMENGECRGVIALCIEDGSIHRIRAKNTVVATGGYGRTYFSCTSAHTSTGDGTAMITRAGLPCQDLEFVQFHPTGIYGAGCLITEGCRGEGGILINSQGERFMERYAPVAKDLASRDVVSRSMTLEIREGRGCGPEKDHVYLQLHHLPPEQLATRLPGISETAMIFAGVDVTKEPIPVLPTVHYNMGGIPTNYKGQVLRHVNGQDQIVPGLYACGEAACASVHGANRLGANSLLDLVVFGRACALSIEESCRPGDKVPPIKPNAGEESVMNLDKLRFADGSIRTSELRLSMQKSMQNHAAVFRVGSVLQEGCGKISKLYGDLKHLKTFDRGMVWNTDLVETLELQNLMLCALQTIYGAEARKESRGAHAREDYKVRIDEYDYSKPIQGQQKKPFEEHWRKHTLSYVDVGTGKVTLEYRPVIDKTLNEADCATVPPAIRSY

SEQ ID NO: 84764 - protein, 519 aa, Homo sapiens
  Payload ID: 16861
  Gene Symbol: SDHA
  Gene Name: succinate dehydrogenase complex, subunit A, flavoprotein (Fp)
  ENSP ID: ENSP00000484230
MSGVRGLSRLLSARRLALAKAWPTVLQTGTRGFHFTVDGNKRASAKVSDSISAQYPVVDHEFDAVVVGAGGAGLRAAFGLSEAGFNTACVTKLFPTRSHTVAAQGGINAALGNMEEDNWRWHFYDTVTGDGTAMITRAGLPCQDLEFVQFHPTGIYGAGCLITEGCRGEGGILINSQGERFMERYAPVAKDLASRDVVSRSMTLEIREGRGCGPEKDHVYLQLHHLPPEQLATRLPGISETAMIFAGVDVTKEPIPVLPTVHYNMGGIPTNYKGQVLRHVNGQDQIVPGLYACGEAACASVHGANRLGANSLLDLVVFGRACALSIEESCRPGDKVPPIKPNAGEESVMNLDKLRFADGSIRTSELRLSMQKSMQNHAAVFRVGSVLQEGCGKISKLYGDLKHLKTFDRGMVWNTDLVETLELQNLMLCALQTIYGAEARKESRGAHAREDYKVRIDEYDYSKPIQGQQKKPFEEHWRKHTLSYVDVGTGKVTLEYRPVIDKTLNEADCATVPPAIRSY

SEQ ID NO: 84765 - protein, 280 aa, Homo sapiens
  Payload ID: 16862
  Gene Symbol: SDHB
  Gene Name: succinate dehydrogenase complex, subunit B, iron sulfur (Ip)
  Uniprot ID: P21912
  ENSP ID: ENSP00000364649
MAAVVALSLRRRLPATTLGGACLQASRGAQTAAATAPRIKKFAIYRWDPDKAGDKPHMQTYEVDLNKCGPMVLDALIKIKNEVDSTLTFRRSCREGICGSCAMNINGGNTLACTRRIDTNLNKVSKIYPLPHMYVIKDLVPDLSNFYAQYKSIEPYLKKKDESQEGKQQYLQSIEEREKLDGLYECILCACCSTSCPSYWWNGDKYLGPAVLMQAYRWMIDSRDDFTEERLAKLQDPFSLYRCHTIMNCTRTCPKGLNPGKAIAEIKKMMATYKEKKASV

SEQ ID NO: 84766 - protein, 200 aa, Homo sapiens
  Payload ID: 16862
  Gene Symbol: SDHB
  Gene Name: succinate dehydrogenase complex, subunit B, iron sulfur (Ip)
  ENSP ID: ENSP00000480482
MFNLTLVHYKASRGAQTAAATAPRIKKFAIYRWDPDKAGDKPHMQTYEVDLNKCGPMVLDALIKIKNEVDSTLTFRRSCREGICGSCAMNINGGNTLACTRRIDTNLNKVSKIYPLPHMYVIKDLVPDLSNFYAQYKSIEPYLKKKDESQEGKQQYLQSIEEREKLDGLYECILCACCSTSCPSYWWNGDKYLGPAVLMQ

SEQ ID NO: 84767 - protein, 123 aa, Homo sapiens
  Payload ID: 16862
  Gene Symbol: SDHB
  Gene Name: succinate dehydrogenase complex, subunit B, iron sulfur (Ip)
  ENSP ID: ENSP00000481376
MQTYEVDLNKCGPMVLDALIKIKNEVDSTLTFRRSCREGICGSCAMNINGGNTLACTRRIDTNLNKVSKIYPLPHMYVIKDLVPDLSNFYAQYKSIEPYLKKKDESQEGKQQYLQSIEEREKL

SEQ ID NO: 84768 - protein, 150 aa, Homo sapiens
  Payload ID: 16863
  Gene Symbol: SDHC
  Gene Name: succinate dehydrogenase complex, subunit C, integral membrane protein, 15kDa
  Uniprot ID: Q99643
  ENSP ID: ENSP00000356952
MAALLLRHVGRHCLRAHFSPQLCIRNAVPLGTTAKEEMERFWNKNIGSNRPLSPHITIYSWSLPMAMSICHRGTGIALSADVGPRKRPEDSPAIPVWSGCPGSYCVVLYGAGSHVKKGGSQHHLPTHYYIHPSFCLSFLSPAWEKFSLFV

SEQ ID NO: 84769 - protein, 169 aa, Homo sapiens
  Payload ID: 16863
  Gene Symbol: SDHC
  Gene Name: succinate dehydrogenase complex, subunit C, integral membrane protein, 15kDa
  Uniprot ID: Q99643
  ENSP ID: ENSP00000356953
MAALLLRHVGRHCLRAHFSPQLCIRNAVPLGTTAKEEMERFWNKNIGSNRPLSPHITIYSWSLPMAMSICHRGTGIALSAGVSLFGMSALLLPGNFESYLELVKSLCLGPALIHTAKFALVFPLMYHTWNGIRHLMWDLGKGLKIPQLYQSGVVVLVLTVLSSMGLAAM

SEQ ID NO: 84770 - protein, 116 aa, Homo sapiens
  Payload ID: 16863
  Gene Symbol: SDHC
  Gene Name: succinate dehydrogenase complex, subunit C, integral membrane protein, 15kDa
  Uniprot ID: Q99643
  ENSP ID: ENSP00000376009
MAALLLSWSLPMAMSICHRGTGIALSAGVSLFGMSALLLPGNFESYLELVKSLCLGPALIHTAKFALVFPLMYHTWNGIRHLMWDLGKGLKIPQLYQSGVVVLVLTVLSSMGLAAM

SEQ ID NO: 84771 - protein, 135 aa, Homo sapiens
  Payload ID: 16863
  Gene Symbol: SDHC
  Gene Name: succinate dehydrogenase complex, subunit C, integral membrane protein, 15kDa
  Uniprot ID: Q99643
  ENSP ID: ENSP00000390558
MAALLLRHVGRHCLRAHFSPQLCIRNWSLPMAMSICHRGTGIALSAGVSLFGMSALLLPGNFESYLELVKSLCLGPALIHTAKFALVFPLMYHTWNGIRHLMWDLGKGLKIPQLYQSGVVVLVLTVLSSMGLAAM

SEQ ID NO: 84772 - protein, 116 aa, Homo sapiens
  Payload ID: 16863
  Gene Symbol: SDHC
  Gene Name: succinate dehydrogenase complex, subunit C, integral membrane protein, 15kDa
  Uniprot ID: Q99643
  ENSP ID: ENSP00000423260
MAALLLRHVGRHCLRAHFSPQLCIRNWSLPMAMSICHRGTGIALSADVGPRKRPEDSPAIPVWSGCPGSYCVVLYGAGSHVKKGGSQHHLPTHYYIHPSFCLSFLSPAWEKFSLFV

SEQ ID NO: 84773 - protein, 67 aa, Homo sapiens
  Payload ID: 16863
  Gene Symbol: SDHC
  Gene Name: succinate dehydrogenase complex, subunit C, integral membrane protein, 15kDa
  ENSP ID: ENSP00000423929
MAALLLRHVGRHCLRAHFSPQLCIRNAVPLGTTAKEEMERFWNKNIGSNRPLSPHITIYSPISDAVW

SEQ ID NO: 84774 - protein, 32 aa, Homo sapiens
  Payload ID: 16863
  Gene Symbol: SDHC
  Gene Name: succinate dehydrogenase complex, subunit C, integral membrane protein, 15kDa
  ENSP ID: ENSP00000482902
  MOD_RES (1)..(1): Any amino acid
XHVGRHCLRAHFSPQLCIRKVSFCRPGWSVVA

SEQ ID NO: 84775 - protein, 159 aa, Homo sapiens
  Payload ID: 16864
  Gene Symbol: SDHD
  Gene Name: succinate dehydrogenase complex, subunit D, integral membrane protein
  Uniprot ID: O14521
  ENSP ID: ENSP00000364699
MAVLWRLSAVCGALGGRALLLRTPVVRPAHISAFLQDRPIPEWCGVQHIHLSPSHHSGSKAASLHWTSERVVSVLLLGLLPAAYLNPCSAMDYSLAAALTLHGHWGLGQVVTDYVHGDALQKAAKAGLLALSALTFAGLCYFNYHDVGICKAVAMLWKL

SEQ ID NO: 84776 - protein, 143 aa, Homo sapiens
  Payload ID: 16864
  Gene Symbol: SDHD
  Gene Name: succinate dehydrogenase complex, subunit D, integral membrane protein
  Uniprot ID: O14521
  ENSP ID: ENSP00000432005
MAVLWRLSAVCGALGGRALLLRTPVVRPAHISAFLQDRPIPEWCGVQHIHLSPSHHSGSKAASLHWTSERVVSVLLLGLLPAAYLNPCSAMDYSLAAALTLHGHWLECNGAILARHDLGSARSQLTATSAFRVQAILLPQPPK

SEQ ID NO: 84777 - protein, 104 aa, Homo sapiens
  Payload ID: 16864
  Gene Symbol: SDHD
  Gene Name: succinate dehydrogenase complex, subunit D, integral membrane protein
  ENSP ID: ENSP00000432465
MAVLWRLSAVCGALGGRALLLRTPVVRPAHISAFLQDRPIPEWCGVQHIHLSPSHHSGSKAASLHWTSERVVSVLLLGLLPAAYLNPCSAMDYSLAAALTLHGH

SEQ ID NO: 84778 - protein, 101 aa, Homo sapiens
  Payload ID: 16864
  Gene Symbol: SDHD
  Gene Name: succinate dehydrogenase complex, subunit D, integral membrane protein
  ENSP ID: ENSP00000432946
  MOD_RES (1)..(1): Any amino acid
XWRLSAVCGALGGRALLLRTPVVRPAHISAFLQDRPIPEWCGVQHIHLSPSHHSGSKAASLHWTSERVVSVLLLGLLPAAYLNPCSAMDYSLAAALTLHGH

SEQ ID NO: 84779 - protein, 55 aa, Homo sapiens
  Payload ID: 16864
  Gene Symbol: SDHD
  Gene Name: succinate dehydrogenase complex, subunit D, integral membrane protein
  ENSP ID: ENSP00000433202
  MOD_RES (1)..(1): Any amino acid
XGSKAASLHWTSERVVSVLLLGLLPAAYLNPCSAMDYSLAAALTLHGHWKIKNNE

SEQ ID NO: 84780 - protein, 131 aa, Homo sapiens
  Payload ID: 16864
  Gene Symbol: SDHD
  Gene Name: succinate dehydrogenase complex, subunit D, integral membrane protein
  ENSP ID: ENSP00000435475
MAVLWRLSAVCGALGGRALLLRTPVVRPAHISAFLQDRPIPEWCGVQHIHLSPSHHSGSKAASLHWTSERVVSVLLLGLLPAAYLNPCSAMDYSLAAALTLHGALDKLLLTMFMGMPCRKLPRQGFWHFQL

SEQ ID NO: 84781 - protein, 85 aa, Homo sapiens
  Payload ID: 16864
  Gene Symbol: SDHD
  Gene Name: succinate dehydrogenase complex, subunit D, integral membrane protein
  Uniprot ID: O14521
  ENSP ID: ENSP00000436217
MAVLWRLSAVCGALGGRALLLRTPVVRPAHISAFLQDRPIPEWCGVQHIHLSPSHHWALDKLLLTMFMGMPCRKLPRQGFWHFQL

SEQ ID NO: 84782 - protein, 120 aa, Homo sapiens
  Payload ID: 16864
  Gene Symbol: SDHD
  Gene Name: succinate dehydrogenase complex, subunit D, integral membrane protein
  Uniprot ID: O14521
  ENSP ID: ENSP00000436669
MAVLWRLSAVCGALGGRAGSKAASLHWTSERVVSVLLLGLLPAAYLNPCSAMDYSLAAALTLHGHWGLGQVVTDYVHGDALQKAAKAGLLALSALTFAGLCYFNYHDVGICKAVAMLWKL

SEQ ID NO: 84783 - protein, 143 aa, Homo sapiens; identical to SEQ ID NO: 84776
  Payload ID: 16864
  Gene Symbol: SDHD
  Gene Name: succinate dehydrogenase complex, subunit D, integral membrane protein
  Uniprot ID: O14521
  ENSP ID: ENSP00000480666

SEQ ID NO: 84784 - protein, 334 aa, Homo sapiens
  Payload ID: 16865
  Gene Symbol: SUCNR1
  Gene Name: succinate receptor 1
  Uniprot ID: Q9BXA5
  ENSP ID: ENSP00000355156
MLGIMAWNATCKNWLAAEAALEKYYLSIFYGIEFVVGVLGNTIVVYGYIFSLKNWNSSNIYLFNLSVSDLAFLCTLPMLIRSYANGNWIYGDVLCISNRYVLHANLYTSILFLTFISIDRYLIIKYPFREHLLQKKEFAILISLAIWVLVTLELLPILPLINPVITDNGTTCNDFASSGDPNYNLIYSMCLTLLGFLIPLFVMCFFYYKIALFLKQRNRQVATALPLEKPLNLVIMAVVIFSVLFTPYHVMRNVRIASRLGSWKQYQCTQVVINSFYIVTRPLAFLNSVINPVFYFLLGDHFRDMLMNQLRHNFKSLTSFSRWAHELLLSFREK

SEQ ID NO: 84785 - protein, 463 aa, Homo sapiens
  Payload ID: 16866
  Gene Symbol: SUCLA2
  Gene Name: succinate-CoA ligase, ADP-forming, beta subunit
  Uniprot ID: Q9P2R7
  ENSP ID: ENSP00000367923
MAASMFYGRLVAVATLRNHRPRTAQRAAAQVLGSSGLFNNHGLQVQQQQQRNLSLHEYMSMELLQEAGVSVPKGYVAKSPDEAYAIAKKLGSKDVVIKAQVLAGGRGKGTFESGLKGGVKIVFSPEEAKAVSSQMIGKKLFTKQTGEKGRICNQVLVCERKYPRREYYFAITMERSFQGPVLIGSSHGGVNIEDVAAESPEAIIKEPIDIEEGIKKEQALQLAQKMGFPPNIVESAAENMVKLYSLFLKYDATMIEINPMVEDSDGAVLCMDAKINFDSNSAYRQKKIFDLQDWTQEDERDKDAAKANLNYIGLDGNIGCLVNGAGLAMATMDIIKLHGGTPANFLDVGGGATVHQVTEAFKLITSDKKVLAILVNIFGGIMRCDVIAQGIVMAVKDLEIKIPVVVRLQGTRVDDAKALIADSGLKILACDDLDEAARMVVKLSEIVTLAKQAHVDVKFQLPI

SEQ ID NO: 84786 - protein, 298 aa, Homo sapiens
  Payload ID: 16866
  Gene Symbol: SUCLA2
  Gene Name: succinate-CoA ligase, ADP-forming, beta subunit
  ENSP ID: ENSP00000392771
SGRGHPSEPPASDGPAGCCSGSKDVVIKAQVLAGGRGKGTFESGLKGGVKIVFSPEEAKAVSSQMIGKKLFTKQTGEKGRICNQVLVCERKYPRREYYFAITMERSFQGPVLIGSSHGGVNIEDVAAESPEAIIKEPIDIEEGIKKEQALQLAQKMGFPPNIVESAAENMVKLYSLFLKYDATMIEINPMVEDSDGAVLCMDAKINFDSNSAYRQKKIFDLQDWTQEDERDKDAAKANLNYIGLDGNIGCLVNGAGLAMATMDIIKLHGGTPANFLDVGGGATVHQVTEAFKLITSDK

SEQ ID NO: 84787 - protein, 154 aa, Homo sapiens
  Payload ID: 16866
  Gene Symbol: SUCLA2
  Gene Name: succinate-CoA ligase, ADP-forming, beta subunit
  ENSP ID: ENSP00000415091
MAASMFYGRLVAVATLRNHRPRTAQRAAAQGPVLIGSSHGGVNIEDVAAESPEAIIKEPIDIEEGIKKEQALQLAQKMGFPPNIVESAAENMVKLYSLFLKYDATMIEINPMVEDSDGAVLCMDAKINFDSNSAYRQKKIFDLQDWTQEDERDK

SEQ ID NO: 84788 - protein, 191 aa, Homo sapiens
  Payload ID: 16866
  Gene Symbol: SUCLA2
  Gene Name: succinate-CoA ligase, ADP-forming, beta subunit
  ENSP ID: ENSP00000488974
MAASMFYGRLVAVATLRNHRPRTAQRAAAQVLGSSGLFNNHGLQVQQQQQRNLSLHEYMSMELLQEAGVSVPKGYVAKSPDEAYAIAKKLGSKDVVIKAQVLAGGRGKGTFESGLKGGVKIVFSPEEAKAVSSQMIGKKLFTKQTGEKGRICNQVLVCERKYPRREYYFAITMERSFQVSNCRHDTYGINL

SEQ ID NO: 84789 - protein, 80 aa, Homo sapiens
  Payload ID: 16866
  Gene Symbol: SUCLA2
  Gene Name: succinate-CoA ligase, ADP-forming, beta subunit
  ENSP ID: ENSP00000489055
CDVIAQGIVMAVKDLEIKIPVVVRLQGTRVDDAKALIADSGLKILACDDLDEAARMVVKLSEIVTLAKQAHVDVKFQLPI

SEQ ID NO: 84790 - protein, 136 aa, Homo sapiens
  Payload ID: 16866
  Gene Symbol: SUCLA2
  Gene Name: succinate-CoA ligase, ADP-forming, beta subunit
  ENSP ID: ENSP00000489175
AASMFYGRLVAVATLRNHRPRTAQRAAAQVLGSSGLFNNHGLQVQQQQQRNLSLHEYMSMELLQEAGVSVPKGYVAKSPDEAYAIAKKLGTEERNNMCRINCNYEYFWQVLWDQNSQVIRSRFKRCRDKGTGFSWW

SEQ ID NO: 84791 - protein, 104 aa, Homo sapiens
  Payload ID: 16866
  Gene Symbol: SUCLA2
  Gene Name: succinate-CoA ligase, ADP-forming, beta subunit
  ENSP ID: ENSP00000489542
  MOD_RES (1)..(1): Any amino acid
XFQGPVLIGSSHGGVNIEDVAAESPEAIIKEPIDIEEGIKKEQALQLAQKMGFPPNIVESAAENMVKLYSLFLKYDATMIEINPMVEDSDGADEDLPTLALLTF

SEQ ID NO: 84792 - protein, 346 aa, Homo sapiens
  Payload ID: 16867
  Gene Symbol: SUCLG1
  Gene Name: succinate-CoA ligase, alpha subunit
  Uniprot ID: P53597
  ENSP ID: ENSP00000377446
MTATLAAAADIATMVSGSSGLAAARLLSRSFLLPQNGIRHCSYTASRQHLYVDKNTKIICQGFTGKQGTFHSQQALEYGTKLVGGTTPGKGGQTHLGLPVFNTVKEAKEQTGATASVIYVPPPFAAAAINEAIEAEIPLVVCITEGIPQQDMVRVKHKLLRQEKTRLIGPNCPGVINPGECKIGIMPGHIHKKGRIGIVSRSGTLTYEAVHQTTQVGLGQSLCVGIGGDPFNGTDFIDCLEIFLNDSATEGIILIGEIGGNAEENAAEFLKQHNSGPNSKPVVSFIAGLTAPPGRRMGHAGAIIAGGKGGAKEKISALQSAGVVVSMSPAQLGTTIYKEFEKRKML

SEQ ID NO: 84793 - protein, 105 aa, Homo sapiens
  Payload ID: 16867
  Gene Symbol: SUCLG1
  Gene Name: succinate-CoA ligase, alpha subunit
  ENSP ID: ENSP00000403884
  MOD_RES (1)..(1): Any amino acid
XTLAAAADIATMVSGSSGLAAARLLSRSFLLPQNGIRHCSYTASRQHLYVDKNTKIICQGFTGKQELLLLTRHLSQPAGIGIWHQTRWRNHSRERRPDTSGLTCL

SEQ ID NO: 84794 - protein, 432 aa, Homo sapiens
  Payload ID: 16868
  Gene Symbol: SUCLG2
  Gene Name: succinate-CoA ligase, GDP-forming, beta subunit
  Uniprot ID: Q96I99
  ENSP ID: ENSP00000307432
MASPVAAQAGKLLRALALRPRFLAAGSQAVQLTSRRWLNLQEYQSKKLMSDNGVRVQRFFVADTANEALEAAKRLNAKEIVLKAQILAGGRGKGVFNSGLKGGVHLTKDPNVVGQLAKQMIGYNLATKQTPKEGVKVNKVMVAEALDISRETYLAILMDRSCNGPVLVGSPQGGVDIEEVAASNPELIFKEQIDIFEGIKDSQAQRMAENLGFVGPLKSQAADQITKLYNLFLKIDATQVEVNPFGETPEGQVVCFDAKINFDDNAEFRQKDIFAMDDKSENEPIENEAAKYDLKYIGLDGNIACFVNGAGLAMATCDIIFLNGGKPANFLDLGGGVKEAQVYQAFKLLTADPKVEAILVNIFGGIVNCAIIANGITKACRELELKVPLVVRLEGTNVQEAQKILNNSGLPITSAIDLEDAAKKAVASVAKK

SEQ ID NO: 84795 - protein, 190 aa, Homo sapiens
  Payload ID: 16868
  Gene Symbol: SUCLG2
  Gene Name: succinate-CoA ligase, GDP-forming, beta subunit
  ENSP ID: ENSP00000417260
  MOD_RES (1)..(1): Any amino acid
XPNVVGQLAKQMIGYNLATKQTPKEGVKVNKVMVAEALDISRETYLAILMDRSCNGPVLVGSPQGGVDIEEVAASNPELIFKEQIDIFEGIKDSQAQRMAENLGFVGPLKSQVEAILVNIFGGIVNCAIIANGITKACRELELKVPLVVRLEGTNVQEAQKILNNSGLPITSAIDLEDAAKKAVASVAKK

SEQ ID NO: 84796 - protein, 379 aa, Homo sapiens
  Payload ID: 16868
  Gene Symbol: SUCLG2
  Gene Name: succinate-CoA ligase, GDP-forming, beta subunit
  ENSP ID: ENSP00000417589
MASPVAAQAGKLLRALALRPRFLAAGSQAVQLTSRRWLNLQEYQSKKLMSDNGVRVQRFFVADTANEALEAAKRLNAKEIVLKAQILAGGRGKGVFNSGLKGGVHLTKDPNVVGQLAKQMIGYNLATKQTPKEGVKVNKVMVAEALDISRETYLAILMDRSCNGPVLVGSPQGGVDIEEVAASNPELIFKEQIDIFEGIKDSQAQRMAENLGFVGPLKSQAADQITKLYNLFLKIDATQVEVNPFGETPEGQVVCFDAKINFDDNAEFRQKDIFAMDDKSENEPIENEAAKYDLKYIGLDGNIACFVNGAGLAMATCDIIFLNGGKPANFLDLGGGVKEAQVYQAFKLLTADPKQQNLKARNTWAPEYRTQKHVLEAWK

SEQ ID NO: 84797 - protein, 440 aa, Homo sapiens
  Payload ID: 16868
  Gene Symbol: SUCLG2
  Gene Name: succinate-CoA ligase, GDP-forming, beta subunit
  Uniprot ID: Q96I99
  ENSP ID: ENSP00000419325
MASPVAAQAGKLLRALALRPRFLAAGSQAVQLTSRRWLNLQEYQSKKLMSDNGVRVQRFFVADTANEALEAAKRLNAKEIVLKAQILAGGRGKGVFNSGLKGGVHLTKDPNVVGQLAKQMIGYNLATKQTPKEGVKVNKVMVAEALDISRETYLAILMDRSCNGPVLVGSPQGGVDIEEVAASNPELIFKEQIDIFEGIKDSQAQRMAENLGFVGPLKSQAADQITKLYNLFLKIDATQVEVNPFGETPEGQVVCFDAKINFDDNAEFRQKDIFAMDDKSENEPIENEAAKYDLKYIGLDGNIACFVNGAGLAMATCDIIFLNGGKPANFLDLGGGVKEAQVYQAFKLLTADPKVEAILVNIFGGIVNCAIIANGITKACRELELKVPLVVRLEGTFMEKKGSYMHIKQETGNSNENITGIQENVAHQNLSKCAISIFLC

SEQ ID NO: 84798 - protein, 445 aa, Homo sapiens
  Payload ID: 16869
  Gene Symbol: SUGCT
  Gene Name: succinyl-CoA:glutarate-CoA transferase
  Uniprot ID: Q9HAC7
  ENSP ID: ENSP00000338475
MPSETHAMLATLARVAALRRTCLFSGRGGGRGLWTGRPQSDMNNIKPLEGVKILDLTRVLAGPFATMNLGDLGAEVIKVERPGAGDDTRTWGPPFVGTESTYYLSVNRNKKSIAVNIKDPKGVKIIKELAAVCDVFVENYVPGKLSAMGLGYEDIDEIAPHIIYCSITGYGQTGPISQRAGYDAVASAVSGLMHITGPENGDPVRPGVAMTDLATGLYAYGAIMAGLIQKYKTGKGLFIDCNLLSSQVACLSHIAANYLIGQKEAKRWGTAHGSIVPYQAFKTKDGYIVVGAGNNQQFATVCKILDLPELIDNSKYKTNHLRVHNRKELIKILSERFEEELTSKWLYLFEGSGVPYGPINNMKNVFAEPQVLHNGLVMEMEHPTVGKISVPGPAVRYSKFKMSEARPPPLLGQHTTHILKEVLRYDDRAIGELLSAGVVDQHETH

SEQ ID NO: 84799 - protein, 397 aa, Homo sapiens
  Payload ID: 16869
  Gene Symbol: SUGCT
  Gene Name: succinyl-CoA:glutarate-CoA transferase
  Uniprot ID: Q9HAC7
  ENSP ID: ENSP00000385222
MPSETHAMLATLARVAALRRTCLFSGRGGGRGLWTGRPQSDMNNIKPLEGVKILDLTRVLAGPFATMNLGDLGAEVIKVERPGAGDDTRTWGPPFVGTESTYYLSVNRNKKSIAVNIKDPKGVKIIKELAAVCDVFVENYVPGKLSAMGLGYEDIDEIAPHIIYCSITGYGQTGPISQRAGYDAVASAVSGLMHITGPEVACLSHIAANYLIGQKEAKRWGTAHGSIVPYQAFKTKDGYIVVGAGNNQQFATVCKILDLPELIDNSKYKTNHLRVHNRKELIKILSERFEEELTSKWLYLFEGSGVPYGPINNMKNVFAEPQVLHNGLVMEMEHPTVGKISVPGPAVRYSKFKMSEARPPPLLGQHTTHILKEVLRYDDRAIGELLSAGVVDQHETH

SEQ ID NO: 84800 - protein, 421 aa, Homo sapiens
  Payload ID: 16869
  Gene Symbol: SUGCT
  Gene Name: succinyl-CoA:glutarate-CoA transferase
  ENSP ID: ENSP00000393032
  MOD_RES (1)..(1): Any amino acid
XAMLATLARVAALRRTCLFSGRGGGRGLWTGRPQSDMNNIKPLEGVKILDLTRVLAGPFATMNLGDLGAEVIKVERPGAGDDTRTWGPPFVGTESTYYLSVNRNKKSIAVNIKDPKGVKIIKELAAVCDVFVENYVPGKLSAMGLGYEDIDEIAPHIIYCSITGYGQTGPISQRAGYDAVASAVSGLMHITGPENGDPVRPGVAMTDLATGLYAYGAIMAGLIQKYKTGKGLFIDCNLLSSQVACLSHIAANYLIGQKEAKRWGTAHGSIVPYQAFKTKDGYIVVGAGNNQQFATVCKILDLPELIDNSKYKTNHLRVHNRKELIKILSERFEEELTSKWLYLFEGSGVPYGPINNMKNVFAEPQVSSLVLPLMSCRVSWRLVHGNGHFCSDVGTHHWRVWPTLHVRCASTAASSTGNCFG

SEQ ID NO: 84801 - protein, 180 aa, Homo sapiens
  Payload ID: 16869
  Gene Symbol: SUGCT
  Gene Name: succinyl-CoA:glutarate-CoA transferase
  ENSP ID: ENSP00000395000
  MOD_RES (1)..(1): Any amino acid
XRDAGDAGEGGSSAQNLPLLRPGRREGAVDWPPAVSKAMYFYRRMRPYRWNNDMNNIKPLEGVKILDLTRVLAGPFATMNLGDLGAEVIKVERPGAGDDTRTWGPPFVGTESTYYLSVNRNKKSIAVNIKDPKGVKIIKELAAVCDVFVENYVPGKLSAMGLGYEDIDEIAPHIIYCSIT

SEQ ID NO: 84802 - protein, 49 aa, Homo sapiens
  Payload ID: 16869
  Gene Symbol: SUGCT
  Gene Name: succinyl-CoA:glutarate-CoA transferase
  ENSP ID: ENSP00000401187
  MOD_RES (1)..(1): Any amino acid
XPSETHAMLATLARVAALRRTCLFSGRGGGRGLWTGRPQSESWRDLLLL

SEQ ID NO: 84803 - protein, 471 aa, Homo sapiens
  Payload ID: 16869
  Gene Symbol: SUGCT
  Gene Name: succinyl-CoA:glutarate-CoA transferase
  Uniprot ID: Q9HAC7
  ENSP ID: ENSP00000486291
MPSETHAMLATLARVAALRRTCLFSGRGGGRGLWTGRPQSDMNNIKPLEGVKILDLTRVLAGPFATMNLGDLGAEVIKVERPGAGDDTRTWGPPFVGTESTYYLSVNRNKKSIAVNIKDPKGVKIIKELAAVCDVFVENYVPGKLSAMGLGYEDIDEIAPHIIYCSITGYGQTGPISQRAGYDAVASAVSGLMHITGPENGDPVRPGVAMTDLATGLYAYGAIMAGLIQKYKTGKGLFIDCNLLSSQVACLSHIAANYLIGQKEAKRWGTAHGSIVPYQAFKTKDGYIVVGAGNNQQFATVCKILDLPELIDNSKYKTNHLRVHNRKELIKILSERFEEELTSKWLYLFEGSGVPYGPINNMKNVFAEPQNAVSGFQSLLHSLAHGPFLHLQGSARVLHNGLVMEMEHPTVGKISVPGPAVRYSKFKMSEARPPPLLGQHTTHILKEVLRYDDRAIGELLSAGVVDQHETH

SEQ ID NO: 84804 - protein, 1827 aa, Homo sapiens
  Payload ID: 16870
  Gene Symbol: SI
  Gene Name: sucrase-isomaltase (alpha-glucosidase)
  Uniprot ID: P14410
  ENSP ID: ENSP00000264382
MARKKFSGLEISLIVLFVIVTIIAIALIVVLATKTPAVDEISDSTSTPATTRVTTNPSDSGKCPNVLNDPVNVRINCIPEQFPTEGICAQRGCCWRPWNDSLIPWCFFVDNHGYNVQDMTTTSIGVEAKLNRIPSPTLFGNDINSVLFTTQNQTPNRFRFKITDPNNRRYEVPHQYVKEFTGPTVSDTLYDVKVAQNPFSIQVIRKSNGKTLFDTSIGPLVYSDQYLQISTRLPSDYIYGIGEQVHKRFRHDLSWKTWPIFTRDQLPGDNNNNLYGHQTFFMCIEDTSGKSFGVFLMNSNAMEIFIQPTPIVTYRVTGGILDFYILLGDTPEQVVQQYQQLVGLPAMPAYWNLGFQLSRWNYKSLDVVKEVVRRNREAGIPFDTQVTDIDYMEDKKDFTYDQVAFNGLPQFVQDLHDHGQKYVIILDPAISIGRRANGTTYATYERGNTQHVWINESDGSTPIIGEVWPGLTVYPDFTNPNCIDWWANECSIFHQEVQYDGLWIDMNEVSSFIQGSTKGCNVNKLNYPPFTPDILDKLMYSKTICMDAVQNWGKQYDVHSLYGYSMAIATEQAVQKVFPNKRSFILTRSTFAGSGRHAAHWLGDNTASWEQMEWSITGMLEFSLFGIPLVGADICGFVAETTEELCRRWMQLGAFYPFSRNHNSDGYEHQDPAFFGQNSLLVKSSRQYLTIRYTLLPFLYTLFYKAHVFGETVARPVLHEFYEDTNSWIEDTEFLWGPALLITPVLKQGADTVSAYIPDAIWYDYESGAKRPWRKQRVDMYLPADKIGLHLRGGYIIPIQEPDVTTTASRKNPLGLIVALGENNTAKGDFFWDDGETKDTIQNGNYILYTFSVSNNTLDIVCTHSSYQEGTTLAFQTVKILGLTDSVTEVRVAENNQPMNAHSNFTYDASNQVLLIADLKLNLGRNFSVQWNQIFSENERFNCYPDADLATEQKCTQRGCVWRTGSSLSKAPECYFPRQDNSYSVNSARYSSMGITADLQLNTANARIKLPSDPISTLRVEVKYHKNDMLQFKIYDPQKKRYEVPVPLNIPTTPISTYEDRLYDVEIKENPFGIQIRRRSSGRVIWDSWLPGFAFNDQFIQISTRLPSEYIYGFGEVEHTAFKRDLNWNTWGMFTRDQPPGYKLNSYGFHPYYMALEEEGNAHGVFLLNSNAMDVTFQPTPALTYRTVGGILDFYMFLGPTPEVATKQYHEVIGHPVMPAYWALGFQLCRYGYANTSEVRELYDAMVAANIPYDVQYTDIDYMERQLDFTIGEAFQDLPQFVDKIRGEGMRYIIILDPAISGNETKTYPAFERGQQNDVFVKWPNTNDICWAKVWPDLPNITIDKTLTEDEAVNASRAHVAFPDFFRTSTAEWWAREIVDFYNEKMKFDGLWIDMNEPSSFVNGTTTNQCRNDELNYPPYFPELTKRTDGLHFRTICMEAEQILSDGTSVLHYDVHNLYGWSQMKPTHDALQKTTGKRGIVISRSTYPTSGRWGGHWLGDNYARWDNMDKSIIGMMEFSLFGMSYTGADICGFFNNSEYHLCTRWMQLGAFYPYSRNHNIANTRRQDPASWNETFAEMSRNILNIRYTLLPYFYTQMHEIHANGGTVIRPLLHEFFDEKPTWDIFKQFLWGPAFMVTPVLEPYVQTVNAYVPNARWFDYHTGKDIGVRGQFQTFNASYDTINLHVRGGHILPCQEPAQNTFYSRQKHMKLIVAADDNQMAQGSLFWDDGESIDTYERDLYLSVQFNLNQTTLTSTILKRGYINKSETRLGSLHVWGKGTTPVNAVTLTYNGNKNSLPFNEDTTNMILRIDLTTHNVTLEEPIEINWS

SEQ ID NO: 84805 - protein, 46 aa, Homo sapiens
  Payload ID: 16870
  Gene Symbol: SI
  Gene Name: sucrase-isomaltase (alpha-glucosidase)
  ENSP ID: ENSP00000419450
MARKKFSGLEISLIVLFVIVTIIAIALIVVLATKTPAVDVFSSPRN

SEQ ID NO: 84806 - protein, 871 aa, Homo sapiens
  Payload ID: 16871
  Gene Symbol: SULF1
  Gene Name: sulfatase 1
  Uniprot ID: Q8IWU6
  ENSP ID: ENSP00000260128
MKYSCCALVLAVLGTELLGSLCSTVRSPRFRGRIQQERKNIRPNIILVLTDDQDVELGSLQVMNKTRKIMEHGGATFINAFVTTPMCCPSRSSMLTGKYVHNHNVYTNNENCSSPSWQAMHEPRTFAVYLNNTGYRTAFFGKYLNEYNGSYIPPGWREWLGLIKNSRFYNYTVCRNGIKEKHGFDYAKDYFTDLITNESINYFKMSKRMYPHRPVMMVISHAAPHGPEDSAPQFSKLYPNASQHITPSYNYAPNMDKHWIMQYTGPMLPIHMEFTNILQRKRLQTLMSVDDSVERLYNMLVETGELENTYIIYTADHGYHIGQFGLVKGKSMPYDFDIRVPFFIRGPSVEPGSIVPQIVLNIDLAPTILDIAGLDTPPDVDGKSVLKLLDPEKPGNRFRTNKKAKIWRDTFLVERGKFLRKKEESSKNIQQSNHLPKYERVKELCQQARYQTACEQPGQKWQCIEDTSGKLRIHKCKGPSDLLTVRQSTRNLYARGFHDKDKECSCRESGYRASRSQRKSQRQFLRNQGTPKYKPRFVHTRQTRSLSVEFEGEIYDINLEEEEELQVLQPRNIAKRHDEGHKGPRDLQASSGGNRGRMLADSSNAVGPPTTVRVTHKCFILPNDSIHCERELYQSARAWKDHKAYIDKEIEALQDKIKNLREVRGHLKRRKPEECSCSKQSYYNKEKGVKKQEKLKSHLHPFKEAAQEVDSKLQLFKENNRRRKKERKEKRRQRKGEECSLPGLTCFTHDNNHWQTAPFWNLGSFCACTSSNNNTYWCLRTVNETHNFLFCEFATGFLEYFDMNTDPYQLTNTVHTVERGILNQLHVQLMELRSCQGYKQCNPRPKNLDVGNKDGGSYDLHRGQLWDGWEG

SEQ ID NO: 84807 - protein, 871 aa, Homo sapiens; identical to SEQ ID NO: 84806
  Payload ID: 16871
  Gene Symbol: SULF1
  Gene Name: sulfatase 1
  Uniprot ID: Q8IWU6
  ENSP ID: ENSP00000385704

SEQ ID NO: 84808 - protein, 871 aa, Homo sapiens; identical to SEQ ID NO: 84806
  Payload ID: 16871
  Gene Symbol: SULF1
  Gene Name: sulfatase 1
  Uniprot ID: Q8IWU6
  ENSP ID: ENSP00000390315

SEQ ID NO: 84809 - protein, 871 aa, Homo sapiens; identical to SEQ ID NO: 84806
  Payload ID: 16871
  Gene Symbol: SULF1
  Gene Name: sulfatase 1
  Uniprot ID: Q8IWU6
  ENSP ID: ENSP00000403040

SEQ ID NO: 84810 - protein, 56 aa, Homo sapiens
  Payload ID: 16871
  Gene Symbol: SULF1
  Gene Name: sulfatase 1
  ENSP ID: ENSP00000431308
MKYSCCALVLAVLGTELLGSLCSTVRSPRFRGRIQQERKNIRPNIILVLTDDQDVE

SEQ ID NO: 84811 - protein, 172 aa, Homo sapiens
  Payload ID: 16871
  Gene Symbol: SULF1
  Gene Name: sulfatase 1
  ENSP ID: ENSP00000431753
MKYSCCALVLAVLGTELLGSLCSTVRSPRFRGRIQQERKNIRPNIILVLTDDQDVELGSLQVMNKTRKIMEHGGATFINAFVTTPMCCPSRSSMLTGKYVHNHNVYTNNENCSSPSWQAMHEPRTFAVYLNNTGYRTAFFGKYLNEYNGSYIPPGWREWLGLIKNSRFYNYT

SEQ ID NO: 84812 - protein, 84 aa, Homo sapiens
  Payload ID: 16871
  Gene Symbol: SULF1
  Gene Name: sulfatase 1
  ENSP ID: ENSP00000432178
MKYSCCALVLAVLGTELLGSLCSTVRSPRFRGRIQQERKNIRPNIILVLTDDQDVELGSLQVMNKTRKIMEHGGATFINAFVTT

SEQ ID NO: 84813 - protein, 131 aa, Homo sapiens
  Payload ID: 16871
  Gene Symbol: SULF1
  Gene Name: sulfatase 1
  ENSP ID: ENSP00000434128
  MOD_RES (1)..(1): Any amino acid
XREVRGHLKRRKPEECSCSKQSYYNKEKGVKKQEKLKSHLHPFKEAAQEVDSKLQLFKENNRRRKKERKEKRRQRKGEECSLPGLTCFTHDNNHWQTAPFWNPHKYSAHGRTRHFESATRTTNGAQKLSRI

SEQ ID NO: 84814 - protein, 29 aa, Homo sapiens
  Payload ID: 16871
  Gene Symbol: SULF1
  Gene Name: sulfatase 1
  ENSP ID: ENSP00000436608
MKYSCCALVLAVLGTELLGSLCSTVRSPR

SEQ ID NO: 84815 - protein, 76 aa, Homo sapiens
  Payload ID: 16871
  Gene Symbol: SULF1
  Gene Name: sulfatase 1
  ENSP ID: ENSP00000436949
MKYSCCALVLAVLGTELLGSLCSTVRSPRFRGRIQQERKNIRPNIILVLTDDQDVELGSLQVMNKTRKIMEHGGAT

SEQ ID NO: 84816 - protein, 669 aa, Homo sapiens
  Payload ID: 16871
  Gene Symbol: SULF1
  Gene Name: sulfatase 1
  ENSP ID: ENSP00000480454
MVISHAAPHGPEDSAPQFSKLYPNASQHITPSYNYAPNMDKHWIMQYTGPMLPIHMEFTNILQRKRLQTLMSVDDSVERLYNMLVETGELENTYIIYTADHGYHIGQFGLVKGKSMPYDFDIRVPFFIRGPSVEPGSIVPQIVLNIDLAPTILDIAGLDTPPDVDGKSVLKLLDPEKPGNRFRTNKKAKIWRDTFLVERGKFLRKKEESSKNIQQSNHLPKYERVKELCQQARYQTACEQPGQKWQCIEDTSGKLRIHKCKGPSDLLTVRQSTRNLYARGFHDKDKECSCRESGYRASRSQRKSQRQFLRNQGTPKYKPRFVHTRQTRSLSVEFEGEIYDINLEEEEELQVLQPRNIAKRHDEGHKGPRDLQASSGGNRGRMLADSSNAVGPPTTVRVTHKCFILPNDSIHCERELYQSARAWKDHKAYIDKEIEALQDKIKNLREVRGHLKRRKPEECSCSKQSYYNKEKGVKKQEKLKSHLHPFKEAAQEVDSKLQLFKENNRRRKKERKEKRRQRKGEECSLPGLTCFTHDNNHWQTAPFWNLGSFCACTSSNNNTYWCLRTVNETHNFLFCEFATGFLEYFDMNTDPYQLTNTVHTVERGILNQLHVQLMELRSCQGYKQCNPRPKNLDVGNKDGGSYDLHRMLLFLVPCSAPLTSRAMVSDASF

SEQ ID NO: 84817 - protein, 870 aa, Homo sapiens
  Payload ID: 16872
  Gene Symbol: SULF2
  Gene Name: sulfatase 2
  Uniprot ID: Q8IWU5
  ENSP ID: ENSP00000353007
MGPPSLVLCLLSATVFSLLGGSSAFLSHHRLKGRFQRDRRNIRPNIILVLTDDQDVELGSMQVMNKTRRIMEQGGAHFINAFVTTPMCCPSRSSILTGKYVHNHNTYTNNENCSSPSWQAQHESRTFAVYLNSTGYRTAFFGKYLNEYNGSYVPPGWKEWVGLLKNSRFYNYTLCRNGVKEKHGSDYSKDYLTDLITNDSVSFFRTSKKMYPHRPVLMVISHAAPHGPEDSAPQYSRLFPNASQHITPSYNYAPNPDKHWIMRYTGPMKPIHMEFTNMLQRKRLQTLMSVDDSMETIYNMLVETGELDNTYIVYTADHGYHIGQFGLVKGKSMPYEFDIRVPFYVRGPNVEAGCLNPHIVLNIDLAPTILDIAGLDIPADMDGKSILKLLDTERPVNRFHLKKKMRVWRDSFLVERGKLLHKRDNDKVDAQEENFLPKYQRVKDLCQRAEYQTACEQLGQKWQCVEDATGKLKLHKCKGPMRLGGSRALSNLVPKYYGQGSEACTCDSGDYKLSLAGRRKKLFKKKYKASYVRSRSIRSVAIEVDGRVYHVGLGDAAQPRNLTKRHWPGAPEDQDDKDGGDFSGTGGLPDYSAANPIKVTHRCYILENDTVQCDLDLYKSLQAWKDHKLHIDHEIETLQNKIKNLREVRGHLKKKRPEECDCHKISYHTQHKGRLKHRGSSLHPFRKGLQEKDKVWLLREQKRKKKLRKLLKRLQNNDTCSMPGLTCFTHDNQHWQTAPFWTLGPFCACTSANNNTYWCMRTINETHNFLFCEFATGFLEYFDLNTDPYQLMNAVNTLDRDVLNQLHVQLMELRSCKGYKQCNPRTRNMDLGLKDGGSYEQYRQFQRRKWPEMKRPSSKSLGQLWEGWEG

SEQ ID NO: 84818 - protein, 189 aa, Homo sapiens
  Payload ID: 16872
  Gene Symbol: SULF2
  Gene Name: sulfatase 2
  ENSP ID: ENSP00000410026
MGPPSLVLCLLSATVFSLLGGSSAFLSHHRLKGRFQRDRRNIRPNIILVLTDDQDVELGSMQVMNKTRRIMEQGGAHFINAFVTTPMCCPSRSSILTGKYVHNHNTYTNNENCSSPSWQAQHESRTFAVYLNSTGYRTAFFGKYLNEYNGSYVPPGWKEWVGLLKNSRFYNYTLCRNGVKEKHGSDYSK

SEQ ID NO: 84819 - protein, 207 aa, Homo sapiens
  Payload ID: 16872
  Gene Symbol: SULF2
  Gene Name: sulfatase 2
  ENSP ID: ENSP00000417894
  MOD_RES (1)..(1): Any amino acid
XEVRGHLKKKRPEECDCHKISYHTQHKGRLKHRGSSLHPFRKGLQEKDKVWLLREQKRKKKLRKLLKRLQNNDTCSMPGLTCFTHDNQHWQTAPFWTLGPFCACTSANNNTYWCMRTINETHNFLFCEFATGFLEYFDLNTDPYQLMNAVNTLDRDVLNQLHVQLMELRSCKGYKQCNPRTRNMDLGLKDGGSYEQYRGQLWEGWEG

SEQ ID NO: 84820 - protein, 870 aa, Homo sapiens; identical to SEQ ID NO: 84817
  Payload ID: 16872
  Gene Symbol: SULF2
  Gene Name: sulfatase 2
  Uniprot ID: Q8IWU5
  ENSP ID: ENSP00000418290

SEQ ID NO: 84821 - protein, 867 aa, Homo sapiens
  Payload ID: 16872
  Gene Symbol: SULF2
  Gene Name: sulfatase 2
  Uniprot ID: Q8IWU5
  ENSP ID: ENSP00000418442
MGPPSLVLCLLSATVFSLLGGSSAFLSHHRLKGRFQRDRRNIRPNIILVLTDDQDVELGSMQVMNKTRRIMEQGGAHFINAFVTTPMCCPSRSSILTGKYVHNHNTYTNNENCSSPSWQAQHESRTFAVYLNSTGYRTAFFGKYLNEYNGSYVPPGWKEWVGLLKNSRFYNYTLCRNGVKEKHGSDYSKDYLTDLITNDSVSFFRTSKKMYPHRPVLMVISHAAPHGPEDSAPQYSRLFPNASQHITPSYNYAPNPDKHWIMRYTGPMKPIHMEFTNMLQRKRLQTLMSVDDSMETIYNMLVETGELDNTYIVYTADHGYHIGQFGLVKGKSMPYEFDIRVPFYVRGPNVEAGCLNPHIVLNIDLAPTILDIAGLDIPADMDGKSILKLLDTERPVNRFHLKKKMRVWRDSFLVERGKLLHKRDNDKVDAQEENFLPKYQRVKDLCQRAEYQTACEQLGQKWQCVEDATGKLKLHKCKGPMRLGGSRALSNLVPKYYGQGSEACTCDSGDYKLSLAGRRKKLFKKKYKASYVRSRSIRSVAIEVDGRVYHVGLGDAAQPRNLTKRHWPGAPEDQDDKDGGDFSGTGGLPDYSAANPIKVTHRCYILENDTVQCDLDLYKSLQAWKDHKLHIDHEIETLQNKIKNLREVRGHLKKKRPEECDCHKISYHTQHKGRLKHRGSSLHPFRKGLQEKDKVWLLREQKRKKKLRKLLKRLQNNDTCSMPGLTCFTHDNQHWQTAPFWTLGPFCACTSANNNTYWCMRTINETHNFLFCEFATGFLEYFDLNTDPYQLMNAVNTLDRDVLNQLHVQLMELRSCKGYKQCNPRTRNMDLDGGSYEQYRQFQRRKWPEMKRPSSKSLGQLWEGWEG

SEQ ID NO: 84822 - protein, 374 aa, Homo sapiens
  Payload ID: 16873
  Gene Symbol: SUMF1
  Gene Name: sulfatase modifying factor 1
  Uniprot ID: Q8NBK3
  ENSP ID: ENSP00000272902
MAAPALGLVCGRCPELGLVLLLLLLSLLCGAAGSQEAGTGAGAGSLAGSCGCGTPQRPGAHGSSAAAHRYSREANAPGPVPGERQLAHSKMVPIPAGVFTMGTDDPQIKQDGEAPARRVTIDAFYMDAYEVSNTEFEKFVNSTGYLTEAEKFGDSFVFEGMLSEQVKTNIQQAVAAAPWWLPVKGANWRHPEGPDSTILHRPDHPVLHVSWNDAVAYCTWAGKRLPTEAEWEYSCRGGLHNRLFPWGNKLQPKGQHYANIWQGEFPVTNTGEDGFQGTAPVDAFPPNGYGLYNIVGNAWEWTSDWWTVHHSVEETLNPKGPPSGKDRVKKGGSYMCHRSYCYRYRCAARSQNTPDSSASNLGFRCAADRLPTMD

SEQ ID NO: 84823 - protein, 349 aa, Homo sapiens
  Payload ID: 16873
  Gene Symbol: SUMF1
  Gene Name: sulfatase modifying factor 1
  Uniprot ID: Q8NBK3
  ENSP ID: ENSP00000373355
MAAPALGLVCGRCPELGLVLLLLLLSLLCGAAGSQEAGTGAGAGSLAGSCGCGTPQRPGAHGSSAAAHRYSREANAPGPVPGERQLAHSKMVPIPAGVFTMGTDDPQIKQDGEAPARRVTIDAFYMDAYEVSNTEFEKFVNSTGYLTEVAAAPWWLPVKGANWRHPEGPDSTILHRPDHPVLHVSWNDAVAYCTWAGKRLPTEAEWEYSCRGGLHNRLFPWGNKLQPKGQHYANIWQGEFPVTNTGEDGFQGTAPVDAFPPNGYGLYNIVGNAWEWTSDWWTVHHSVEETLNPKGPPSGKDRVKKGGSYMCHRSYCYRYRCAARSQNTPDSSASNLGFRCAADRLPTMD

SEQ ID NO: 84824 - protein, 354 aa, Homo sapiens
  Payload ID: 16873
  Gene Symbol: SUMF1
  Gene Name: sulfatase modifying factor 1
  Uniprot ID: Q8NBK3
  ENSP ID: ENSP00000384977
MAAPALGLVCGRCPELGLVLLLLLLSLLCGAAGSQEAGTGAGAGSLAGSCGCGTPQRPGAHGSSAAAHRYSREANAPGPVPGERQLAHSKMVPIPAGVFTMGTDDPQIKQDGEAPARRVTIDAFYMDAYEVSNTEFEKFVNSTGYLTEAEKFGDSFVFEGMLSEQVKTNIQQAVAAAPWWLPVKGANWRHPEGPDSTILHRPDHPVLHVSWNDAVAYCTWAGKRLPTEAEWEYSCRGGLHNRLFPWGNKLQPKGQHYANIWQGEFPVTNTGEDGFQGTAPVDAFPPNGYGLYNIVGNAWEWTSDWWTVHHSVEETLNPSYCYRYRCAARSQNTPDSSASNLGFRCAADRLPTMD

SEQ ID NO: 84825 - protein, 426 aa, Homo sapiens
  Payload ID: 16873
  Gene Symbol: SUMF1
  Gene Name: sulfatase modifying factor 1
  ENSP ID: ENSP00000404384
MAAPALGLVCGRCPELGLVLLLLLLSLLCGAAGSQEAGTGAGAGSLAGSCGCGTPQRPGAHGSSAAAHRYSREANAPGPVPGERQLAHSKMVPIPAGVFTMGTDDPQIKQDGEAPARRVTIDAFYMDAYEVSNTEFEKFVNSTGYLTEAEKFGDSFVFEGMLSEQVKTNIQQAVAAAPWWLPVKGANWRHPEGPDSTILHRPDHPVLHVSWNDAVAYCTWAGKRLPTEAEWEYSCRGGLHNRLFPWGNKLQPKGQHYANIWQGEFPVTNTGEDGFQGTAPVDAFPPNGYGLYNIVGNAWEWTSDWWTVHHSVEETLNPKGPPSGKDRVKKGGSYMCHRSQEYYDPYFQDVASEMLRRHTASRWKAFSSLEPCCSIRRHQQYAAIERLTCGKFELRCASLRKIDCLNTNIACSYSMRQDGPRLHCVD

SEQ ID NO: 84826 - protein, 242 aa, Homo sapiens
  Payload ID: 16873
  Gene Symbol: SUMF1
  Gene Name: sulfatase modifying factor 1
  ENSP ID: ENSP00000410060
MAAPALGLVCGRCPELGLVLLLLLLSLLCGAAGSQEAGTGAGAGSLAGSCGCGTPQRPGAHGSSAAAHRYSREANAPGPVPGERQLAHSKMVPIPAGVFTMGTDDPQIKQDGEAPARRVTIDAFYMDAYEVSNTEFEKFVNSTGYLTEVDAFPPNGYGLYNIVGNAWEWTSDWWTVHHSVEETLNPKGPPSGKDRVKKGGSYMCHRSYCYRYRCAARSQNTPDSSASNLGFRCAADRLPTMD

SEQ ID NO: 84827 - protein, 213 aa, Homo sapiens
  Payload ID: 16874
  Gene Symbol: SUMF2
  Gene Name: sulfatase modifying factor 2
  Uniprot ID: Q8NBJ7
  ENSP ID: ENSP00000275607
MFGWSFVFEDFVSDELRNKATQPMKSVLWWLPVEKAFWRQPAGPGSGIRERLEHPVLHVSWNDARAYCAWRGKRLPTEEEWEFAARGGLKGQVYPWGNWFQPNRTNLWQGKFPKGDKAEDGFHGVSPVNAFPAQNNYGLYDLLGNVWEWTASPYQAAEQDMRVLRGASWIDTADGSANHRARVTTRMGNTPDSASDNLGFRCAADAGRPPGEL

SEQ ID NO: 84828 - protein, 358 aa, Homo sapiens
  Payload ID: 16874
  Gene Symbol: SUMF2
  Gene Name: sulfatase modifying factor 2
  ENSP ID: ENSP00000341938
MRAHAQRGRGCTRRSAAVLMARHGLPLLPLLSLLVGAWLKLGNGQATSMVQLQGGRFLMGTNSPDSRDGDGPVREATVKPFAIDIFPVTNKDFRDFVREKKYRTEAEMFGWSFVFEDFVSDELRNKATQPMKSVLWWLPVEKAFWRQPAGPGSGIRERLEHPVLHVSWNDARAYCAWRGKRLPTEEEWEFAARGGLKGQVYPWGNWFQPNRTNLWQGKFPKGDKAEDGFHGVSPVNAFPAQNNYGWATLQIQPQTTSVSAVLQTQAGRQGSCKQPGGDKEKSLLGSLSFPGHVANSAIPSSRASASGKNFPFPVSHPSVAGASHQGRRGLSLLCFGEGAQCVLTMAGGQVFLLEAKYY

SEQ ID NO: 84829 - protein, 236 aa, Homo sapiens
  Payload ID: 16874
  Gene Symbol: SUMF2
  Gene Name: sulfatase modifying factor 2
  ENSP ID: ENSP00000378823
MRAHAQRGRGCTRRSAAVLMARHGLPLLPLLSLLVGAWLKLGNGQATSMVQLQGGRFLMGTNSPDSRDGDGPVREATVKPFAIDIFPVTNKDFRDFVREKKYRTEAEMFGWSFVFEDFVSDELRNKATQPMKGKFPKGDKAEDGFHGVSPVNAFPAQNNYGLYDLLGNVWEWTASPYQAAEQDMRVLRGASWIDTADGSANHRARVTTRMGNTPDSASDNLGFRCAADAGRPPGEL

SEQ ID NO: 84830 - protein, 305 aa, Homo sapiens
  Payload ID: 16874
  Gene Symbol: SUMF2
  Gene Name: sulfatase modifying factor 2
  ENSP ID: ENSP00000378824
MRAHAQRGRGCTRRSAAVLMARHGLPLLPLLSLLVGAWLKLGNGQATSMVQLQGGRFLMGTNSPDSRDGDGPVREATVKPFAIDIFPVTNKDFRDFVREKKYRTEAEMFGWSFVFEDFVSDELRNKATQPMKPAGPGSGIRERLEHPVLHVSWNDARAYCAWRGKRLPTEEEWEFAARGGLKGQVYPWGNWFQPNRTNLWQGKFPKGDKAEDGFHGVSPVNAFPAQNNYGLYDLLGNVWEWTASPYQAAEQDMRVLRGASWIDTADGSANHRARVTTRMGNTPDSASDNLGFRCAADAGRPPGEL

SEQ ID NO: 84831 - protein, 150 aa, Homo sapiens
  Payload ID: 16874
  Gene Symbol: SUMF2
  Gene Name: sulfatase modifying factor 2
  ENSP ID: ENSP00000393423
MARHGLPLLPLLSLLVGAWLKLGNGQATSMVQLQGGRFLMGTNSPDSRDGDGPVREATVKPFAIDIFPVTNKDFRDFVREKKYRTEAEMFGWSFVFEDFVSDELRNKATQPMKVKFTHGGTGSSQTAPTCGRESSPRETKLRMASMESPQ

SEQ ID NO: 84832 - protein, 183 aa, Homo sapiens
  Payload ID: 16874
  Gene Symbol: SUMF2
  Gene Name: sulfatase modifying factor 2
  ENSP ID: ENSP00000395554
MARHGLPLLPLLSLLVGAWLKLGNGQATSMVQLQGGRFLMGTNSPDSRDGDGPVREATVKPFAIDIFPVTNKDFRDFVREKKYRTEAEMFGWSFVFEDFVSDELRNKATQPMKSVLWWLPVEKAFWRQPAGPGSGIRERLEHPVLHVKFTHGGTGSSQTAPTCGRESSPRETKLRMASMESPQ

SEQ ID NO: 84833 - protein, 320 aa, Homo sapiens
  Payload ID: 16874
  Gene Symbol: SUMF2
  Gene Name: sulfatase modifying factor 2
  ENSP ID: ENSP00000400922
MRAHAQRGRGCTRRSAAVLMARHGLPLLPLLSLLVGAWLKLGNGQATSMVQLQGGRFLMGTNSPDSRDGDGPVREATVKPFAIDIFPVTNKDFRDFVREKKYRTEAEMFGWSFVFEDFVSDELRNKATQPMKSVLWWLPVEKAFWRQPAGPGSGIRERLEHPVLHVSWNDARAYCAWRGKRLPTEEEWEFAARGGLKGQVYPWGNWFQPNRTNLWQGKFPKGDKAEDGFHGVSPVNAFPAQNNYGLYDLLGNVWEWTASPYQAAEQDMRVLRGASWIDTADGSANHRARVTTRMGNTPDSASDNLGFRCAADAGRPPGEL

SEQ ID NO: 84834 - protein, 352 aa, Homo sapiens
  Payload ID: 16874
  Gene Symbol: SUMF2
  Gene Name: sulfatase modifying factor 2
  ENSP ID: ENSP00000406445
MARHGLPLLPLLSLLVGAWLKLGNGQATSMVQLQGGRFLMGTNSPDSRDGDGPVREATVKPFAIDIFPVTNKDFRDFVREKKYRTEAEMFGWSFVFEDFVSDELRNKATQPMKSVLWWLPVEKAFWRQPAGPGSGIRERLEHPVLHVSWNDARAYCAWRGKRLPTEEEWEFAARGGLKGQVYPWGNWFQPNRTNLWQGKFPKGDKAEDGFHGVSPVNAFPAQNNYGLYDLLGNVWEWTASPYQAAEQDMRVLRGASWIDTADGSANHRARVTTRVLLCCPGWSAVAQSQLTTASNCQALAILPPQLLKYLGLQDGQHSRFSLRQPRFPLCCRRRPAARGAVSSRVVTRRKAF

SEQ ID NO: 84835 - protein, 165 aa, Homo sapiens
  Payload ID: 16874
  Gene Symbol: SUMF2
  Gene Name: sulfatase modifying factor 2
  ENSP ID: ENSP00000407832
MARHGLPLLPLLSLLVGAWLKLGNGQATSMVQLQGGRFLMGTNSPDSRDGDGPVREATVKPFAIDIFPVTNKDFRDFVREKKYRTEAEMFGWSFVFEDFVSDELRNKATQPMKSVLWWLPVEKAFWRQVKFTHGGTGSSQTAPTCGRESSPRETKLRMASMESPQ

SEQ ID NO: 84836 - protein, 102 aa, Homo sapiens
  Payload ID: 16874
  Gene Symbol: SUMF2
  Gene Name: sulfatase modifying factor 2
  ENSP ID: ENSP00000407954
MARHGLPLLPLLSLLVGAWLKLGNGQATSMVQLQGGRFLMGTNSPDSRDGDGPVREATVKPFAIDIFPVTNKDFRSSLPMGELVPAKPHQPVAGKVPQGRQS

SEQ ID NO: 84837 - protein, 304 aa, Homo sapiens
  Payload ID: 16874
  Gene Symbol: SUMF2
  Gene Name: sulfatase modifying factor 2
  ENSP ID: ENSP00000410796
HGLPLLPLLSLLVGAWLKLGNGQATSMVQLQGGRFLMGTNSPDSRDGDGPVREATVKPFAIDIFPVTNKDFRDFVREKKYRTEAEMFGWSFVFEDFVSDELRNKATQPMKSGRCLCWAGASCSRSPSFSQSVLWWLPVEKAFWRQPAGPGSGIRERLEHPVLHVSWNDARAYCAWRGKRLPTEEEWEFAARGGLKGQVYPWGNWFQPNRTNLWQGKFPKGDKAEDGFHGVSPVNAFPAQNNYGLYDLLGNVWEWTASPYQAAEQDMRVLRGASWIDTADGSANHRARVTTRMGNTPDSASDNLG

SEQ ID NO: 84838 - protein, 293 aa, Homo sapiens
  Payload ID: 16874
  Gene Symbol: SUMF2
  Gene Name: sulfatase modifying factor 2
  ENSP ID: ENSP00000414434
MRAHAQRGRGCTRRSAAVLMARHGLPLLPLLSLLVGAWLKLGNGQATSMVQLQGGRFLMGTNSPDSRDGDGPVREATVKPFAIDIFPVTNKDFRYIRDFVREKKYRTEAEMFGWSFVFEDFVSDELRNKATQPMKSVLWWLPVEKAFWRQPAGPGSGIRERLEHPVLHVSWNDARAYCAWRGKRLPTEEEWEFAARGGLKGQVYPWGNWFQPNRTNLWQGKFPKGDKAEDGFHGVSPVNAFPAQNNYGLYDLLGNVWEWTASPYQAAEQDMRVLRGASWIDTADGSANHRARV

SEQ ID NO: 84839 - protein, 51 aa, Homo sapiens
  Payload ID: 16874
  Gene Symbol: SUMF2
  Gene Name: sulfatase modifying factor 2
  ENSP ID: ENSP00000415322
MARHGLPLLPLLSLLVGAWLKLGILSGRKSIGQKLRCLDGALSLRTLSLMS

SEQ ID NO: 84840 - protein, 232 aa, Homo sapiens
  Payload ID: 16874
  Gene Symbol: SUMF2
  Gene Name: sulfatase modifying factor 2
  ENSP ID: ENSP00000415989
MARHGLPLLPLLSLLVGAWLKLGNGQATSMVQLQGGRFLMGTNSPDSRDGDGPVREATVKPFAIDIFPVTNKDFRDFVREKKYRTEAEMFGWSFVFEDFVSDELRNKATQPMKSVLWWLPVEKAFWRQGKFPKGDKAEDGFHGVSPVNAFPAQNNYGLYDLLGNVWEWTASPYQAAEQDMRVLRGASWIDTADGSANHRARVTTRMGNTPDSASDNLGFRCAADAGRPPGEL

SEQ ID NO: 84841 - protein, 450 aa, Homo sapiens
  Payload ID: 16875
  Gene Symbol: SQRDL
  Gene Name: sulfide quinone reductase-like (yeast)
  Uniprot ID: Q9Y6N5
  ENSP ID: ENSP00000260324
MVPLVAVVSGPRAQLFACLLRLGTQQVGPLQLHTGASHAARNHYEVLVLGGGSGGITMAARMKRKVGAENVAIVEPSERHFYQPIWTLVGAGAKQLSSSGRPTASVIPSGVEWIKARVTELNPDKNCIHTDDDEKISYRYLIIALGIQLDYEKIKGLPEGFAHPKIGSNYSVKTVEKTWKALQDFKEGNAIFTFPNTPVKCAGAPQKIMYLSEAYFRKTGKRSKANIIFNTSLGAIFGVKKYADALQEIIQERNLTVNYKKNLIEVRADKQEAVFENLDKPGETQVISYEMLHVTPPMSPPDVLKTSPVADAAGWVDVDKETLQHRRYPNVFGIGDCTNLPTSKTAAAVAAQSGILDRTISVIMKNQTPTKKYDGYTSCPLVTGYNRVILAEFDYKAEPLETFPFDQSKERLSMYLMKADLMPFLYWNMMLRGYWGGPAFLRKLFHLGMS

SEQ ID NO: 84842 - protein, 181 aa, Homo sapiens
  Payload ID: 16875
  Gene Symbol: SQRDL
  Gene Name: sulfide quinone reductase-like (yeast)
  ENSP ID: ENSP00000454520
  MOD_RES (1)..(1): Any amino acid
XGGITMAARMKRKVGAENVAIVEPSERHFYQPIWTLVGAGAKQLSSSGRPTASVIPSGVEWIKARVTELNPDKNCIHTDDDEKISYRYLIIALGIQLDYEKIKGLPEGFAHPKIGSNYSVKTVEKTWKALQDFKEGNAIFTFPNTPVKCAGAPQKIMYLSEAYFRKVCFLSGDRDEQGGQC

SEQ ID NO: 84843 - protein, 124 aa, Homo sapiens
  Payload ID: 16875
  Gene Symbol: SQRDL
  Gene Name: sulfide quinone reductase-like (yeast)
  ENSP ID: ENSP00000454953
  MOD_RES (1)..(1): Any amino acid
XADAAGWVDVDKETLQHRRYPNVFGIGDCTNLPTSKTAAAVAAQSGILDRTISVIMKNQTPTKKYDGYTSCPLVTGYNRVILAEFDYKAEPLETFPFDQSKERLSMYLMKADLMPFLYWNMMLR

SEQ ID NO: 84844 - protein, 450 aa, Homo sapiens; identical to SEQ ID NO: 84841
  Payload ID: 16875
  Gene Symbol: SQRDL
  Gene Name: sulfide quinone reductase-like (yeast)
  Uniprot ID: Q9Y6N5
  ENSP ID: ENSP00000456019

SEQ ID NO: 84845 - protein, 140 aa, Homo sapiens
  Payload ID: 16875
  Gene Symbol: SQRDL
  Gene Name: sulfide quinone reductase-like (yeast)
  ENSP ID: ENSP00000456075
MVPLVAVVSGPRAQLFACLLRLGTQQVGPLQLHTGASHAARNHYEVLVLGGGSGGITMAARMKRKVGAENVAIVEPSERHFYQPIWTLVGAGAKQLSSSGRPTASVIPSGVEWIKARVTELNPDKNCIHTDDDEKISYRY

SEQ ID NO: 84846 - protein, 38 aa, Homo sapiens
  Payload ID: 16875
  Gene Symbol: SQRDL
  Gene Name: sulfide quinone reductase-like (yeast)
  ENSP ID: ENSP00000456979
MVPLVAVVSGPRAQLFACLLRLGTQQVGPLQLHTGASH

SEQ ID NO: 84847 - protein, 73 aa, Homo sapiens
  Payload ID: 16875
  Gene Symbol: SQRDL
  Gene Name: sulfide quinone reductase-like (yeast)
  ENSP ID: ENSP00000457592
MVPLVAVVSGPRAQLFACLLRLGTQQVGPLQLHTGASHAARNHYEVLVLGGGSGGITMAARMKRKVGAENVAI

SEQ ID NO: 84848 - protein, 141 aa, Homo sapiens
  Payload ID: 16875
  Gene Symbol: SQRDL
  Gene Name: sulfide quinone reductase-like (yeast)
  ENSP ID: ENSP00000457937
MVPLVAVVSGPRAQLFACLLRLGTQQVGPLQLHTGASHAARNHYEVLVLGGGSGGITMAARMKRKVGAENVAIVEPSERHFYQPIWTLVGAGAKQLSSSGRPTASVIPSGVEWIKARVTELNPDKNCIHTDDDEKISYRYL

SEQ ID NO: 84849 - protein, 137 aa, Homo sapiens
  Payload ID: 16876
  Gene Symbol: SRXN1
  Gene Name: sulfiredoxin 1
  Uniprot ID: Q9BYN0
  ENSP ID: ENSP00000371388
MGLRAGGTLGRAGAGRGAPEGPGPSGGAQGGSIHSGRIAAVHNVPLSVLIRPLPSVLDPAKVQSLVDTIREDPDSVPPIDVLWIKGAQGGDYFYSFGGCHRYAAYQQLQRETIPAKLVQSTLSDLRVYLGASTPDLQ

SEQ ID NO: 84850 - protein, 545 aa, Homo sapiens
  Payload ID: 16877
  Gene Symbol: SUOX
  Gene Name: sulfite oxidase
  Uniprot ID: P51687
  ENSP ID: ENSP00000266971
MLLLHRAVVLRLQQACRLKSIPSRICIQACSTNDSFQPQRPSLTFSGDNSSTQGWRVMGTLLGLGAVLAYQDHRCRAAQESTHIYTKEEVSSHTSPETGIWVTLGSEVFDVTEFVDLHPGGPSKLMLAAGGPLEPFWALYAVHNQSHVRELLAQYKIGELNPEDKVAPTVETSDPYADDPVRHPALKVNSQRPFNAEPPPELLTENYITPNPIFFTRNHLPVPNLDPDTYRLHVVGAPGGQSLSLSLDDLHNFPRYEITVTLQCAGNRRSEMTQVKEVKGLEWRTGAISTARWAGARLCDVLAQAGHQLCETEAHVCFEGLDSDPTGTAYGASIPLARAMDPEAEVLLAYEMNGQPLPRDHGFPVRVVVPGVVGARHVKWLGRVSVQPEESYSHWQRRDYKGFSPSVDWETVDFDSAPSIQELPVQSAITEPRDGETVESGEVTIKGYAWSGGGRAVIRVDVSLDGGLTWQVAKLDGEEQRPRKAWAWRLWQLKAPVPAGQKELNIVCKAVDDGYNVQPDTVAPIWNLRGVLSNAWHRVHVYVSP

SEQ ID NO: 84851 - protein, 545 aa, Homo sapiens; identical to SEQ ID NO: 84850
  Payload ID: 16877
  Gene Symbol: SUOX
  Gene Name: sulfite oxidase
  Uniprot ID: P51687
  ENSP ID: ENSP00000348440

SEQ ID NO: 84852 - protein, 545 aa, Homo sapiens; identical to SEQ ID NO: 84850
  Payload ID: 16877
  Gene Symbol: SUOX
  Gene Name: sulfite oxidase
  Uniprot ID: P51687
  ENSP ID: ENSP00000377668

SEQ ID NO: 84853 - protein, 545 aa, Homo sapiens; identical to SEQ ID NO: 84850
  Payload ID: 16877
  Gene Symbol: SUOX
  Gene Name: sulfite oxidase
  Uniprot ID: P51687
  ENSP ID: ENSP00000377674

SEQ ID NO: 84854 - protein, 42 aa, Homo sapiens
  Payload ID: 16877
  Gene Symbol: SUOX
  Gene Name: sulfite oxidase
  ENSP ID: ENSP00000448637
MLLLHRAVVLRLQQACRLKSIPSRICIQACSTNDSFQPQRPS

SEQ ID NO: 84855 - protein, 104 aa, Homo sapiens
  Payload ID: 16877
  Gene Symbol: SUOX
  Gene Name: sulfite oxidase
  ENSP ID: ENSP00000449443
MLLLHRAVVLRLQQACRLKSIPSRICIQACSTNDSFQPQRPSLTFSGDNSSTQGWRVMGTLLGLGAVLAYQDHRCRAAQESTHIYTKEEVRDHSHSAVCRQPTL

SEQ ID NO: 84856 - protein, 161 aa, Homo sapiens
  Payload ID: 16877
  Gene Symbol: SUOX
  Gene Name: sulfite oxidase
  ENSP ID: ENSP00000449872
MLLLHRAVVLRLQQACRLKSIPSRICIQACSTNDSFQPQRPSLTFSGDNSSTQGWRVMGTLLGLGAVLAYQDHRCRAAQESTHIYTKEEVSSHTSPETGIWVTLGSEVFDVTEFVDLHPGGPSKLMLAAGGPLEPFWALYAVHNQSHVRELLAQYKIGELN

SEQ ID NO: 84857 - protein, 121 aa, Homo sapiens
  Payload ID: 16877
  Gene Symbol: SUOX
  Gene Name: sulfite oxidase
  ENSP ID: ENSP00000450049
MLLLHRAVVLRLQQACRLKSIPSRICIQACSTNDSFQPQRPSLTFSGDNSSTQGWRVMGTLLGLGAVLAYQDHRCRAAQESTHIYTKEEVSSHTSPETGIWVTLGSEVFDVTEFVDLHPGG

SEQ ID NO: 84858 - protein, 545 aa, Homo sapiens; identical to SEQ ID NO: 84850
  Payload ID: 16877
  Gene Symbol: SUOX
  Gene Name: sulfite oxidase
  Uniprot ID: P51687
  ENSP ID: ENSP00000450245

SEQ ID NO: 84859 - protein, 545 aa, Homo sapiens; identical to SEQ ID NO: 84850
  Payload ID: 16877
  Gene Symbol: SUOX
  Gene Name: sulfite oxidase
  Uniprot ID: P51687
  ENSP ID: ENSP00000450264

SEQ ID NO: 84860 - protein, 294 aa, Homo sapiens
  Payload ID: 16878
  Gene Symbol: SULT1E1
  Gene Name: sulfotransferase family 1E, estrogen-preferring, member 1
  Uniprot ID: P49888
  ENSP ID: ENSP00000226444
MNSELDYYEKFEEVHGILMYKDFVKYWDNVEAFQARPDDLVIATYPKSGTTWVSEIVYMIYKEGDVEKCKEDVIFNRIPFLECRKENLMNGVKQLDEMNSPRIVKTHLPPELLPASFWEKDCKIIYLCRNAKDVAVSFYYFFLMVAGHPNPGSFPEFVEKFMQGQVPYGSWYKHVKSWWEKGKSPRVLFLFYEDLKEDIRKEVIKLIHFLERKPSEELVDRIIHHTSFQEMKNNPSTNYTTLPDEIMNQKLSPFMRKGITGDWKNHFTVALNEKFDKHYEQQMKESTLKFRTEI

SEQ ID NO: 84861 - protein, 127 aa, Homo sapiens
  Payload ID: 16878
  Gene Symbol: SULT1E1
  Gene Name: sulfotransferase family 1E, estrogen-preferring, member 1
  ENSP ID: ENSP00000420891
  MOD_RES (1)..(1): Any amino acid
XGSWYKHVKSWWEKGKSPRVLFLFYEDLKEDIRKEVIKLIHFLERKPSEELVDRIIHHTSFQEMKNNPSTNYTTLPDEIMNQKLSPFMRKGITGDWKNHFTVALNEKFDKHYEQQMKESTLKFRTEI

SEQ ID NO: 84862 - protein, 284 aa, Homo sapiens
  Payload ID: 16879
  Gene Symbol: SULT4A1
  Gene Name: sulfotransferase family 4A, member 1
  Uniprot ID: Q9BR01
  ENSP ID: ENSP00000332565
MAESEAETPSTPGEFESKYFEFHGVRLPPFCRGKMEEIANFPVRPSDVWIVTYPKSGTSLLQEVVYLVSQGADPDEIGLMNIDEQLPVLEYPQPGLDIIKELTSPRLIKSHLPYRFLPSDLHNGDSKVIYMARNPKDLVVSYYQFHRSLRTMSYRGTFQEFCRRFMNDKLGYGSWFEHVQEFWEHRMDSNVLFLKYEDMHRDLVTMVEQLARFLGVSCDKAQLEALTEHCHQLVDQCCNAEALPVGRGRVGLWKDIFTVSMNEKFDLVYKQKMGKCDLTFDFYL

SEQ ID NO: 84863 - protein, 260 aa, Homo sapiens
  Payload ID: 16879
  Gene Symbol: SULT4A1
  Gene Name: sulfotransferase family 4A, member 1
  Uniprot ID: Q9BR01
  ENSP ID: ENSP00000388285
MAESEAETPSTPGEFESKYFEFHGVRLPPFCRGKMEEIANFPVRPSDVWIVTYPKSGTSLLQEVVYLVSQGADPDEIGLMNIDEQLPVLEYPQPGLDIIKELTSPRLIKSHLPYRFLPSDLHNGDSKVIYMARNPKDLVVSYYQFHRSLRTMSYRGTFQEFCRRFMNDKLGYGSWFEHVQEFWEHRMDSNVLFLKYEDMHRDLVTMVEQLARFLGVSCDKAQLEALTEHCHQLVDQCCNAEALPVGRAHCVFARKIFLSW

SEQ ID NO: 84864 - protein, 75 aa, Homo sapiens
  Payload ID: 16879
  Gene Symbol: SULT4A1
  Gene Name: sulfotransferase family 4A, member 1
  ENSP ID: ENSP00000414220
MAESEAETPSTPGEFESKYFEFHGVRLPPFCRGKMEEIANFPVRPSDVWIVTYPKSGTDLSPPHQEPPALPLSAL

SEQ ID NO: 84865 - protein, 295 aa, Homo sapiens
  Payload ID: 16880
  Gene Symbol: SULT1A1
  Gene Name: sulfotransferase family, cytosolic, 1A, phenol-preferring, member 1
  Uniprot ID: P50225
  ENSP ID: ENSP00000321988
MELIQDTSRPPLEYVKGVPLIKYFAEALGPLQSFQARPDDLLISTYPKSGTTWVSQILDMIYQGGDLEKCHRAPIFMRVPFLEFKAPGIPSGMETLKDTPAPRLLKTHLPLALLPQTLLDQKVKVVYVARNAKDVAVSYYHFYHMAKVHPEPGTWDSFLEKFMVGEVSYGSWYQHVQEWWELSRTHPVLYLFYEDMKENPKREIQKILEFVGRSLPEETVDFVVQHTSFKEMKKNPMTNYTTVPQEFMDHSISPFMRKGMAGDWKTTFTVAQNERFDADYAEKMAGCSLSFRSEL

SEQ ID NO: 84866 - protein, 217 aa, Homo sapiens
  Payload ID: 16880
  Gene Symbol: SULT1A1
  Gene Name: sulfotransferase family, cytosolic, 1A, phenol-preferring, member 1
  Uniprot ID: P50225
  ENSP ID: ENSP00000329399
MLAKLLCDQVVGAPIAVSAFYAGMSILQGKDDIFLDLKQKFWNTYMVVYVARNAKDVAVSYYHFYHMAKVHPEPGTWDSFLEKFMVGEVSYGSWYQHVQEWWELSRTHPVLYLFYEDMKENPKREIQKILEFVGRSLPEETVDFVVQHTSFKEMKKNPMTNYTTVPQEFMDHSISPFMRKGMAGDWKTTFTVAQNERFDADYAEKMAGCSLSFRSEL

SEQ ID NO: 84867 - protein, 295 aa, Homo sapiens; identical to SEQ ID NO: 84865
  Payload ID: 16880
  Gene Symbol: SULT1A1
  Gene Name: sulfotransferase family, cytosolic, 1A, phenol-preferring, member 1
  Uniprot ID: P50225
  ENSP ID: ENSP00000378971

SEQ ID NO: 84868 - protein, 295 aa, Homo sapiens; identical to SEQ ID NO: 84865
  Payload ID: 16880
  Gene Symbol: SULT1A1
  Gene Name: sulfotransferase family, cytosolic, 1A, phenol-preferring, member 1
  Uniprot ID: P50225
  ENSP ID: ENSP00000378972

SEQ ID NO: 84869 - protein, 56 aa, Homo sapiens
  Payload ID: 16880
  Gene Symbol: SULT1A1
  Gene Name: sulfotransferase family, cytosolic, 1A, phenol-preferring, member 1
  ENSP ID: ENSP00000454388
MLAKLLCDQVVGAPIAVSAFYAGMSILQGKDDIFLDLKQKFWNTYMQTQSWLWRSL

SEQ ID NO: 84870 - protein, 169 aa, Homo sapiens
  Payload ID: 16880
  Gene Symbol: SULT1A1
  Gene Name: sulfotransferase family, cytosolic, 1A, phenol-preferring, member 1
  ENSP ID: ENSP00000455979
MELIQDTSRPPLEYVKGVPLIKYFAEALGPLQSFQARPDDLLISTYPKSGMETLKDTPAPRLLKTHLPLALLPQTLLDQKVKVVYVARNAKDVAVSYYHFYHMAKVHPEPGTWDSFLEKFMVGEVSYGSWYQHVQEWWELSRTHPVLYLFYEDMKENPKREIQKILEFV

SEQ ID NO: 84871 - protein, 56 aa, Homo sapiens; identical to SEQ ID NO: 84869
  Payload ID: 16880
  Gene Symbol: SULT1A1
  Gene Name: sulfotransferase family, cytosolic, 1A, phenol-preferring, member 1
  ENSP ID: ENSP00000456215

SEQ ID NO: 84872 - protein, 281 aa, Homo sapiens
  Payload ID: 16880
  Gene Symbol: SULT1A1
  Gene Name: sulfotransferase family, cytosolic, 1A, phenol-preferring, member 1
  ENSP ID: ENSP00000456459
MELIQDTSRPPLEYVKGVPLIKYFAEALGPLQSFQARPDDLLISTYPKSGTTWVSQILDMIYQGGDLEKCHRAPIFMRVPFLEFKAPGIPSGMETLKDTPAPRLLKTHLPLALLPQTLLDQKVKVVYVARNAKDVAVSYYHFYHMAKVHPEPGTWDSFLEKFMVGEVSYGSWYQHVQEWWELSRTHPVLYLFYEDMKENPKREIQKILEFVGRSLPEETVDFVVQHTSFKEMKKNPMTNYTTVPQEFMDHSISPFMRKGMAGDWKTTFTVAQNERFDADYA

SEQ ID NO: 84873 - protein, 85 aa, Homo sapiens
  Payload ID: 16880
  Gene Symbol: SULT1A1
  Gene Name: sulfotransferase family, cytosolic, 1A, phenol-preferring, member 1
  ENSP ID: ENSP00000457083
MLAKLLCDQVVGAPIAVSAFYAGMSILQGKDDIFLDLKQKFWNTYMEHGADPGHLPPATGVREGGPAHQVLCRGTGAPAELPGPA

SEQ ID NO: 84874 - protein, 295 aa, Homo sapiens; identical to SEQ ID NO: 84865
  Payload ID: 16880
  Gene Symbol: SULT1A1
  Gene Name: sulfotransferase family, cytosolic, 1A, phenol-preferring, member 1
  Uniprot ID: P50225
  ENSP ID: ENSP00000457912

SEQ ID NO: 84875 - protein, 295 aa, Homo sapiens
  Payload ID: 16881
  Gene Symbol: SULT1A2
  Gene Name: sulfotransferase family, cytosolic, 1A, phenol-preferring, member 2
  Uniprot ID: P50226
  ENSP ID: ENSP00000338742
MELIQDISRPPLEYVKGVPLIKYFAEALGPLQSFQARPDDLLISTYPKSGTTWVSQILDMIYQGGDLEKCHRAPIFMRVPFLEFKVPGIPSGMETLKNTPAPRLLKTHLPLALLPQTLLDQKVKVVYVARNAKDVAVSYYHFYHMAKVYPHPGTWESFLEKFMAGEVSYGSWYQHVQEWWELSRTHPVLYLFYEDMKENPKREIQKILEFVGRSLPEETVDLMVEHTSFKEMKKNPMTNYTTVRREFMDHSISPFMRKGMAGDWKTTFTVAQNERFDADYAKKMAGCSLSFRSEL

SEQ ID NO: 84876 - protein, 295 aa, Homo sapiens; identical to SEQ ID NO: 84875
  Payload ID: 16881
  Gene Symbol: SULT1A2
  Gene Name: sulfotransferase family, cytosolic, 1A, phenol-preferring, member 2
  Uniprot ID: P50226
  ENSP ID: ENSP00000378992

SEQ ID NO: 84877 - protein, 221 aa, Homo sapiens
  Payload ID: 16881
  Gene Symbol: SULT1A2
  Gene Name: sulfotransferase family, cytosolic, 1A, phenol-preferring, member 2
  ENSP ID: ENSP00000433075
MELIQDISRPPLEYVKGVPLIKYFAEALGPLQSFQARPDDLLISTYPKSGTTWVSQILDMIYQGGDLEKCHRAPIFMRVPFLEFKVPGIPSGVCVLGARGVEEDRAGASAHQTFPDPLLRDGDSEKHTSPTTPEDTPAPGSAPPDSVGSEGQGGLCCPQRKGCGGFLLPLLPHGQSVPSPWDLGKLPGEVHGWRSVLWVLVPARARVVGAEPHPPCSLPLL

SEQ ID NO: 84878 - protein, 262 aa, Homo sapiens
  Payload ID: 16881
  Gene Symbol: SULT1A2
  Gene Name: sulfotransferase family, cytosolic, 1A, phenol-preferring, member 2
  ENSP ID: ENSP00000435271
MELIQDISRPPLEYVKGVPLIKYFAEALGPLQSFQARPDDLLISTYPKSGTTWVSQILDMIYQGGDLEKCHRAPIFMRVPFLEFKVPGIPSGVCVLGARGVEEDRAGASAHQTFPDPLLRDGDSEKHTSPTTPEDTPAPGSAPPDSVGSEGQAIQASTEEPSAAQNPKREIQKILEFVGRSLPEETVDLMVEHTSFKEMKKNPMTNYTTVRREFMDHSISPFMRKGMAGDWKTTFTVAQNERFDADYAKKMAGCSLSFRSEL

SEQ ID NO: 84879 - protein, 192 aa, Homo sapiens
  Payload ID: 16881
  Gene Symbol: SULT1A2
  Gene Name: sulfotransferase family, cytosolic, 1A, phenol-preferring, member 2
  ENSP ID: ENSP00000435358
MELIQDISRPPLEYVKGVPLIKYFAEALGPLQSFQARPDDLLISTYPKSGTTWVSQILDMIYQGGDLEKCHRAPIFMRVPFLEFKVPGIPSGMETLKNTPAPRLLKTHLPLALLPQTLLDQKVKVVYVARNAKDVAVSYYHFYHMAKVYPHPGTWESFLEKFMAGEVSYGSWYQHVQEWWELSRTHPVLYLF

SEQ ID NO: 84880 - protein, 295 aa, Homo sapiens
  Payload ID: 16882
  Gene Symbol: SULT1A3
  Gene Name: sulfotransferase family, cytosolic, 1A, phenol-preferring, member 3
  Uniprot ID: P0DMM9
  ENSP ID: ENSP00000343645
MELIQDTSRPPLEYVKGVPLIKYFAEALGPLQSFQARPDDLLINTYPKSGTTWVSQILDMIYQGGDLEKCNRAPIYVRVPFLEVNDPGEPSGLETLKDTPPPRLIKSHLPLALLPQTLLDQKVKVVYVARNPKDVAVSYYHFHRMEKAHPEPGTWDSFLEKFMAGEVSYGSWYQHVQEWWELSRTHPVLYLFYEDMKENPKREIQKILEFVGRSLPEETMDFMVQHTSFKEMKKNPMTNYTTVPQELMDHSISPFMRKGMAGDWKTTFTVAQNERFDADYAEKMAGCSLSFRSEL

SEQ ID NO: 84881 - protein, 295 aa, Homo sapiens; identical to SEQ ID NO: 84880
  Payload ID: 16882
  Gene Symbol: SULT1A3
  Gene Name: sulfotransferase family, cytosolic, 1A, phenol-preferring, member 3
  Uniprot ID: P0DMM9
  ENSP ID: ENSP00000378570

SEQ ID NO: 84882 - protein, 301 aa, Homo sapiens
  Payload ID: 16882
  Gene Symbol: SULT1A3
  Gene Name: sulfotransferase family, cytosolic, 1A, phenol-preferring, member 3
  Uniprot ID: P0DMM9
  ENSP ID: ENSP00000454518
MELIQDTSRPPLEYVKGVPLIKYFAEALGPLQSFQARPDDLLINTYPKSGTTWVSQILDMIYQGGDLEKCNRAPIYVRVPFLEVNDPGEPSGLETLKDTPPPRLIKSHLPLALLPQTLLDQKVKVVYVARNPKDVAVSYYHFHRMEKAHPEPGTWDSFLEKFMAGEVSYGSWYQHVQEWWELSRTHPVLYLFYEDMKEEPSAAQNPKREIQKILEFVGRSLPEETMDFMVQHTSFKEMKKNPMTNYTTVPQELMDHSISPFMRKGMAGDWKTTFTVAQNERFDADYAEKMAGCSLSFRSEL

SEQ ID NO: 84883 - protein, 135 aa, Homo sapiens
  Payload ID: 16882
  Gene Symbol: SULT1A3
  Gene Name: sulfotransferase family, cytosolic, 1A, phenol-preferring, member 3
  ENSP ID: ENSP00000455372
  MOD_RES (1)..(1): Any amino acid
XYVRVPFLEVNDPGEPSGLETLKDTPPPRLIKSHLPLALLPQTLLDQKVKVVYVARNPKDVAVSYYHFHRMEKAHPEPGTWDSFLEKFMAGEVSYGSWYQHVQEWWELSRTHPVLYLFYEDMKEELMDHSISPFM

SEQ ID NO: 84884 - protein, 50 aa, Homo sapiens
  Payload ID: 16882
  Gene Symbol: SULT1A3
  Gene Name: sulfotransferase family, cytosolic, 1A, phenol-preferring, member 3
  ENSP ID: ENSP00000456391
  MOD_RES (1)..(1): Any amino acid
XPFLEVNDPGEPSGLETLKDTPPPRLIKSHLPLALLPQTLLDQKVKSAIV

SEQ ID NO: 84885 - protein, 295 aa, Homo sapiens; identical to SEQ ID NO: 84880
  Payload ID: 16883
  Gene Symbol: SULT1A4
  Gene Name: sulfotransferase family, cytosolic, 1A, phenol-preferring, member 4
  Uniprot ID: P0DMN0
  ENSP ID: ENSP00000353600

SEQ ID NO: 84886 - protein, 87 aa, Homo sapiens
  Payload ID: 16883
  Gene Symbol: SULT1A4
  Gene Name: sulfotransferase family, cytosolic, 1A, phenol-preferring, member 4
  ENSP ID: ENSP00000455063
MELIQDTSRPPLEYVKGVPLIKYFAEALGPLQSFQARPDDLLINTYPKSGTTWVSQILDMIYQGGDLEKCNRAPIYVRVPFLEGWRL

SEQ ID NO: 84887 - protein, 301 aa, Homo sapiens; identical to SEQ ID NO: 84882
  Payload ID: 16883
  Gene Symbol: SULT1A4
  Gene Name: sulfotransferase family, cytosolic, 1A, phenol-preferring, member 4
  ENSP ID: ENSP00000456834

SEQ ID NO: 84888 - protein, 50 aa, Homo sapiens; identical to SEQ ID NO: 84884
  Payload ID: 16883
  Gene Symbol: SULT1A4
  Gene Name: sulfotransferase family, cytosolic, 1A, phenol-preferring, member 4
  ENSP ID: ENSP00000457597
  MOD_RES (1)..(1): Any amino acid

SEQ ID NO: 84889 - protein, 296 aa, Homo sapiens
  Payload ID: 16884
  Gene Symbol: SULT1B1
  Gene Name: sulfotransferase family, cytosolic, 1B, member 1
  Uniprot ID: O43704
  ENSP ID: ENSP00000308770
MLSPKDILRKDLKLVHGYPMTCAFASNWEKIEQFHSRPDDIVIATYPKSGTTWVSEIIDMILNDGDIEKCKRGFITEKVPMLEMTLPGLRTSGIEQLEKNPSPRIVKTHLPTDLLPKSFWENNCKMIYLARNAKDVSVSYYHFDLMNNLQPFPGTWEEYLEKFLTGKVAYGSWFTHVKNWWKKKEEHPILFLYYEDMKENPKEEIKKIIRFLEKNLNDEILDRIIHHTSFEVMKDNPLVNYTHLPTTVMDHSKSPFMRKGTAGDWKNYFTVAQNEKFDAIYETEMSKTALQFRTEI

SEQ ID NO: 84890 - protein, 155 aa, Homo sapiens
  Payload ID: 16884
  Gene Symbol: SULT1B1
  Gene Name: sulfotransferase family, cytosolic, 1B, member 1
  ENSP ID: ENSP00000425464
MLSPKDILRKDLKLVHGYPMTCAFASNWEKIEQFHSRPDDIVIATYPKSGTTWVSEIIDMILNDGDIEKCKRGFITEKVPMLEMTLPGLRTSGIEQLEKNPSPRIVKTHLPTDLLPKSFWENNCKMIYLARNAKDVSVSYYHFDLMNNLQPFPGT

SEQ ID NO: 84891 - protein, 73 aa, Homo sapiens
  Payload ID: 16884
  Gene Symbol: SULT1B1
  Gene Name: sulfotransferase family, cytosolic, 1B, member 1
  ENSP ID: ENSP00000427536
MTCAFASNWEKIEQFHSRPDDIVIATYPKSGTTWVSEIIDMILNDGDIEKCKRGFITEKVPMLEMTLPGLRTS

SEQ ID NO: 84892 - protein, 296 aa, Homo sapiens
  Payload ID: 16885
  Gene Symbol: SULT1C2
  Gene Name: sulfotransferase family, cytosolic, 1C, member 2
  Uniprot ID: O00338
  ENSP ID: ENSP00000251481
MALTSDLGKQIKLKEVEGTLLQPATVDNWSQIQSFEAKPDDLLICTYPKAGTTWIQEIVDMIEQNGDVEKCQRAIIQHRHPFIEWARPPQPSGVEKAKAMPSPRILKTHLSTQLLPPSFWENNCKFLYVARNAKDCMVSYYHFQRMNHMLPDPGTWEEYFETFINGKVVWGSWFDHVKGWWEMKDRHQILFLFYEDIKRDPKHEIRKVMQFMGKKVDETVLDKIVQETSFEKMKENPMTNRSTVSKSILDQSISSFMRKGTVGDWKNHFTVAQNERFDEIYRRKMEGTSINFCMEL

SEQ ID NO: 84893 - protein, 307 aa, Homo sapiens
  Payload ID: 16885
  Gene Symbol: SULT1C2
  Gene Name: sulfotransferase family, cytosolic, 1C, member 2
  Uniprot ID: O00338
  ENSP ID: ENSP00000319622
MALTSDLGKQIKLKEVEGTLLQPATVDNWSQIQSFEAKPDDLLICTYPKAGTTWIQEIVDMIEQNGDVEKCQRAIIQHRHPFIEWARPPQPSETGFHHVAQAGLKLLSSSNPPASTSQSAKITDLLPPSFWENNCKFLYVARNAKDCMVSYYHFQRMNHMLPDPGTWEEYFETFINGKVVWGSWFDHVKGWWEMKDRHQILFLFYEDIKRDPKHEIRKVMQFMGKKVDETVLDKIVQETSFEKMKENPMTNRSTVSKSILDQSISSFMRKGTVGDWKNHFTVAQNERFDEIYRRKMEGTSINFCMEL

SEQ ID NO: 84894 - protein, 259 aa, Homo sapiens
  Payload ID: 16885
  Gene Symbol: SULT1C2
  Gene Name: sulfotransferase family, cytosolic, 1C, member 2
  ENSP ID: ENSP00000387054
MALTSDLGKQIKLKEVEGTLLQPATVDNWSQIQSFEAKPDDLLICTYPKAGTTWIQEIVDMIEQNGDVEKCQRAIIQHRHPFIEWARPPQPSARNAKDCMVSYYHFQRMNHMLPDPGTWEEYFETFINGKVVWGSWFDHVKGWWEMKDRHQILFLFYEDIKRDPKHEIRKVMQFMGKKVDETVLDKIVQETSFEKMKENPMTNRSTVSKSILDQSISSFMRKGTVGDWKNHFTVAQNERFDEIYRRKMEGTSINFCMEL

SEQ ID NO: 84895 - protein, 226 aa, Homo sapiens
  Payload ID: 16885
  Gene Symbol: SULT1C2
  Gene Name: sulfotransferase family, cytosolic, 1C, member 2
  ENSP ID: ENSP00000387340
  MOD_RES (1)..(1): Any amino acid
XSDLGKQIKLKEVEGTLLQPATVDNWSQIQSFEAKPDDLLICTYPKAGTTWIQEIVDMIEQNGDVEKCQRAIIQHRHPFIEWARPPQPSGVEKAKAMPSPRILKTHLSTQLLPPSFWENNCKFLYVARNAKDCMVSYYHFQRMNHMLPDPGTWEEYFETFINGKVVWGSWFDHVKGWWEMKDRHQILFLFYEDIKRELWGIGKTTSLLPRMRGLMKSIEERWKEPP

SEQ ID NO: 84896 - protein, 310 aa, Homo sapiens
  Payload ID: 16885
  Gene Symbol: SULT1C2
  Gene Name: sulfotransferase family, cytosolic, 1C, member 2
  ENSP ID: ENSP00000399651
MALTSDLGKQIKLKEVEGTLLQPATVDNWSQIQSFEAKPDDLLICTYPKAGTTWIQEIVDMIEQNGDVEKCQRAIIQHRHPFIEWARPPQPSVLVLRRCFLLSYFKGVEKAKAMPSPRILKTHLSTQLLPPSFWENNCKFLYVARNAKDCMVSYYHFQRMNHMLPDPGTWEEYFETFINGKVVWGSWFDHVKGWWEMKDRHQILFLFYEDIKRDPKHEIRKVMQFMGKKVDETVLDKIVQETSFEKMKENPMTNRSTVSKSILDQSISSFMRKGTVGDWKNHFTVAQNERFDEIYRRKMEGTSINFCMEL

SEQ ID NO: 84897 - protein, 130 aa, Homo sapiens
  Payload ID: 16885
  Gene Symbol: SULT1C2
  Gene Name: sulfotransferase family, cytosolic, 1C, member 2
  ENSP ID: ENSP00000401996
MALTSDLGKQIKLKEVEGTLLQPATVDNWSQIQSFEAKPDDLLICTYPKAGTTWIQEIVDMIEQNGDVEKCQRAIIQHRHPFIEWARPPQPSAAATVFLGKQLQVPLCSSKCQRLYGFLLPFPKDEPHAS

SEQ ID NO: 84898 - protein, 116 aa, Homo sapiens
  Payload ID: 16885
  Gene Symbol: SULT1C2
  Gene Name: sulfotransferase family, cytosolic, 1C, member 2
  ENSP ID: ENSP00000415194
  MOD_RES (1)..(1): Any amino acid
XTSDLGKQIKLKEVEGTLLQPATVDNWSQIQSFEAKPDDLLICTYPKAGTTWIQEIVDMIEQNGDVEKCQRAIIQHRHPFIEWARPPQPSVPLCSSKCQRLYGFLLPFPKDEPHAS

SEQ ID NO: 84899 - protein, 304 aa, Homo sapiens
  Payload ID: 16886
  Gene Symbol: SULT1C3
  Gene Name: sulfotransferase family, cytosolic, 1C, member 3
  Uniprot ID: Q6IMI6
  ENSP ID: ENSP00000333310
MAKIEKNAPTMEKKPELFNIMEVDGVPTLILSKEWWEKVCNFQAKPDDLILATYPKSGTTWMHEILDMILNDGDVEKCKRAQTLDRHAFLELKFPHKEKPDLEFVLEMSSPQLIKTHLPSHLIPPSIWKENCKIVYVARNPKDCLVSYYHFHRMASFMPDPQNLEEFYEKFMSGKVVGGSWFDHVKGWWAAKDMHRILYLFYEDIKKDPKREIEKILKFLEKDISEEILNKIIYHTSFDVMKQNPMTNYTTLPTSIMDHSISPFMRKGMPGDWKNYFTVAQNEEFDKDYQKKMAGSTLTFRTEI

SEQ ID NO: 84900 - protein, 302 aa, Homo sapiens
  Payload ID: 16887
  Gene Symbol: SULT1C4
  Gene Name: sulfotransferase family, cytosolic, 1C, member 4
  Uniprot ID: O75897
  ENSP ID: ENSP00000272452
MALHDMEDFTFDGTKRLSVNYVKGILQPTDTCDIWDKIWNFQAKPDDLLISTYPKAGTTWTQEIVELIQNEGDVEKSKRAPTHQRFPFLEMKIPSLGSGLEQAHAMPSPRILKTHLPFHLLPPSLLEKNCKIIYVARNPKDNMVSYYHFQRMNKALPAPGTWEEYFETFLAGKVCWGSWHEHVKGWWEAKDKHRILYLFYEDMKKNPKHEIQKLAEFIGKKLDDKVLDKIVHYTSFDVMKQNPMANYSSIPAEIMDHSISPFMRKGAVGDWKKHFTVAQNERFDEDYKKKMTDTRLTFHFQF

SEQ ID NO: 84901 - protein, 227 aa, Homo sapiens
  Payload ID: 16887
  Gene Symbol: SULT1C4
  Gene Name: sulfotransferase family, cytosolic, 1C, member 4
  Uniprot ID: O75897
  ENSP ID: ENSP00000387225
MALHDMEDFTFDGTKRLSVNYVKGILQPTDTCDIWDKIWNFQAKPDDLLISTYPKAGTTWTQEIVELIQNEGDVEKSKRAPTHQRFPFLEMKIPSLGSVCWGSWHEHVKGWWEAKDKHRILYLFYEDMKKNPKHEIQKLAEFIGKKLDDKVLDKIVHYTSFDVMKQNPMANYSSIPAEIMDHSISPFMRKGAVGDWKKHFTVAQNERFDEDYKKKMTDTRLTFHFQF

SEQ ID NO: 84902 - protein, 285 aa, Homo sapiens
  Payload ID: 16888
  Gene Symbol: SULT2A1
  Gene Name: sulfotransferase family, cytosolic, 2A, dehydroepiandrosterone (DHEA)-preferring, member 1
  Uniprot ID: Q06520
  ENSP ID: ENSP00000222002
MSDDFLWFEGIAFPTMGFRSETLRKVRDEFVIRDEDVIILTYPKSGTNWLAEILCLMHSKGDAKWIQSVPIWERSPWVESEIGYTALSETESPRLFSSHLPIQLFPKSFFSSKAKVIYLMRNPRDVLVSGYFFWKNMKFIKKPKSWEEYFEWFCQGTVLYGSWFDHIHGWMPMREEKNFLLLSYEELKQDTGRTIEKICQFLGKTLEPEELNLILKNSSFQSMKENKMSNYSLLSVDYVVDKAQLLRKGVSGDWKNHFTVAQAEDFDKLFQEKMADLPRELFPWE

SEQ ID NO: 84903 - protein, 365 aa, Homo sapiens
  Payload ID: 16889
  Gene Symbol: SULT2B1
  Gene Name: sulfotransferase family, cytosolic, 2B, member 1
  Uniprot ID: O00204
  ENSP ID: ENSP00000201586
MDGPAEPQIPGLWDTYEDDISEISQKLPGEYFRYKGVPFPVGLYSLESISLAENTQDVRDDDIFIITYPKSGTTWMIEIICLILKEGDPSWIRSVPIWERAPWCETIVGAFSLPDQYSPRLMSSHLPIQIFTKAFFSSKAKVIYMGRNPRDVVVSLYHYSKIAGQLKDPGTPDQFLRDFLKGEVQFGSWFDHIKGWLRMKGKDNFLFITYEELQQDLQGSVERICGFLGRPLGKEALGSVVAHSTFSAMKANTMSNYTLLPPSLLDHRRGAFLRKGVCGDWKNHFTVAQSEAFDRAYRKQMRGMPTFPWDEDPEEDGSPDPEPSPEPEPKPSLEPNTSLEREPRPNSSPSPSPGQASETPHPRPS

SEQ ID NO: 84904 - protein, 350 aa, Homo sapiens
  Payload ID: 16889
  Gene Symbol: SULT2B1
  Gene Name: sulfotransferase family, cytosolic, 2B, member 1
  Uniprot ID: O00204
  ENSP ID: ENSP00000312880
MASPPPFHSQKLPGEYFRYKGVPFPVGLYSLESISLAENTQDVRDDDIFIITYPKSGTTWMIEIICLILKEGDPSWIRSVPIWERAPWCETIVGAFSLPDQYSPRLMSSHLPIQIFTKAFFSSKAKVIYMGRNPRDVVVSLYHYSKIAGQLKDPGTPDQFLRDFLKGEVQFGSWFDHIKGWLRMKGKDNFLFITYEELQQDLQGSVERICGFLGRPLGKEALGSVVAHSTFSAMKANTMSNYTLLPPSLLDHRRGAFLRKGVCGDWKNHFTVAQSEAFDRAYRKQMRGMPTFPWDEDPEEDGSPDPEPSPEPEPKPSLEPNTSLEREPRPNSSPSPSPGQASETPHPRPS

SEQ ID NO: 84905 - protein, 265 aa, Homo sapiens
  Payload ID: 16890
  Gene Symbol: SULT6B1
  Gene Name: sulfotransferase family, cytosolic, 6B, member 1
  ENSP ID: ENSP00000384950
MCTSETFQALDTFEARHDDIVLASYPKCGSNWILHIVSELIYAVSKKKYKYPEFPVLECGDSEKYQRMKGFPSPRILATHLHYDKLPGSIFENKAKILVIFRNPKDTAVSFLHFHNDVPDIPSYGSWDEFFRQFMKGQVSWGRYFDFAINWNKHLDGDNVKFILYEDLKENLAAGIKQIAEFLGFFLTGEQIQTISVQSTFQAMRAKSQDTHGAVGPFLFRKGEVGDWKNLFSEIQNQEMDEKFKECLAGTSLGAKLKYESYCQG

SEQ ID NO: 84906 - protein, 16 aa, Homo sapiens
  Payload ID: 16890
  Gene Symbol: SULT6B1
  Gene Name: sulfotransferase family, cytosolic, 6B, member 1
  ENSP ID: ENSP00000395999
MCTSETFQALDTFEAR

SEQ ID NO: 84907 - protein, 16 aa, Homo sapiens
  Payload ID: 16890
  Gene Symbol: SULT6B1
  Gene Name: sulfotransferase family, cytosolic, 6B, member 1
  ENSP ID: ENSP00000407014
MCTSETFQALDTFEAR

SEQ ID NO: 84908 - protein, 16 aa, Homo sapiens
  Payload ID: 16890
  Gene Symbol: SULT6B1
  Gene Name: sulfotransferase family, cytosolic, 6B, member 1
  ENSP ID: ENSP00000416947
MCTSETFQALDTFEAR

SEQ ID NO: 84909 - protein, 303 aa, Homo sapiens
  Payload ID: 16890
  Gene Symbol: SULT6B1
  Gene Name: sulfotransferase family, cytosolic, 6B, member 1
  Uniprot ID: Q6IMI4
  ENSP ID: ENSP00000444081
MADKSKFIEYIDEALEKSKETALSHLFFTYQGIPYPITMCTSETFQALDTFEARHDDIVLASYPKCGSNWILHIVSELIYAVSKKKYKYPEFPVLECGDSEKYQRMKGFPSPRILATHLHYDKLPGSIFENKAKILVIFRNPKDTAVSFLHFHNDVPDIPSYGSWDEFFRQFMKGQVSWGRYFDFAINWNKHLDGDNVKFILYEDLKENLAAGIKQIAEFLGFFLTGEQIQTISVQSTFQAMRAKSQDTHGAVGPFLFRKGEVGDWKNLFSEIQNQEMDEKFKECLAGTSLGAKLKYESYCQG

SEQ ID NO: 84910 - protein, 212 aa, Homo sapiens
  Payload ID: 16891
  Gene Symbol: SENP8
  Gene Name: SUMO/sentrin peptidase family member, NEDD8 specific
  Uniprot ID: Q96LD8
  ENSP ID: ENSP00000340505
MDPVVLSYMDSLLRQSDVSLLDPPSWLNDHIIGFAFEYFANSQFHDCSDHVSFISPEVTQFIKCTSNPAEIAMFLEPLDLPNKRVVFLAINDNSNQAAGGTHWSLLVYLQDKNSFFHYDSHSRSNSVHAKQVAEKLEAFLGRKGDKLAFVEEKAPAQQNSYDCGMYVICNTEALCQNFFRQQTESLLQLLTPAYITKKRGEWKDLITTLAKK

SEQ ID NO: 84911 - protein, 212 aa, Homo sapiens; identical to SEQ ID NO: 84910
  Payload ID: 16891
  Gene Symbol: SENP8
  Gene Name: SUMO/sentrin peptidase family member, NEDD8 specific
  Uniprot ID: Q96LD8
  ENSP ID: ENSP00000446057

SEQ ID NO: 84912 - protein, 73 aa, Homo sapiens
  Payload ID: 16891
  Gene Symbol: SENP8
  Gene Name: SUMO/sentrin peptidase family member, NEDD8 specific
  ENSP ID: ENSP00000456567
MDPVVLSYMDSLLRQSDVSLLDPPSWLNDHIIGFAFEYFANSQFHDCSDHVSFISPEVTQFIKCTSNPAEIAM

SEQ ID NO: 84913 - protein, 37 aa, Homo sapiens
  Payload ID: 16891
  Gene Symbol: SENP8
  Gene Name: SUMO/sentrin peptidase family member, NEDD8 specific
  ENSP ID: ENSP00000457208
MDPVVLSYMDSLLRQSDVSLLDPPSWLNDHIIGFAFE

SEQ ID NO: 84914 - protein, 130 aa, Homo sapiens
  Payload ID: 16891
  Gene Symbol: SENP8
  Gene Name: SUMO/sentrin peptidase family member, NEDD8 specific
  ENSP ID: ENSP00000457215
MDPVVLSYMDSLLRQSDVSLLDPPSWLNDHIIGFAFEYFANSQFHDCSDHVSFISPEVTQFIKCTSNPAEIAMFLEPLDLPNKRVVFLAINDNSNQAAGGTHWSLLVYLQDKNSFFHYDSHSRSNSVHAK

SEQ ID NO: 84915 - protein, 346 aa, Homo sapiens
  Payload ID: 16892
  Gene Symbol: SAE1
  Gene Name: SUMO1 activating enzyme subunit 1
  Uniprot ID: Q9UBE0
  ENSP ID: ENSP00000270225
MVEKEEAGGGISEEEAAQYDRQIRLWGLEAQKRLRASRVLLVGLKGLGAEIAKNLILAGVKGLTMLDHEQVTPEDPGAQFLIRTGSVGRNRAEASLERAQNLNPMVDVKVDTEDIEKKPESFFTQFDAVCLTCCSRDVIVKVDQICHKNSIKFFTGDVFGYHGYTFANLGEHEFVEEKTKVAKVSQGVEDGPDTKRAKLDSSETTMVKKKVVFCPVKEALEVDWSSEKAKAALKRTTSDYFLLQVLLKFRTDKGRDPSSDTYEEDSELLLQIRNDVLDSLGISPDLLPEDFVRYCFSEMAPVCAVVGGILAQEIVKALSQRDPPHNNFFFFDGMKGNGIVECLGPK

SEQ ID NO: 84916 - protein, 299 aa, Homo sapiens
  Payload ID: 16892
  Gene Symbol: SAE1
  Gene Name: SUMO1 activating enzyme subunit 1
  ENSP ID: ENSP00000398818
MVEKEEAGGGISEEEAAQYDRQIRLWGLEAQKRLRASRVLLVGLKGLGAEIAKNLILAGVKGLTMLDHEQVTPEDPGAQFLIRTGSVGRNRAEASLERAQNLNPMVDVKVDTEDIEKKPESFFTQFDAVCLTCCSRDVIVKVDQICHKNSIKFFTGDVFGYHGYTFANLGEHEFVEEKTKVAKVSQGVEDGPDTKRAKLDSSETTMVKKKVVFCPVKEALEVDWSSEKAKAALKRTTSDYFLLQELFPRIVERVYAQRHPRSTERTHAKMLIPFLTKEKPGFLGEMAVSRSGVGKLQCS

SEQ ID NO: 84917 - protein, 299 aa, Homo sapiens
  Payload ID: 16892
  Gene Symbol: SAE1
  Gene Name: SUMO1 activating enzyme subunit 1
  Uniprot ID: Q9UBE0
  ENSP ID: ENSP00000416557
MVEKEEAGGGISEEEAAQYDRQIRLWGLEAQKRLRASRVLLVGLKGLGAEIAKNLILAGVKGLTMLDHEQVTPEDPGAQFLIRTGSVGRNRAEASLERAQNLNPMVDVKVDTEDIEKKPESFFTQFDAVCLTCCSRDVIVKVDQICHKNSIKFFTGDVFGYHGYTFANLGEHEFVEEKTKVAKVSQGVEDGPDTKRAKLDSSETTMVKKKVVFCPVKEALEVDWSSEKAKAALKRTTSDYFLLQGPVSAGPSSQQLLLLRWHEGEWDCGVPWPQVNSRFGSPRDANCSMPTCIPCPLPS

SEQ ID NO: 84918 - protein, 266 aa, Homo sapiens
  Payload ID: 16892
  Gene Symbol: SAE1
  Gene Name: SUMO1 activating enzyme subunit 1
  Uniprot ID: Q9UBE0
  ENSP ID: ENSP00000440818
MVEKEEAGGGISEEEAAQYDRQIRLWGLEAQKRLRASRVLLVGLKGLGAEIAKNLILAGVKGLTMLDHEQVTPEDPGAQFLIRTGSVGRNRAEASLERAQNLNPMVDVKVDTEDIEKKPESFFTQFDAVCLTCCSRDVIVKVDQICHKNSIKFFTGDVFGYHGYTFANLGEHEFVEEKTKVAKVSQGVEDGPDTKRAKLDSSETTMVKKKVVFCPVKEALEVDWSSEKAKAALKRTTSDYFLLQGTASPRWPQCVRWLEGFWHRKL

SEQ ID NO: 84919 - protein, 205 aa, Homo sapiens
  Payload ID: 16892
  Gene Symbol: SAE1
  Gene Name: SUMO1 activating enzyme subunit 1
  ENSP ID: ENSP00000468931
MLRASRVLLVGLKGLGAEIAKNLILAGVKGLTMLDHEQVTPEDPGAQFLIRTGSVGRNRAEASLERAQNLNPMVDVKVDTEDIEKKPESFFTQFDAVCLTCCSRDVIVKVDQICHKNSIKFFTGDVFGYHGYTFANLGEHEFVEEKTKVAKVSQGVEDGPDTKRAKLDSSETTMVKKKVVFCPVKEALEVDWSSEKAKAALKRTT

SEQ ID NO: 84920 - protein, 133 aa, Homo sapiens
  Payload ID: 16892
  Gene Symbol: SAE1
  Gene Name: SUMO1 activating enzyme subunit 1
  ENSP ID: ENSP00000469938
MLDHEQVTPEDPGAQFLIRTGSVGRNRAEASLERAQNLNPMVDVKVDTEDIEKKPESFFTQFDAVCLTCCSRDVIVKVDQICHKNSIKFFTGDVFGYHGYTFANLGEHEFVEEKTKVAKVSQGVEDGPDTKRA

SEQ ID NO: 84921 - protein, 71 aa, Homo sapiens
  Payload ID: 16892
  Gene Symbol: SAE1
  Gene Name: SUMO1 activating enzyme subunit 1
  ENSP ID: ENSP00000469978
MVDVKVDTEDIEKKPESFFTQFDAVCLTCCSRDVIVKVDQICHKNSIKFFTGDVFGYHGYTFANLGEHEFV

SEQ ID NO: 84922 - protein, 265 aa, Homo sapiens
  Payload ID: 16892
  Gene Symbol: SAE1
  Gene Name: SUMO1 activating enzyme subunit 1
  ENSP ID: ENSP00000470741
MVEKEEAGGGISEEEAAQYDRQIRLWGLEAQKRLRASRVLLVGLKGLGAEIAKNLILAGVKGLTMLDHEQVTPEDPGAQFLIRTGSVGRNRAEASLERAQNLNPMVDVKVDTEDIEKKPESFFTQFDAKVVFCPVKEALEVDWSSEKAKAALKRTTSDYFLLQVLLKFRTDKGRDPSSDTYEEDSELLLQIRNDVLDSLGISPDLLPEDFVRYCFSEMAPVCAVVGGILAQEIVKALSQRDPPHNNFFFFDGMKGNGIVECLGPK

SEQ ID NO: 84923 - protein, 157 aa, Homo sapiens
  Payload ID: 16892
  Gene Symbol: SAE1
  Gene Name: SUMO1 activating enzyme subunit 1
  ENSP ID: ENSP00000471010
MLDHEQVTPEDPGAQFLIRTGSVGRNRAEASLERAQNLNPMVDVKVDTEDIEKKPESFFTQFDAVCLTCCSRDVIVKVDQICHKNSIKFFTGDVFGYHGYTFANLGEHEFVEEKTKVAKVSQGVEDGPDTKRAKLDSSETTMVKKKVVFCPVKEALE

SEQ ID NO: 84924 - protein, 98 aa, Homo sapiens
  Payload ID: 16892
  Gene Symbol: SAE1
  Gene Name: SUMO1 activating enzyme subunit 1
  ENSP ID: ENSP00000472389
MLDHEQVTPEDPGAQFLIRTGSVGRNRAEASLERAQNLNPMVDVKVDTEDIEKKPESFFTQFDAVCLTCCSRDVIVKVDQICHKNSIKFFTGDVFGYH

SEQ ID NO: 84925 - protein, 50 aa, Homo sapiens
  Payload ID: 16892
  Gene Symbol: SAE1
  Gene Name: SUMO1 activating enzyme subunit 1
  ENSP ID: ENSP00000473037
MVEKEEAGGGISEEEAAQYDRQIRLWGLEAQKRSGPARLEAARVWRGRLF

SEQ ID NO: 84926 - protein, 644 aa, Homo sapiens
  Payload ID: 16893
  Gene Symbol: SENP1
  Gene Name: SUMO1/sentrin specific peptidase 1
  Uniprot ID: Q9P0U3
  ENSP ID: ENSP00000394791
MDDIADRMRMDAGEVTLVNHNSVFKTHLLPQTGFPEDQLSLSDQQILSSRQGHLDRSFTCSTRSAAYNPSYYSDNPSSDSFLGSGDLRTFGQSANGQWRNSTPSSSSSLQKSRNSRSLYLETRKTSSGLSNSFAGKSNHHCHVSAYEKSFPIKPVPSPSWSGSCRRSLLSPKKTQRRHVSTAEETVQEEEREIYRQLLQMVTGKQFTIAKPTTHFPLHLSRCLSSSKNTLKDSLFKNGNSCASQIIGSDTSSSGSASILTNQEQLSHSVYSLSSYTPDVAFGSKDSGTLHHPHHHHSVPHQPDNLAASNTQSEGSDSVILLKVKDSQTPTPSSTFFQAELWIKELTSVYDSRARERLRQIEEQKALALQLQNQRLQEREHSVHDSVELHLRVPLEKEIPVTVVQETQKKGHKLTDSEDEFPEITEEMEKEIKNVFRNGNQDEVLSEAFRLTITRKDIQTLNHLNWLNDEIINFYMNMLMERSKEKGLPSVHAFNTFFFTKLKTAGYQAVKRWTKKVDVFSVDILLVPIHLGVHWCLAVVDFRKKNITYYDSMGGINNEACRILLQYLKQESIDKKRKEFDTNGWQLFSKKSQEIPQQMNGSDCGMFACKYADCITKDRPINFTQQHMPYFRKRMVWEILHRKLL

SEQ ID NO: 84927 - protein, 644 aa, Homo sapiens; identical to SEQ ID NO: 84926
  Payload ID: 16893
  Gene Symbol: SENP1
  Gene Name: SUMO1/sentrin specific peptidase 1
  Uniprot ID: Q9P0U3
  ENSP ID: ENSP00000447328

SEQ ID NO: 84928 - protein, 130 aa, Homo sapiens
  Payload ID: 16893
  Gene Symbol: SENP1
  Gene Name: SUMO1/sentrin specific peptidase 1
  ENSP ID: ENSP00000447593
MDDIADRMRMDAGEVTLVNHNSVFKTHLLPQTGFPEDQLSLSDQQILSSRQGHLDRSFTCSTRSAAYNPSYYSGPGLGVLARYSWGKMLTFGGHHGVTLMQIRHMAVAGFSSFINFQIILPQTVFLAQAI

SEQ ID NO: 84929 - protein, 142 aa, Homo sapiens
  Payload ID: 16893
  Gene Symbol: SENP1
  Gene Name: SUMO1/sentrin specific peptidase 1
  ENSP ID: ENSP00000448597
MRMDAGEVTLVNHNSVFKTHLLPQTGFPEDQLSLSDQQILSSRQGHLDRSFTCSTRSAAYNPSYYSDNPSSDSFLGSGDLRTFGQSANGQWRNSTPSSSSSLQKSRNSRSLYLETRKTSSGLSNSFAGKSNHHCHVSAYEKS

SEQ ID NO: 84930 - protein, 643 aa, Homo sapiens
  Payload ID: 16893
  Gene Symbol: SENP1
  Gene Name: SUMO1/sentrin specific peptidase 1
  Uniprot ID: Q9P0U3
  ENSP ID: ENSP00000450076
MDDIADRMRMDAGEVTLVNHNSVFKTHLLPQTGFPEDQLSLSDQQILSSRQGHLDRSFTCSTRSAAYNPSYYSDNPSSDSFLGSGDLRTFGQSANGQWRNSTPSSSSSLQKSRNSRSLYLETRKTSSGLSNSFAGKSNHHCHVSAYEKSFPIKPVPSPSWSGSCRRSLLSPKKTQRRHVSTAEETVQEEEREIYRQLLQMVTGKQFTIAKPTTHFPLHLSRCLSSSKNTLKDSLFKNGNSCASQIIGSDTSSSGSASILTNQEQLSHSVYSLSSYTPDVAFGSKDSGTLHHPHHHHSVPHQPDNLAASNTQSEGSDSVILLKVKDSQTPTPSSTFFQAELWIKELTSVYDSRARERLRQIEEQKALALQLQNQRLQEREHSVHDSVELHLRVPLEKEIPVTVVQETQKKGHKLTDSEDEFPEITEEMEKEIKNVFRNGNQDEVLSEAFRLTITRKDIQTLNHLNWLNDEIINFYMNMLMERSKEKGLPSVHAFNTFFFTKLKTAGYQAVKRWTKKVDVFSVDILLVPIHLGVHWCLAVVDFRKKNITYYDSMGGINNEACRILLQYLKQESIDKKRKEFDTNGWQLFSKKSQIPQQMNGSDCGMFACKYADCITKDRPINFTQQHMPYFRKRMVWEILHRKLL

SEQ ID NO: 84931 - protein, 755 aa, Homo sapiens
  Payload ID: 16894
  Gene Symbol: SENP5
  Gene Name: SUMO1/sentrin specific peptidase 5
  Uniprot ID: Q96HI0
  ENSP ID: ENSP00000327197
MKKQRKILWRKGIHLAFSEKWNTGFGGFKKFYFHQHLCILKAKLGRPVTWNRQLRHFQGRKKALQIQKTWIKDEPLCAKTKFNVATQNVSTLSSKVKRKDAKHFISSSKTLLRLQAEKLLSSAKNSDHEYCREKNLLKAVTDFPSNSALGQANGHRPRTDPQPSDFPMKFNGESQSPGESGTIVVTLNNHKRKGFCYGCCQGPEHHRNGGPLIPKKFQLNQHRRIKLSPLMMYEKLSMIRFRYRILRSQHFRTKSKVCKLRKAQRSWVQKVTGDHQETRRENGEGGSCSPFPSPEPKDPSCRHQPYFPDMDSSAVVKGTNSHVPDCHTKGSSFLGKELSLDEAFPDQQNGSATNAWDQSSCSSPKWECTELIHDIPLPEHRSNTMFISETEREIMTLGQENQTSSVSDDRVKLSVSGADTSVSSVDGPVSQKAVQNENSYQMEEDGSLKQSILSSELLDHPYCKSPLEAPLVCSGLKLENQVGGGKNSQKASPVDDEQLSVCLSGFLDEVMKKYGSLVPLSEKEVLGRLKDVFNEDFSNRKPFINREITNYRARHQKCNFRIFYNKHMLDMDDLATLDGQNWLNDQVINMYGELIMDAVPDKVHFFNSFFHRQLVTKGYNGVKRWTKKVDLFKKSLLLIPIHLEVHWSLITVTLSNRIISFYDSQGIHFKFCVENIRKYLLTEAREKNRPEFLQGWQTAVTKCIPQQKNDSDCGVFVLQYCKCLALEQPFQFSQEDMPRVRKRIYKELCECRLMD

SEQ ID NO: 84932 - protein, 709 aa, Homo sapiens
  Payload ID: 16894
  Gene Symbol: SENP5
  Gene Name: SUMO1/sentrin specific peptidase 5
  Uniprot ID: Q96HI0
  ENSP ID: ENSP00000390231
MKKQRKILWRKGIHLAFSEKWNTGFGGFKKFYFHQHLCILKAKLGRPVTWNRQLRHFQGRKKALQIQKTWIKDEPLCAKTKFNVATQNVSTLSSKVKRKDAKHFISSSKTLLRLQAEKLLSSAKNSDHEYCREKNLLKAVTDFPSNSALGQANGHRPRTDPQPSDFPMKFNGESQSPGESGTIVVTLNNHKRKGFCYGCCQGPEHHRNGGPLIPKKFQLNQHRRIKLSPLMMYEKLSMIRFRYRILRSQHFRTKSKVCKLRKAQRSWVQKVTGDHQETRRENGEGGSCSPFPSPEPKDPSCRHQPYFPDMDSSAVVKGTNSHVPDCHTKGSSFLGKELSLDEAFPDQQNGSATNAWDQSSCSSPKWECTELIHDIPLPEHRSNTMFISETEREIMTLGQENQTSSVSDDRVKLSVSGADTSVSSVDGPVSQKAVQNENSYQMEEDGSLKQSILSSELLDHPYCKSPLEAPLVCSGLKLENQVGGGKNSQKASPVDDEQLSVCLSGFLDEVMKKYGSLVPLSEKEVLGRLKDVFNEDFSNRKPFINREITNYRARHQKCNFRIFYNKHMLDMDDLATLDGQNWLNDQVINMYGELIMDAVPDKVHFFNSFFHRQLVTKGYNGVKRWTKKNIRKYLLTEAREKNRPEFLQGWQTAVTKCIPQQKNDSDCGVFVLQYCKCLALEQPFQFSQEDMPRVRKRIYKELCECRLMD

SEQ ID NO: 84933 - protein, 245 aa, Homo sapiens
  Payload ID: 16894
  Gene Symbol: SENP5
  Gene Name: SUMO1/sentrin specific peptidase 5
  ENSP ID: ENSP00000396927
MKKYGSLVPLSEKEVLGRLKDVFNEDFSNRKPFINREITNYRARHQKCNFRIFYNKHMLDMDDLATLDGQNWLNDQVINMYGELIMDAVPDKVHFFNSFFHRQLVTKGYNGVKRWTKKVDLFKKSLLLIPIHLEVHWSLITVTLSNRIISFYDSQGIHFKFCVENIRKYLLTEAREKNRPEFLQGWQTAVTKCIPQQKNDSDCGVFVLQYCKCLALEQPFQFSQEDMPRVRKRIYKELCECRLMD

SEQ ID NO: 84934 - protein, 98 aa, Homo sapiens
  Payload ID: 16894
  Gene Symbol: SENP5
  Gene Name: SUMO1/sentrin specific peptidase 5
  ENSP ID: ENSP00000405663
  MOD_RES (1)..(1): Any amino acid
XLFKKSLLLIPIHLEVHWSLITVTLSNRIISFYDSQGIHFKFCVECIPQQKNDSDCGVFVLQYCKCLALEQPFQFSQEDMPRVRKRIYKELCECRLMD

SEQ ID NO: 84935 - protein, 77 aa, Homo sapiens
  Payload ID: 16894
  Gene Symbol: SENP5
  Gene Name: SUMO1/sentrin specific peptidase 5
  ENSP ID: ENSP00000415227
  MOD_RES (1)..(1): Any amino acid
XLTEAREKNRPEFLQGWQTAVTKCIPQQKNDSDCGVFVLQYCKCLALEQPFQFSQEDMPRVRKRIYKELCGWREEGR

SEQ ID NO: 84936 - protein, 685 aa, Homo sapiens
  Payload ID: 16895
  Gene Symbol: SENP6
  Gene Name: SUMO1/sentrin specific peptidase 6
  ENSP ID: ENSP00000321820
MAAGKSGGSAGEITFLEALARSESKRDGGFKNNWSFDHEEESEGDTDKDGTNLLSVDEDEDSETSKGKKLNRRSEIVANSSGEFILKTYVRRNKSESFKTLKGNPIGLNMLSNNKKLSENTQNTSLCSGTVVHGRRFHHAHAQIPVVKTAAQRKEYPPHVQKVEINPVRLSRLQGVERIMKKTEESESQVEPEIKRKVQQKRHCSTYQPTPPLSPASKKCLTHLEDLQRNCRQAITLNESTGPLLRTSIHQNSGGQKSQNTGLTTKKFYGNNVEKVPIDIIVNCDDSKHTYLQTNGKVILPGAKIPKITNLKERKTSLSDLNDPIILSSDDDDDNDRTNRRESISPQPADSACSSPAPSTGKVEAALNENTCRAERELRSIPEDSELNTVTLPRKARMKDQFGNSIINTPLKRRKVFSQEPPDALALSCQSSFDSVILNCRSIRVGTLFRLLIEPVIFCLDFIKIQLDEPDHDPVEIILNTSDLTKCEWCNVRKLPVVFLQAIPAVYQKLSIQLQMNKEDKVWNDCKGVNKLTNLEEQYIILIFQNGLDPPANMVFESIINEIGIKNNISNFFAKIPFEEANGRLVACTRTYEESIKGSCGQKENKIKTVSFESKIQLRSKQEFQFFDEEEETGENHTIFIGPVEKLIVYPPPPAKGGISVTNEDLHCLNEGEFLNDVIIDFYLK

SEQ ID NO: 84937 - protein, 1105 aa, Homo sapiens
  Payload ID: 16895
  Gene Symbol: SENP6
  Gene Name: SUMO1/sentrin specific peptidase 6
  Uniprot ID: Q9GZR1
  ENSP ID: ENSP00000359027
MAAGKSGGSAGEITFLEALARSESKRDGGFKNNWSFDHEEESEGDTDKDGTNLLSVDEDEDSETSKGKKLNRRSEIVANSSGEFILKTYVRRNKSESFKTLKGNPIGLNMLSNNKKLSENTQNTSLCSGTVVHGRRFHHAHAQIPVVKTAAQRKEYPPHVQKVEINPVRLSRLQGVERIMKKTEESESQVEPEIKRKVQQKRHCSTYQPTPPLSPASKKCLTHLEDLQRNCRQAITLNESTGPLLRTSIHQNSGGQKSQNTGLTTKKFYGNNVEKVPIDIIVNCDDSKHTYLQTNGKVILPGAKIPKITNLKERKTSLSDLNDPIILSSDDDDDNDRTNRRESISPQPADSACSSPAPSTGKVEAALNENTCRAERELRSIPEDSELNTVTLPRKARMKDQFGNSIINTPLKRRKVFSQEPPDALALSCQSSFDSVILNCRSIRVGTLFRLLIEPVIFCLDFIKIQLDEPDHDPVEIILNTSDLTKCEWCNVRKLPVVFLQAIPAVYQKLSIQLQMNKEDKVWNDCKGVNKLTNLEEQYIILIFQNGLDPPANMVFESIINEIGIKNNISNFFAKIPFEEANGRLVACTRTYEESIKGSCGQKENKIKTVSFESKIQLRSKQEFQFFDEEEETGENHTIFIGPVEKLIVYPPPPAKGGISVTNEDLHCLNEGEFLNDVIIDFYLKYLVLEKLKKEDADRIHIFSSFFYKRLNQRERRNHETTNLSIQQKRHGRVKTWTRHVDIFEKDFIFVPLNEAAHWFLAVVCFPGLEKPKYEPNPHYHENAVIQKCSTVEDSCISSSASEMESCSQNSSAKPVIKKMLNKKHCIAVIDSNPGQEESDPRYKRNICSVKYSVKKINHTASENEEFNKGESTSQKVADRTKSENGLQNESLSSTHHTDGLSKIRLNYSDESPEAGKMLEDELVDFSEDQDNQDDSSDDGFLADDNCSSEIGQWHLKPTICKQPCILLMDSLRGPSRSNVVKILREYLEVEWEVKKGSKRSFSKDVMKGSNPKVPQQNNFSDCGVYVLQYVESFFENPILSFELPMNLANWFPPPRMRTKREEIRNIILKLQEDQSKEKRKHKDTYSTEAPLGEGTEQYVNSISD

SEQ ID NO: 84938 - protein, 582 aa, Homo sapiens
  Payload ID: 16895
  Gene Symbol: SENP6
  Gene Name: SUMO1/sentrin specific peptidase 6
  ENSP ID: ENSP00000391426
LSNNKKLSENTQNTSLCSGTVVHGRRFHHAHAQIPVVKTAAQSSLDRKERKEYPPHVQKVEINPVRLSRLQGVERIMKKTEESESQVEPEIKRKVQQKRHCSTYQPTPPLSPASKKCLTHLEDLQRNCRQAITLNESTGPLLRTSIHQNSGGQKSQNTGLTTKKFYGNNVEKVPIDIIVNCDDSKHTYLQTNGKVILPGAKIPKITNLKERKTSLSDLNDPIILSSDDDDDNDRTNRRESISPQPADSACSSPAPSTGKVEAALNENTCRAERELRSIPEDSELNTVTLPRKARMKDQFGNSIINTPLKRRKVFSQEPPDALALSCQSSFDSVILNCRSIRVGTLFRLLIEPVIFCLDFIKIQLDEPDHDPVEIILNTSDLTKCEWCNVRKLPVVFLQAIPAVYQKLSIQLQMNKEDKVWNDCKGVNKLTNLEEQYIILIFQNGLDPPANMVFESIINEIGIKNNISNFFAKIPFEEANGRLVACTRTYEESIKGSCGQKENKIKTVSFESKIQLRSKQEFQFFDEEEETGENHTIFIGPVEKLIVYPPPPAKGGISVTNEDLHCLNEGEFLNDVIIDFYLK

SEQ ID NO: 84939 - protein, 1112 aa, Homo sapiens
  Payload ID: 16895
  Gene Symbol: SENP6
  Gene Name: SUMO1/sentrin specific peptidase 6
  Uniprot ID: Q9GZR1
  ENSP ID: ENSP00000402527
MAAGKSGGSAGEITFLEALARSESKRDGGFKNNWSFDHEEESEGDTDKDGTNLLSVDEDEDSETSKGKKLNRRSEIVANSSGEFILKTYVRRNKSESFKTLKGNPIGLNMLSNNKKLSENTQNTSLCSGTVVHGRRFHHAHAQIPVVKTAAQSSLDRKERKEYPPHVQKVEINPVRLSRLQGVERIMKKTEESESQVEPEIKRKVQQKRHCSTYQPTPPLSPASKKCLTHLEDLQRNCRQAITLNESTGPLLRTSIHQNSGGQKSQNTGLTTKKFYGNNVEKVPIDIIVNCDDSKHTYLQTNGKVILPGAKIPKITNLKERKTSLSDLNDPIILSSDDDDDNDRTNRRESISPQPADSACSSPAPSTGKVEAALNENTCRAERELRSIPEDSELNTVTLPRKARMKDQFGNSIINTPLKRRKVFSQEPPDALALSCQSSFDSVILNCRSIRVGTLFRLLIEPVIFCLDFIKIQLDEPDHDPVEIILNTSDLTKCEWCNVRKLPVVFLQAIPAVYQKLSIQLQMNKEDKVWNDCKGVNKLTNLEEQYIILIFQNGLDPPANMVFESIINEIGIKNNISNFFAKIPFEEANGRLVACTRTYEESIKGSCGQKENKIKTVSFESKIQLRSKQEFQFFDEEEETGENHTIFIGPVEKLIVYPPPPAKGGISVTNEDLHCLNEGEFLNDVIIDFYLKYLVLEKLKKEDADRIHIFSSFFYKRLNQRERRNHETTNLSIQQKRHGRVKTWTRHVDIFEKDFIFVPLNEAAHWFLAVVCFPGLEKPKYEPNPHYHENAVIQKCSTVEDSCISSSASEMESCSQNSSAKPVIKKMLNKKHCIAVIDSNPGQEESDPRYKRNICSVKYSVKKINHTASENEEFNKGESTSQKVADRTKSENGLQNESLSSTHHTDGLSKIRLNYSDESPEAGKMLEDELVDFSEDQDNQDDSSDDGFLADDNCSSEIGQWHLKPTICKQPCILLMDSLRGPSRSNVVKILREYLEVEWEVKKGSKRSFSKDVMKGSNPKVPQQNNFSDCGVYVLQYVESFFENPILSFELPMNLANWFPPPRMRTKREEIRNIILKLQEDQSKEKRKHKDTYSTEAPLGEGTEQYVNSISD

SEQ ID NO: 84940 - protein, 388 aa, Homo sapiens
  Payload ID: 16895
  Gene Symbol: SENP6
  Gene Name: SUMO1/sentrin specific peptidase 6
  ENSP ID: ENSP00000422576
  MOD_RES (1)..(1): Any amino acid
XRSIPEDSELNTVTLPRKARMKDQFGNSIINTPLKRRKVFSQEPPDALALSCQSSFDSVILNCRSIRVGTLFRLLIEPVIFCLDFIKIQLDEPDHDPVEIILNTSDLTKCEWCNVRKLPVVFLQAIPAVYQKLSIQLQMNKEDKVWNDCKGVNKLTNLEEQYIILIFQNGLDPPANMVFESIINEIGIKNNISNFFAKIPFEEANGRLVACTRTYEESIKGSCGQKENKIKTVSFESKIQLRSKQEFQFFDEEEETGENHTIFIGPVEKLIVYPPPPAKGGISVTNEDLHCLNEGEFLNDVIIDFYLKYLVLEKLKKEDADRIHIFSSFFYKRLNQRERRNHETTNLSIQQKRHGRVKTWTRHVDIFEKDFIFVPLNEAWLKQNQTKL

SEQ ID NO: 84941 - protein, 74 aa, Homo sapiens
  Payload ID: 16895
  Gene Symbol: SENP6
  Gene Name: SUMO1/sentrin specific peptidase 6
  ENSP ID: ENSP00000425624
MAAGKSGGSAGEITFLEALARSESKRDGGFKNNWSFDHEEESEGDTDKECFTSVWATAPFIITTLCAFTDEMLI

SEQ ID NO: 84942 - protein, 220 aa, Homo sapiens
  Payload ID: 16895
  Gene Symbol: SENP6
  Gene Name: SUMO1/sentrin specific peptidase 6
  ENSP ID: ENSP00000426480
MLSNNKKLSENTQNTSLCSGTVVHGRRFHHAHAQIPVVKTAAQSLDRKERKEYPPHVQKVEINPVRLSRLQGVERIMKKTEESESQVEPEIKRKVQQKRHCSTYQPTPPLSPASKKCLTHLEDLQRNCRQAITLNESTGPLLRTSIHQNSGGQKSQNTGLTTKKFYGNNVEKVPIDIIVNCDDSKHTYLQTNGKVILPGAKIPKITNLKERKTSLSDLND

SEQ ID NO: 84943 - protein, 984 aa, Homo sapiens
  Payload ID: 16896
  Gene Symbol: SENP7
  Gene Name: SUMO1/sentrin specific peptidase 7
  Uniprot ID: Q9BQF6
  ENSP ID: ENSP00000313624
MDKRKLGRRPSSSEIITEGKRKKSSSDLSEIRKMLNAKPEDVHVQSPLSKFRSSERWTLPLQWERSLRNKVISLDHKNKKHIRGCPVTSKSSPERIPRVILTNVLGTELGRKYIRTPPVTEGSLSDTDNLQSEQLSSSSDGSLESYQNLNPHKSCYLSERGSQRSKTVDDNSAKQTAHNKEKRRKDDGISLLISDTQPEDLNSGSRGCDHLEQESRNKDVKYSDSKVELTLISRKTKRRLRNNLPDSQYCTSLDKSTEQTKKQEDDSTISTEFEKPSENYHQDPKLPEEITTKPTKSDFTKLSSLNSQELTLSNATKSASAGSTTETVENSNSIDIVGISSLVEKDENELNTIEKPILRGHNEGNQSLISAEPIVVSSDEEGPVEHKSSEILKLQSKQDRETTNENESTSESALLELPLITCESVQMSSELCPYNPVMENISSIMPSNEMDLQLDFIFTSVYIGKIKGASKGCVTITKKYIKIPFQVSLNEISLLVDTTHLKRFGLWKSKDDNHSKRSHAILFFWVSSDYLQEIQTQLEHSVLSQQSKSSEFIFLELHNPVSQREELKLKDIMTEISIISGELELSYPLSWVQAFPLFQNLSSKESSFIHYYCVSTCSFPAGVAVAEEMKLKSVSQPSNTDAAKPTYTFLQKQSSGCYSLSITSNPDEEWREVRHTGLVQKLIVYPPPPTKGGLGVTNEDLECLEEGEFLNDVIIDFYLKYLILEKASDELVERSHIFSSFFYKCLTRKENNLTEDNPNLSMAQRRHKRVRTWTRHINIFNKDYIFVPVNESSHWYLAVICFPWLEEAVYEDFPQTVSQQSQAQQSQNDNKTIDNDLRTTSTLSLSAEDSQSTESNMSVPKKMCKRPCILILDSLKAASVQNTVQNLREYLEVEWEVKLKTHRQFSKTNMVDLCPKVPKQDNSSDCGVYLLQYVESFFKDPIVNFELPIHLEKWFPRHVIKTKREDIRELILKLHLQQQKGSSS

SEQ ID NO: 84944 - protein, 1017 aa, Homo sapiens
  Payload ID: 16896
  Gene Symbol: SENP7
  Gene Name: SUMO1/sentrin specific peptidase 7
  Uniprot ID: Q9BQF6
  ENSP ID: ENSP00000342159
MLNAKPEDVHVQSPLSKFRSSERWTLPLQWERSLRNKVISLDHKNKKHIRGCPVTSKSSPERQLKVMLTNVLWTDLGRKFRKTLPRNDANLCDANKVQSDSLPSTSVDSLETCQKLEPLRQSLNLSERIPRVILTNVLGTELGRKYIRTPPVTEGSLSDTDNLQSEQLSSSSDGSLESYQNLNPHKSCYLSERGSQRSKTVDDNSAKQTAHNKEKRRKDDGISLLISDTQPEDLNSGSRGCDHLEQESRNKDVKYSDSKVELTLISRKTKRRLRNNLPDSQYCTSLDKSTEQTKKQEDDSTISTEFEKPSENYHQDPKLPEEITTKPTKSDFTKLSSLNSQELTLSNATKSASAGSTTETVENSNSIDIVGISSLVEKDENELNTIEKPILRGHNEGNQSLISAEPIVVSSDEEGPVEHKSSEILKLQSKQDRETTNENESTSESALLELPLITCESVQMSSELCPYNPVMENISSIMPSNEMDLQLDFIFTSVYIGKIKGASKGCVTITKKYIKIPFQVSLNEISLLVDTTHLKRFGLWKSKDDNHSKRSHAILFFWVSSDYLQEIQTQLEHSVLSQQSKSSEFIFLELHNPVSQREELKLKDIMTEISIISGELELSYPLSWVQAFPLFQNLSSKESSFIHYYCVSTCSFPAGVAVAEEMKLKSVSQPSNTDAAKPTYTFLQKQSSGCYSLSITSNPDEEWREVRHTGLVQKLIVYPPPPTKGGLGVTNEDLECLEEGEFLNDVIIDFYLKYLILEKASDELVERSHIFSSFFYKCLTRKENNLTEDNPNLSMAQRRHKRVRTWTRHINIFNKDYIFVPVNESSHWYLAVICFPWLEEAVYEDFPQTVSQQSQAQQSQNDNKTIDNDLRTTSTLSLSAEDSQSTESNMSVPKKMCKRPCILILDSLKAASVQNTVQNLREYLEVEWEVKLKTHRQFSKTNMVDLCPKVPKQDNSSDCGVYLLQYVESFFKDPIVNFELPIHLEKWFPRHVIKTKREDIRELILKLHLQQQKGSSS

SEQ ID NO: 84945 - protein, 238 aa, Homo sapiens
  Payload ID: 16896
  Gene Symbol: SENP7
  Gene Name: SUMO1/sentrin specific peptidase 7
  Uniprot ID: Q9BQF6
  ENSP ID: ENSP00000377647
MKKFLYIKSVFHTLRMAQRRHKRVRTWTRHINIFNKDYIFVPVNESSHWYLAVICFPWLEEAVYEDFPQTVSQQSQAQQSQNDNKTIDNDLRTTSTLSLSAEDSQSTESNMSVPKKMCKRPCILILDSLKAASVQNTVQNLREYLEVEWEVKLKTHRQFSKTNMVDLCPKVPKQDNSSDCGVYLLQYVESFFKDPIVNFELPIHLEKWFPRHVIKTKREDIRELILKLHLQQQKGSSS

SEQ ID NO: 84946 - protein, 886 aa, Homo sapiens
  Payload ID: 16896
  Gene Symbol: SENP7
  Gene Name: SUMO1/sentrin specific peptidase 7
  Uniprot ID: Q9BQF6
  ENSP ID: ENSP00000377651
MLNAKPEDVHVQSPLSKFRSSERWTLPLQWERSLRNKVISLDHKNKKHIRGCPVTSKSSPERGSQRSKTVDDNSAKQTAHNKEKRRKDDGISLLISDTQPEDLNSGSRGCDHLEQESRNKDVKYSDSKVELTLISRKTKRRLRNNLPDSQYCTSLDKSTEQTKKQEDDSTISTEFEKPSENYHQDPKLPEEITTKPTKSDFTKLSSLNSQELTLSNATKSASAGSTTETVENSNSIDIVGISSLVEKDENELNTIEKPILRGHNEGNQSLISAEPIVVSSDEEGPVEHKSSEILKLQSKQDRETTNENESTSESALLELPLITCESVQMSSELCPYNPVMENISSIMPSNEMDLQLDFIFTSVYIGKIKGASKGCVTITKKYIKIPFQVSLNEISLLVDTTHLKRFGLWKSKDDNHSKRSHAILFFWVSSDYLQEIQTQLEHSVLSQQSKSSEFIFLELHNPVSQREELKLKDIMTEISIISGELELSYPLSWVQAFPLFQNLSSKESSFIHYYCVSTCSFPAGVAVAEEMKLKSVSQPSNTDAAKPTYTFLQKQSSGCYSLSITSNPDEEWREVRHTGLVQKLIVYPPPPTKGGLGVTNEDLECLEEGEFLNDVIIDFYLKYLILEKASDELVERSHIFSSFFYKCLTRKENNLTEDNPNLSMAQRRHKRVRTWTRHINIFNKDYIFVPVNESSHWYLAVICFPWLEEAVYEDFPQTVSQQSQAQQSQNDNKTIDNDLRTTSTLSLSAEDSQSTESNMSVPKKMCKRPCILILDSLKAASVQNTVQNLREYLEVEWEVKLKTHRQFSKTNMVDLCPKVPKQDNSSDCGVYLLQYVESFFKDPIVNFELPIHLEKWFPRHVIKTKREDIRELILKLHLQQQKGSSS

SEQ ID NO: 84947 - protein, 985 aa, Homo sapiens
  Payload ID: 16896
  Gene Symbol: SENP7
  Gene Name: SUMO1/sentrin specific peptidase 7
  ENSP ID: ENSP00000377654
MDKRKLGRRPSSSEIITEGKRKKSSSDLSEIRKMLNAKPEDVHVQSPLSKFRSSERWTLPLQWERSLRNKVISLDHKNKKHIRGCPVTSKSSPERQLKVMLTNVLWTDLGRKFRKTLPRNDANLCDANKVQSDSLPSTSVDSLETCQKLEPLRQSLNLSERGSQRSKTVDDNSAKQTAHNKEKRRKDDGISLLISDTQPEDLNSGSRGCDHLEQESRNKDVKYSDSKVELTLISRKTKRRLRNNLPDSQYCTSLDKSTEQTKKQEDDSTISTEFEKPSENYHQDPKLPEEITTKPTKSDFTKLSSLNSQELTLSNATKSASAGSTTETVENSNSIDIVGISSLVEKDENELNTIEKPILRGHNEGNQSLISAEPIVVSSDEEGPVEHKSSEILKLQSKQDRETTNENESTSESALLELPLITCESVQMSSELCPYNPVMENISSIMPSNEMDLQLDFIFTSVYIGKIKGASKGCVTITKKYIKIPFQVSLNEISLLVDTTHLKRFGLWKSKDDNHSKRSHAILFFWVSSDYLQEIQTQLEHSVLSQQSKSSEFIFLELHNPVSQREELKLKDIMTEISIISGELELSYPLSWVQAFPLFQNLSSKESSFIHYYCVSTCSFPAGVAVAEEMKLKSVSQPSNTDAAKPTYTFLQKQSSGCYSLSITSNPDEEWREVRHTGLVQKLIVYPPPPTKGGLGVTNEDLECLEEGEFLNDVIIDFYLKYLILEKASDELVERSHIFSSFFYKCLTRKENNLTEDNPNLSMAQRRHKRVRTWTRHINIFNKDYIFVPVNESSHWYLAVICFPWLEEAVYEDFPQTVSQQSQAQQSQNDNKTIDNDLRTTSTLSLSAEDSQSTESNMSVPKKMCKRPCILILDSLKAASVQNTVQNLREYLEVEWEVKLKTHRQFSKTNMVDLCPKVPKQDNSSDCGVYLLQYVESFFKDPIVNFELPIHLEKWFPRHVIKTKREDIRELILKLHLQQQKGSSS

SEQ ID NO: 84948 - protein, 1050 aa, Homo sapiens
  Payload ID: 16896
  Gene Symbol: SENP7
  Gene Name: SUMO1/sentrin specific peptidase 7
  Uniprot ID: Q9BQF6
  ENSP ID: ENSP00000377655
MDKRKLGRRPSSSEIITEGKRKKSSSDLSEIRKMLNAKPEDVHVQSPLSKFRSSERWTLPLQWERSLRNKVISLDHKNKKHIRGCPVTSKSSPERQLKVMLTNVLWTDLGRKFRKTLPRNDANLCDANKVQSDSLPSTSVDSLETCQKLEPLRQSLNLSERIPRVILTNVLGTELGRKYIRTPPVTEGSLSDTDNLQSEQLSSSSDGSLESYQNLNPHKSCYLSERGSQRSKTVDDNSAKQTAHNKEKRRKDDGISLLISDTQPEDLNSGSRGCDHLEQESRNKDVKYSDSKVELTLISRKTKRRLRNNLPDSQYCTSLDKSTEQTKKQEDDSTISTEFEKPSENYHQDPKLPEEITTKPTKSDFTKLSSLNSQELTLSNATKSASAGSTTETVENSNSIDIVGISSLVEKDENELNTIEKPILRGHNEGNQSLISAEPIVVSSDEEGPVEHKSSEILKLQSKQDRETTNENESTSESALLELPLITCESVQMSSELCPYNPVMENISSIMPSNEMDLQLDFIFTSVYIGKIKGASKGCVTITKKYIKIPFQVSLNEISLLVDTTHLKRFGLWKSKDDNHSKRSHAILFFWVSSDYLQEIQTQLEHSVLSQQSKSSEFIFLELHNPVSQREELKLKDIMTEISIISGELELSYPLSWVQAFPLFQNLSSKESSFIHYYCVSTCSFPAGVAVAEEMKLKSVSQPSNTDAAKPTYTFLQKQSSGCYSLSITSNPDEEWREVRHTGLVQKLIVYPPPPTKGGLGVTNEDLECLEEGEFLNDVIIDFYLKYLILEKASDELVERSHIFSSFFYKCLTRKENNLTEDNPNLSMAQRRHKRVRTWTRHINIFNKDYIFVPVNESSHWYLAVICFPWLEEAVYEDFPQTVSQQSQAQQSQNDNKTIDNDLRTTSTLSLSAEDSQSTESNMSVPKKMCKRPCILILDSLKAASVQNTVQNLREYLEVEWEVKLKTHRQFSKTNMVDLCPKVPKQDNSSDCGVYLLQYVESFFKDPIVNFELPIHLEKWFPRHVIKTKREDIRELILKLHLQQQKGSSS

SEQ ID NO: 84949 - protein, 50 aa, Homo sapiens
  Payload ID: 16896
  Gene Symbol: SENP7
  Gene Name: SUMO1/sentrin specific peptidase 7
  ENSP ID: ENSP00000402977
  MOD_RES (1)..(1): Any amino acid
XIQTQLEHSVLSQQYGVSLCHPGWSAVALSLLTASSASRVHAILLPQPPE

SEQ ID NO: 84950 - protein, 589 aa, Homo sapiens
  Payload ID: 16897
  Gene Symbol: SENP2
  Gene Name: SUMO1/sentrin/SMT3 specific peptidase 2
  Uniprot ID: Q9HC62
  ENSP ID: ENSP00000296257
MYRWLVRILGTIFRFCDRSVPPARALLKRRRSDSTLFSTVDTDEIPAKRPRLDCFIHQVKNSLYNAASLFGFPFQLTTKPMVTSACNGTRNVAPSGEVFSNSSSCELTGSGSWNNMLKLGNKSPNGISDYPKIRVTVTRDQPRRVLPSFGFTLNSEGCNRRPGGRRHSKGNPESSLMWKPQEQAVTEMISEESGKGLRRPHCTVEEGVQKEEREKYRKLLERLKESGHGNSVCPVTSNYHSSQRSQMDTLKTKGWGEEQNHGVKTTQFVPKQYRLVETRGPLCSLRSEKRCSKGKITDTETMVGIRFENESRRGYQLEPDLSEEVSARLRLGSGSNGLLRRKVSIIETKEKNCSGKERDRRTDDLLELTEDMEKEISNALGHGPQDEILSSAFKLRITRGDIQTLKNYHWLNDEVINFYMNLLVERNKKQGYPALHVFSTFFYPKLKSGGYQAVKRWTKGVNLFEQEIILVPIHRKVHWSLVVIDLRKKCLKYLDSMGQKGHRICEILLQYLQDESKTKRNSDLNLLEWTHHSMKPHEIPQQLNGSDCGMFTCKYADYISRDKPITFTQHQMPLFRKKMVWEILHQQLL

SEQ ID NO: 84951 - protein, 104 aa, Homo sapiens
  Payload ID: 16897
  Gene Symbol: SENP2
  Gene Name: SUMO1/sentrin/SMT3 specific peptidase 2
  ENSP ID: ENSP00000388893
MYRWLVRILGTIFRFCDRSVPPARALLKRRRSDSTLFSTVDTDEIPAKRPRLDCFIHQVKNSLYNAASLFGFPFQLTTKPMVTSACNGTRNVAPSGEVINLLME

SEQ ID NO: 84952 - protein, 60 aa, Homo sapiens
  Payload ID: 16897
  Gene Symbol: SENP2
  Gene Name: SUMO1/sentrin/SMT3 specific peptidase 2
  ENSP ID: ENSP00000390229
MYRWLVRILGTIFRFCDRSVPPARALLKRRRSDSTLFSTVDTDEIPAKRPRLGIFELFIL

SEQ ID NO: 84953 - protein, 105 aa, Homo sapiens
  Payload ID: 16897
  Gene Symbol: SENP2
  Gene Name: SUMO1/sentrin/SMT3 specific peptidase 2
  ENSP ID: ENSP00000393197
MYRWLVRILGTIFRFCDRSVPPARALLKRRRSDSTLFSTVDTDEIPAKRPRLDCFIHQVKNSLYNAASLFGFPFQLTTKPMVTSACNGTRNVAPSGEVLDPGTTC

SEQ ID NO: 84954 - protein, 273 aa, Homo sapiens
  Payload ID: 16897
  Gene Symbol: SENP2
  Gene Name: SUMO1/sentrin/SMT3 specific peptidase 2
  ENSP ID: ENSP00000399156
MRLCPSCSTRLQIIQAKGRNLNVLVTPYGLGILPWPSSKALLGPGKAVAVVGLGLRIIPLLGQWMDSHPCLYCGPQDSEGTNWQTSPSTLFSTVDTDEIPAKRPRLDCFIHQVKNSLYNAASLFGFPFQLTTKPMVTSACNGTRNVAPSGEVFSNSSSCELTGSGSWNNMLKLGNKSPNGISDYPKIRVTVTRDQPRRVLPSFGFTLNSEGCNRRPGGRRHSKGNPESSLMWKPQEQAVTEMISEESGKGLRRPHCTVEEGVQKEEREKYRKL

SEQ ID NO: 84955 - protein, 203 aa, Homo sapiens
  Payload ID: 16897
  Gene Symbol: SENP2
  Gene Name: SUMO1/sentrin/SMT3 specific peptidase 2
  ENSP ID: ENSP00000399201
GKITDTETMVGIRFENESRRGYQLEPDLSEEVSARLRLGSGSNGLLRRKVSIIETKEKNCSGKERDRRTDDLLELTEVINFYMNLLVERNKKQGYPALHVFSTFFYPKLKSGGYQAVKRWTKGVNLFEQEIILVPIHRKVHWSLVVIDLRKKCLKYLDSMGQKGHRICEILLQYLQDESKTKRNSDLNLLEWTHHSMKPHEIP

SEQ ID NO: 84956 - protein, 54 aa, Homo sapiens
  Payload ID: 16897
  Gene Symbol: SENP2
  Gene Name: SUMO1/sentrin/SMT3 specific peptidase 2
  ENSP ID: ENSP00000408114
MYRWLVRILGTIFRFCDRSVPPARALLKRRRSDSTLFSTVDTDEIPAKRPRLVC

SEQ ID NO: 84957 - protein, 574 aa, Homo sapiens
  Payload ID: 16898
  Gene Symbol: SENP3
  Gene Name: SUMO1/sentrin/SMT3 specific peptidase 3
  Uniprot ID: Q9H4L4
  ENSP ID: ENSP00000314029
MKETIQGTGSWGPEPPGPGIPPAYSSPRRERLRWPPPPKPRLKSGGGFGPDPGSGTTVPARRLPVPRPSFDASASEEEEEEEEEEDEDEEEEVAAWRLPPRWSQLGTSQRPRPSRPTHRKTCSQRRRRAMRAFRMLLYSKSTSLTFHWKLWGRHRGRRRGLAHPKNHLSPQQGGATPQVPSPCCRFDSPRGPPPPRLGLLGALMAEDGVRGSPPVPSGPPMEEDGLRWTPKSPLDPDSGLLSCTLPNGFGGQSGPEGERSLAPPDASILISNVCSIGDHVAQELFQGSDLGMAEEAERPGEKAGQHSPLREEHVTCVQSILDEFLQTYGSLIPLSTDEVVEKLEDIFQQEFSTPSRKGLVLQLIQSYQRMPGNAMVRGFRVAYKRHVLTMDDLGTLYGQNWLNDQVMNMYGDLVMDTVPEKVHFFNSFFYDKLRTKGYDGVKRWTKNVDIFNKELLLIPIHLEVHWSLISVDVRRRTITYFDSQRTLNRRCPKHIAKYLQAEAVKKDRLDFHQGWKGYFKMNVARQNNDSDCGAFVLQYCKHLALSQPFSFTQQDMPKLRRQIYKELCHCKLTV

SEQ ID NO: 84958 - protein, 574 aa, Homo sapiens; identical to SEQ ID NO: 84957
  Payload ID: 16898
  Gene Symbol: SENP3
  Gene Name: SUMO1/sentrin/SMT3 specific peptidase 3
  Uniprot ID: Q9H4L4
  ENSP ID: ENSP00000403712

SEQ ID NO: 84959 - protein, 82 aa, Homo sapiens
  Payload ID: 16898
  Gene Symbol: SENP3
  Gene Name: SUMO1/sentrin/SMT3 specific peptidase 3
  ENSP ID: ENSP00000462461
VDIFNKELLLIPIHLEVHWSLISVDVRRRTITYFDSQRTLNRRCPKYCKHLALSQPFSFTQQDMPKLRRQIYKELCHCKLTV

SEQ ID NO: 84960 - protein, 237 aa, Homo sapiens
  Payload ID: 16898
  Gene Symbol: SENP3
  Gene Name: SUMO1/sentrin/SMT3 specific peptidase 3
  ENSP ID: ENSP00000463358
EHVTCVQSILDEFLQTYGSLIPLSTDEVVEKLEDIFQQEFSTPSRKGLVLQLIQSYQRMPGNAMVRGFRVAYKRHVLTMDDLGTLYGQNWLNDQVMNMYGDLVMDTVPEKVDIFNKELLLIPIHLEVHWSLISVDVRRRTITYFDSQRTLNRRCPKHIAKYLQAEAVKKDRLDFHQGWKGYFKMNVARQNNDSDCGAFVLQYCKHLALSQPFSFTQQDMPKLRRQIYKELCHCKLTV

SEQ ID NO: 84961 - protein, 110 aa, Homo sapiens
  Payload ID: 16898
  Gene Symbol: SENP3
  Gene Name: SUMO1/sentrin/SMT3 specific peptidase 3
  ENSP ID: ENSP00000464172
VDIFNKELLLIPIHLEVHWSLISVDVRRRTITYFDSQRTLNRRCPKHIAKYLQAEAVKKDRLDFHQGWKGYFKMYCKHLALSQPFSFTQQDMPKLRRQIYKELCHCKLTV

SEQ ID NO: 84962 - protein, 177 aa, Homo sapiens
  Payload ID: 16898
  Gene Symbol: SENP3
  Gene Name: SUMO1/sentrin/SMT3 specific peptidase 3
  ENSP ID: ENSP00000479187
FYDKLRTKGYDGVKRWTKNVDIFNKELLLIPIHLEVHWSLISVDVRRRTITYFDSQRTLNRRCPKHIAKYLQAEAVKKDRLDFHQGWKGYFKMNVARQNNDSDCGAFVLQYCKHLALSQPFSFTQQDMPKLRRQIYKELCHCKLTVGVWPCGLGGAVILPLPRAGSRKSVLGVVGGQ

SEQ ID NO: 84963 - protein, 63 aa, Homo sapiens
  Payload ID: 16898
  Gene Symbol: SENP3
  Gene Name: SUMO1/sentrin/SMT3 specific peptidase 3
  ENSP ID: ENSP00000482398
  MOD_RES (1)..(1): Any amino acid
XQSYQRMPGNAMVRGFRVAYKRHVLTMDDLGTLYGQNWLNDQLPPIFSPGDEHVWRPGHGHSP

SEQ ID NO: 84964 - protein, 333 aa, Homo sapiens
  Payload ID: 16899
  Gene Symbol: SIMC1
  Gene Name: SUMO-interacting motifs containing 1
  Uniprot ID: Q8NDZ2
  ENSP ID: ENSP00000331311
MPRSFEQVIILKKWFLKPYKGQTLPGRVLFLRYVVQTLEDDFQQTLRRQRQHLQQSIANMVLSCDKQPHNVRDVIKWLVKAVTEDGLTQPPNGNQTSSGTGILKASSSHPSSQPNLTKNTNQLIVCQLQRMLSIAVEVDRTPTCSSNKIAEMMFGFVLDIPERSQREMFFTTMESHLLRCKVLEIIFLHSCETPTRLPLSLAQALYFLNNSTSLLKCQSDKSQWQTWDELVEHLQFLLSSYQHVLREHLRSSVIDRKDLIIKRIKPKPQQGDDITVVDVEKQIEAFRSRLIQMLGEPLVPQLQDKVHLLKLLLFYAADLNPDAEPFQKGWSGS

SEQ ID NO: 84965 - protein, 457 aa, Homo sapiens
  Payload ID: 16899
  Gene Symbol: SIMC1
  Gene Name: SUMO-interacting motifs containing 1
  Uniprot ID: Q8NDZ2
  ENSP ID: ENSP00000342075
MEDFIVISDDSGSESSGGARPGRSRRPRRALSRTSGALPRRTVNKGQKLEPIPHRRLRMVTNTIEENFPLGTVQFLMDFVSPQHYPPREIVAHIIQKILLSGSETVDVLKEAYMLLMKIQQLHPANAKTVEWDWKLLTYVMEEEGQTLPGRVLFLRYVVQTLEDDFQQTLRRQRQHLQQSIANMVLSCDKQPHNVRDVIKWLVKAVTEDGLTQPPNGNQTSSGTGILKASSSHPSSQPNLTKNTNQLIVCQLQRMLSIAVEVDRTPTCSSNKIAEMMFGFVLDIPERSQREMFFTTMESHLLRCKVLEIIFLHSCETPTRLPLSLAQALYFLNNSTSLLKCQSDKSQWQTWDELVEHLQFLLSSYQHVLREHLRSSVIDRKDLIIKRIKPKPQQGDDITVVDVEKQIEAFRSRLIQMLGEPLVPQLQDKVHLLKLLLFYAADLNPDAEPFQKGWSGS

SEQ ID NO: 84966 - protein, 872 aa, Homo sapiens
  Payload ID: 16899
  Gene Symbol: SIMC1
  Gene Name: SUMO-interacting motifs containing 1
  Uniprot ID: Q8NDZ2
  ENSP ID: ENSP00000406571
MAPASASGEDLRKLPTMAEVNGEQDFIDLTRETRPRTKDRSGLYVIDLTRAEGENRPIATLDLTLEPVTPSQKEPTSLQTCASLSGKAVMEGHVDRSSQPTARRIINSDPVDLDLVEENTFVGPPPATSISGGSVYPTEPNCSSATFTGNLSFLASLQLSSDVSSLSPTSNNSRSSSSSSNQKAPLPCPQQDVSRPPQALPCPLRPLPCPPRASPCPPRASSCPPRALSCPSQTMQCQLPALTHPPQEVPCPRQNIPGPPQDSLGLPQDVPGLPQSILHPQDVAYLQDMPRSPGDVPQSPSDVSPSPDAPQSPGGMPHLPGDVLHSPGDMPHSSGDVTHSPRDIPHLPGDRPDFTQNDVQNRDMPMDISALSSPSCSPSPQSETPLEKVPWLSVMETPARKEISLSEPAKPGSAHVQSRTPQGGLYNRPCLHRLKYFLRPPVHHLFFQTLIPDKDTRENKGQKLEPIPHRRLRMVTNTIEENFPLGTVQFLMDFVSPQHYPPREIVAHIIQKILLSGSETVDVLKEAYMLLMKIQQLHPANAKTVEWDWKLLTYVMEEEGQTLPGRVLFLRYVVQTLEDDFQQTLRRQRQHLQQSIANMVLSCDKQPHNVRDVIKWLVKAVTEDGLTQPPNGNQTSSGTGILKASSSHPSSQPNLTKNTNQLIVCQLQRMLSIAVEVDRTPTCSSNKIAEMMFGFVLDIPERSQREMFFTTMESHLLRCKVLEIIFLHSCETPTRLPLSLAQALYFLNNSTSLLKCQSDKSQWQTWDELVEHLQFLLSSYQHVLREHLRSSVIDRKDLIIKRIKPKPQQGDDITVVDVEKQIEAFRSRLIQMLGEPLVPQLQDKVHLLKLLLFYAADLNPDAEPFQKGWSGS

SEQ ID NO: 84967 - protein, 457 aa, Homo sapiens; identical to SEQ ID NO: 84965
  Payload ID: 16899
  Gene Symbol: SIMC1
  Gene Name: SUMO-interacting motifs containing 1
  Uniprot ID: Q8NDZ2
  ENSP ID: ENSP00000409287

SEQ ID NO: 84968 - protein, 891 aa, Homo sapiens
  Payload ID: 16899
  Gene Symbol: SIMC1
  Gene Name: SUMO-interacting motifs containing 1
  ENSP ID: ENSP00000410552
MEDFIVISDDSGSESSGGARPGRSRRPRRALSRTSGALPRRTVDFIDLTRETRPRTKDRSGLYVIDLTRAEGENRPIATLDLTLEPVTPSQKEPTSLQTCASLSGKAVMEGHVDRSSQPTARRIINSDPVDLDLVEENTFVGPPPATSISGGSVYPTEPNCSSATFTGNLSFLASLQLSSDVSSLSPTSNNSRSSSSSSNQKAPLPCPQQDVSRPPQALPCPLRPLPCPPRASPCPPRASSCPPRALSCPSQTMQCQLPALTHPPQEVPCPRQNIPGPPQDSLGLPQDVPGLPQSILHPQDVAYLQDMPRSPGDVPQSPSDVSPSPDAPQSPGGMPHLPGDVLHSPGDMPHSSGDVTHSPRDIPHLPGDRPDFTQNDVQNRDMPMDISALSSPSCSPSPQSETPLEKVPWLSVMETPARKEISLSEPAKPGSAHVQSRTPQGGLYNRPCLHRLKYFLRPPVHHLFFQTLIPDKDTRENKGQKLEPIPHRRLRMVTNTIEENFPLGTVQFLMDFVSPQHYPPREIVAHIIQKILLSGSETVDVLKEAYMLLMKIQQLHPANAKTVEWDWKLLTYVMEEEGQTLPGRVLFLRYVVQTLEDDFQQTLRRQRQHLQQSIANMVLSCDKQPHNVRDVIKWLVKAVTEDGLTQPPNGNQTSSGTGILKASSSHPSSQPNLTKNTNQLIVCQLQRMLSIAVEVDRTPTCSSNKIAEMMFGFVLDIPERSQREMFFTTMESHLLRCKVLEIIFLHSCETPTRLPLSLAQALYFLNNSTSLLKCQSDKSQWQTWDELVEHLQFLLSSYQHVLREHLRSSVIDRKDLIIKRIKPKPQQGDDITVVDVEKQIEAFRSRLIQMLGEPLVPQLQDKVHLLKLLLFYAADLNPDAEPFQKGWSGS

SEQ ID NO: 84969 - protein, 1254 aa, Homo sapiens
  Payload ID: 16900
  Gene Symbol: SUCO
  Gene Name: SUN domain containing ossification factor
  Uniprot ID: Q9UBS9
  ENSP ID: ENSP00000263688
MKKHRRALALVSCLFLCSLVWLPSWRVCCKESSSASASSYYSQDDNCALENEDVQFQKKDEREGPINAESLGKSGSNLPISPKEHKLKDDSIVDVQNTESKKLSPPVVETLPTVDLHEESSNAVVDSETVENISSSSTSEITPISKLDEIEKSGTIPIAKPSETEQSETDCDVGEALDASAPIEQPSFVSPPDSLVGQHIENVSSSHGKGKITKSEFESKVSASEQGGGDPKSALNASDNLKNESSDYTKPGDIDPTSVASPKDPEDIPTFDEWKKKVMEVEKEKSQSMHASSNGGSHATKKVQKNRNNYASVECGAKILAANPEAKSTSAILIENMDLYMLNPCSTKIWFVIELCEPIQVKQLDIANYELFSSTPKDFLVSISDRYPTNKWIKLGTFHGRDERNVQSFPLDEQMYAKYVKMFIKYIKVELLSHFGSEHFCPLSLIRVFGTSMVEEYEEIADSQYHSERQELFDEDYDYPLDYNTGEDKSSKNLLGSATNAILNMVNIAANILGAKTEDLTEGNKSISENATATAAPKMPESTPVSTPVPSPEYVTTEVHTHDMEPSTPDTPKESPIVQLVQEEEEEASPSTVTLLGSGEQEDESSPWFESETQIFCSELTTICCISSFSEYIYKWCSVRVALYRQRSRTALSKGKDYLVLAQPPLLLPAESVDVSVLQPLSGELENTNIEREAETVVLGDLSSSMHQDDLVNHTVDAVELEPSHSQTLSQSLLLDITPEINPLPKIEVSESVEYEAGHIPSPVIPQESSVEIDNETEQKSESFSSIEKPSITYETNKVNELMDNIIKEDVNSMQIFTKLSETIVPPINTATVPDNEDGEAKMNIADTAKQTLISVVDSSSLPEVKEEEQSPEDALLRGLQRTATDFYAELQNSTDLGYANGNLVHGSNQKESVFMRLNNRIKALEVNMSLSGRYLEELSQRYRKQMEEMQKAFNKTIVKLQNTSRIAEEQDQRQTEAIQLLQAQLTNMTQLVSNLSATVAELKREVSDRQSYLVISLVLCVVLGLMLCMQRCRNTSQFDGDYISKLPKSNQYPSPKRCFSSYDDMNLKRRTSFPLMRSKSLQLTGKEVDPNDLYIVEPLKFSPEKKKKRCKYKIEKIETIKPEEPLHPIANGDIKGRKPFTNQRDFSNMGEVYHSSYKGPPSEGSSETSSQSEESYFCGISACTSLCNGQSQKTKTEKRALKRRRSKVQDQGKLIKTLIQTKSGSLPSLHDIIKGNKEITVGTFGVTAVSGHI

SEQ ID NO: 84970 - protein, 1405 aa, Homo sapiens
  Payload ID: 16900
  Gene Symbol: SUCO
  Gene Name: SUN domain containing ossification factor
  Uniprot ID: Q9UBS9
  ENSP ID: ENSP00000356696
MRGFLARPFLSTNQHLAQWGSPLPQGKGLVQLPSQHTRHSRPFHELCSKEENSATVPKLISLVVSSETIDFSNKTMDSRRDWEREKRILEGKLQLPKALARTQRARDEGRAWTSRWLQRRRSPESCEAPLSAPLWGPQRGLPGREPLRSRSASAIALRTIGHILALLLRLLHLGLGSGGCREDVPPSGRGKKEEKMKKHRRALALVSCLFLCSLVWLPSWRVCCKESSSASASSYYSQDDNCALENEDVQFQKKNTESKKLSPPVVETLPTVDLHEESSNAVVDSETVENISSSSTSEITPISKLDEIEKSGTIPIAKPSETEQSETDCDVGEALDASAPIEQPSFVSPPDSLVGQHIENVSSSHGKGKITKSEFESKVSASEQGGGDPKSALNASDNLKNESSDYTKPGDIDPTSVASPKDPEDIPTFDEWKKKVMEVEKEKSQSMHASSNGGSHATKKVQKNRNNYASVECGAKILAANPEAKSTSAILIENMDLYMLNPCSTKIWFVIELCEPIQVKQLDIANYELFSSTPKDFLVSISDRYPTNKWIKLGTFHGRDERNVQSFPLDEQMYAKYVKVELLSHFGSEHFCPLSLIRVFGTSMVEEYEEIADSQYHSERQELFDEDYDYPLDYNTGEDKSSKNLLGSATNAILNMVNIAANILGAKTEDLTEGNKSISENATATAAPKMPESTPVSTPVPSPEYVTTEVHTHDMEPSTPDTPKESPIVQLVQEEEEEASPSTVTLLGSGEQEDESSPWFESETQIFCSELTTICCISSFSEYIYKWCSVRVALYRQRSRTALSKGKDYLVLAQPPLLLPAESVDVSVLQPLSGELENTNIEREAETVVLGDLSSSMHQDDLVNHTVDAVELEPSHSQTLSQSLLLDITPEINPLPKIEVSESVEYEAGHIPSPVIPQESSVEIDNETEQKSESFSSIEKPSITYETNKVNELMDNIIKEDVNSMQIFTKLSETIVPPINTATVPDNEDGEAKMNIADTAKQTLISVVDSSSLPEVKEEEQSPEDALLRGLQRTATDFYAELQNSTDLGYANGNLVHGSNQKESVFMRLNNRIKALEVNMSLSGRYLEELSQRYRKQMEEMQKAFNKTIVKLQNTSRIAEEQDQRQTEAIQLLQAQLTNMTQLVSNLSATVAELKREVSDRQSYLVISLVLCVVLGLMLCMQRCRNTSQFDGDYISKLPKSNQYPSPKRCFSSYDDMNLKRRTSFPLMRSKSLQLTGKEVDPNDLYIVEPLKFSPEKKKKRCKYKIEKIETIKPEEPLHPIANGDIKGRKPFTNQRDFSNMGEVYHSSYKGPPSEGSSETSSQSEESYFCGISACTSLCNGQSQKTKTEKRALKRRRSKVQDQGKLIKTLIQTKSGSLPSLHDIIKGNKEITVGTFGVTAVSGHI

SEQ ID NO: 84971 - protein, 883 aa, Homo sapiens
  Payload ID: 16900
  Gene Symbol: SUCO
  Gene Name: SUN domain containing ossification factor
  ENSP ID: ENSP00000476704
MKKHRRALALVSCLFLCSLVWLPSWRVCCKESSSASASSYYSQDDNCALENEDVQFQKKNTESKKLSPPVVETLPTVDLHEESSNAVVDSETVENISSSSTSEITPISKLDEIEKSGTIPIAKPSETEQSETDCDVGEALDASAPIEQPSFVSPPDSLVGQHIENVSSSHGKGKITKSEFESKVSASEQGGGDPKSALNASDNLKNESSDYTKPGDIDPTSVASPKDPEDIPTFDEWKKKVMEVEKEKSQSMHASSNGGSHATKKVQKNRNNYASVECGAKILAANPEAKSTSAILIENMDLYMLNPCSTKIWFVIELCEPIQVKQLDIANYELFSSTPKDFLVSISDRYPTNKWIKLGTFHGRDERNVQSFPLDEQMYAKYVKMFIKYIKVELLSHFGSEHFCPLSLIRVFGTSMVEEYEEIADSQYHSERQELFDEDYDYPLDYNTGEDKSSKNLLGSATNAILNMVNIAANILGAKTEDLTEGNKSISENATATAAPKMPESTPVSTPVPSPEYVTTEVHTHDMEPSTPDTPKESPIVQLVQEEEEEASPSTVTLLGSGEQEDESSPWYRKQMEEMQKAFNKTIVKLQNTSRIAEEQDQRQTEAIQLLQAQLTNMTQLVSNLSATVAELKREVSDRQSYLVISLVLCVVLGLMLCMQRCRNTSQFDGDYISKLPKSNQYPSPKRCFSSYDDMNLKRRTSFPLMRSKSLQLTGKEVDPNDLYIVEPLKFSPEKKKKRCKYKIEKIETIKPEEPLHPIANGDIKGRKPFTNQRDFSNMGEVYHSSYKGPPSEGSSETSSQSEESYFCGISACTSLCNGQSQKTKTEKRALKRRRSKVQDQGKLIKTLIQTKSGSLPSLHDIIKGNKEITVGTFGVTAVSGHI

SEQ ID NO: 84972 - protein, 1405 aa, Homo sapiens; identical to SEQ ID NO: 84970
  Payload ID: 16900
  Gene Symbol: SUCO
  Gene Name: SUN domain containing ossification factor
  Uniprot ID: Q9UBS9
  ENSP ID: ENSP00000477484

SEQ ID NO: 84973 - protein, 691 aa, Homo sapiens
  Payload ID: 16900
  Gene Symbol: SUCO
  Gene Name: SUN domain containing ossification factor
  ENSP ID: ENSP00000479061
MEPSTPDTPKESPIVQLVQEEEEEASPSTVTLLGSGEQEDESSPWFESETQIFCSELTTICCISSFSEYIYKWCSVRVALYRQRSRTALSKGKDYLVLAQPPLLLPAESVDVSVLQPLSGELENTNIEREAETVVLGDLSSSMHQDDLVNHTVDAVELEPSHSQTLSQSLLLDITPEINPLPKIEVSESVEYEAGHIPSPVIPQESSVEIDNETEQKSESFSSIEKPSITYETNKVNELMDNIIKEDVNSMQIFTKLSETIVPPINTATVPDNEDGEAKMNIADTAKQTLISVVDSSSLPEVKEEEQSPEDALLRGLQRTATDFYAELQNSTDLGYANGNLVHGSNQKESVFMRLNNRIKALEVNMSLSGRYLEELSQRYRKQMEEMQKAFNKTIVKLQNTSRIAEEQDQRQTEAIQLLQAQLTNMTQLVSNLSATVAELKREVSDRQSYLVISLVLCVVLGLMLCMQRCRNTSQFDGDYISKLPKSNQYPSPKRCFSSYDDMNLKRRTSFPLMRSKSLQLTGKEVDPNDLYIVEPLKFSPEKKKKRCKYKIEKIETIKPEEPLHPIANGDIKGRKPFTNQRDFSNMGEVYHSSYKGPPSEGSSETSSQSEESYFCGISACTSLCNGQSQKTKTEKRALKRRRSKVQDQGKLIKTLIQTKSGSLPSLHDIIKGNKEITVGTFGVTAVSGHI

SEQ ID NO: 84974 - protein, 1042 aa, Homo sapiens
  Payload ID: 16901
  Gene Symbol: SKIV2L2
  Gene Name: superkiller viralicidic activity 2-like 2 (S. cerevisiae)
  Uniprot ID: P42285
  ENSP ID: ENSP00000230640
MADAFGDELFSVFEGDSTTAAGTKKDKEKDKGKWKGPPGSADKAGKRFDGKLQSESTNNGKNKRDVDFEGTDEPIFGKKPRIEESITEDLSLADLMPRVKVQSVETVEGCTHEVALPAEEDYLPLKPRVGKAAKEYPFILDAFQREAIQCVDNNQSVLVSAHTSAGKTVCAEYAIALALREKQRVIFTSPIKALSNQKYREMYEEFQDVGLMTGDVTINPTASCLVMTTEILRSMLYRGSEVMREVAWVIFDEIHYMRDSERGVVWEETIILLPDNVHYVFLSATIPNARQFAEWICHLHKQPCHVIYTDYRPTPLQHYIFPAGGDGLHLVVDENGDFREDNFNTAMQVLRDAGDLAKGDQKGRKGGTKGPSNVFKIVKMIMERNFQPVIIFSFSKKDCEAYALQMTKLDFNTDEEKKMVEEVFSNAIDCLSDEDKKLPQVEHVLPLLKRGIGIHHGGLLPILKETIEILFSEGLIKALFATETFAMGINMPARTVLFTNARKFDGKDFRWISSGEYIQMSGRAGRRGMDDRGIVILMVDEKMSPTIGKQLLKGSADPLNSAFHLTYNMVLNLLRVEEINPEYMLEKSFYQFQHYRAIPGVVEKVKNSEEQYNKIVIPNEESVVIYYKIRQQLAKLGKEIEEYIHKPKYCLPFLQPGRLVKVKNEGDDFGWGVVVNFSKKSNVKPNSGELDPLYVVEVLLRCSKESLKNSATEAAKPAKPDEKGEMQVVPVLVHLLSAISSVRLYIPKDLRPVDNRQSVLKSIQEVQKRFPDGIPLLDPIDDMGIQDQGLKKVIQKVEAFEHRMYSHPLHNDPNLETVYTLCEKKAQIAIDIKSAKRELKKARTVLQMDELKCRKRVLRRLGFATSSDVIEMKGRVACEISSADELLLTEMMFNGLFNDLSAEQATALLSCFVFQENSSEMPKLTEQLAGPLRQMQECAKRIAKVSAEAKLEIDEETYLSSFKPHLMDVVYTWATGATFAHICKMTDVFEGSIIRCMRRLEELLRQMCQAAKAIGNTELENKFAEGITKIKRDIVFAASLYL

SEQ ID NO: 84975 - protein, 88 aa, Homo sapiens
  Payload ID: 16901
  Gene Symbol: SKIV2L2
  Gene Name: superkiller viralicidic activity 2-like 2 (S. cerevisiae)
  ENSP ID: ENSP00000422125
  MOD_RES (1)..(1): Any amino acid
XKRFDGKLQSESTNNGKNKRDVDFEGTDEPIFGKKPRIEESITEDLSLADLMPRVKVQSVETVEGCTHEVCHCIGLKGKAACNIYQPN

SEQ ID NO: 84976 - protein, 89 aa, Homo sapiens
  Payload ID: 16901
  Gene Symbol: SKIV2L2
  Gene Name: superkiller viralicidic activity 2-like 2 (S. cerevisiae)
  ENSP ID: ENSP00000425042
MADAFGDELFSVFEGDSTTAAGTKKDKEKDKGKWKGPPGSADKAGLHFLQKRIIYHLNHELEKLLRNTRSFLMLFKERPFSVLTIISLF

SEQ ID NO: 84977 - protein, 72 aa, Homo sapiens
  Payload ID: 16901
  Gene Symbol: SKIV2L2
  Gene Name: superkiller viralicidic activity 2-like 2 (S. cerevisiae)
  ENSP ID: ENSP00000426641
  MOD_RES (1)..(1): Any amino acid
XLMDVVYTWATGATFAHICKMTDVFEGSIIRCMRRLEELLRQMCQAAKAIGNTELENKFAEGQYQMDKLFLI

SEQ ID NO: 84978 - protein, 154 aa, Homo sapiens [sequence omitted]

SEQ ID NO: 84979 - protein, 135 aa, Homo sapiens
  Payload ID: 16902
  Gene Symbol: SOD1
  Gene Name: superoxide dismutase 1, soluble
  ENSP ID: ENSP00000374645
MATKAESNGPVKVWGSIKGLTEGLHGFHVHEFGDNTAGCTSAGPHFNPLSRKHGGPKDEERHVGDLGNVTADKDGVADVSIEDSVISLSGDHCIIGRTLVVHEKADDLGKGGNEESTKTGNAGSRLACGVIGIAQ

SEQ ID NO: 84980 - protein, 183 aa, Homo sapiens
  Payload ID: 16903
  Gene Symbol: SOD2
  Gene Name: superoxide dismutase 2, mitochondrial
  ENSP ID: ENSP00000337127
MLSRAVCGTSRQLAPVLGYLGSRQKHSLPDLPYDYGALEPHINAQIMQLHHSKHHAAYVNNLNVTEEKYQEALAKGELLEAIKRDFGSFDKFKEKLTAASVGVQGSGWGWLGFNKERGHLQIAACPNQDPLQGTTGLIPLLGIDVWEHAYYLQYKNVRPDYLKAIWNVINWENVTERYMACKK

SEQ ID NO: 84981 - protein, 183 aa, Homo sapiens; identical to SEQ ID NO: 84980
  Payload ID: 16903
  Gene Symbol: SOD2
  Gene Name: superoxide dismutase 2, mitochondrial
  ENSP ID: ENSP00000356021

SEQ ID NO: 84982 - protein, 222 aa, Homo sapiens
  Payload ID: 16903
  Gene Symbol: SOD2
  Gene Name: superoxide dismutase 2, mitochondrial
  ENSP ID: ENSP00000356022
MLSRAVCGTSRQLAPVLGYLGSRQKHSLPDLPYDYGALEPHINAQIMQLHHSKHHAAYVNNLNVTEEKYQEALAKGDVTAQIALQPALKFNGGGHINHSIFWTNLSPNGGGEPKGELLEAIKRDFGSFDKFKEKLTAASVGVQGSGWGWLGFNKERGHLQIAACPNQDPLQGTTGLIPLLGIDVWEHAYYLQYKNVRPDYLKAIWNVINWENVTERYMACKK

SEQ ID NO: 84983 - protein, 61 aa, Homo sapiens
  Payload ID: 16903
  Gene Symbol: SOD2
  Gene Name: superoxide dismutase 2, mitochondrial
  ENSP ID: ENSP00000384196
MQLHHSKHHAAYVNNLNVTEEKYQEALAKGELLEAIKRDFGSFDKFKEKLTAASVGVQGSG

SEQ ID NO: 84984 - protein, 162 aa, Homo sapiens
  Payload ID: 16903
  Gene Symbol: SOD2
  Gene Name: superoxide dismutase 2, mitochondrial
  ENSP ID: ENSP00000404804
MLSRAVCGTSRQLAPVLGYLGSRQKHSLPDLPYDYGALEPHINAQIMQLHHSKHHAAYVNNLNVTEEKYQEALAKGDVTAQIALQPALKFNGGGHINHSIFWTNLSPNGGGEPKGLIPLLGIDVWEHAYYLQYKNVRPDYLKAIWNVINWENVTERYMACKK

SEQ ID NO: 84985 - protein, 140 aa, Homo sapiens
  Payload ID: 16903
  Gene Symbol: SOD2
  Gene Name: superoxide dismutase 2, mitochondrial
  ENSP ID: ENSP00000406713
MLSRAVCGTSRQLAPVLGYLGSRQKHSLPDLPYDYGALEPHINAQIMQLHHSKHHAAYVNNLNVTEEKYQEALAKGRFQAERREAVPGRGDPREPGPIRTGLSVEENSLRICTGSEFSRHDSLSFKHMVYLIVEGVPRWV

SEQ ID NO: 84986 - protein, 111 aa, Homo sapiens
  Payload ID: 16903
  Gene Symbol: SOD2
  Gene Name: superoxide dismutase 2, mitochondrial
  ENSP ID: ENSP00000439191
MQLHHSKHHAAYVNNLNVTEEKYQEALAKGDVTAQIALQPALKFNGGGHINHSIFWTNLSPNGGGEPKGELLEAIKRDFGSFDKFKEKLTAASVGVQGSGWGWLGFNKERG

SEQ ID NO: 84987 - protein, 141 aa, Homo sapiens
  Payload ID: 16903
  Gene Symbol: SOD2
  Gene Name: superoxide dismutase 2, mitochondrial
  ENSP ID: ENSP00000440131
MLSRAVCGTSRQLAPVLGYLGSRQKHSLPDLPYDYGALEPHINAQIMQLHHSKHHAAYVNNLNVTEEKYQEALAKGRFQAERREAVPGRGDPREPGPIRTGLSVEENSLRICTGSEFSRRCYSPDSSSACTEVQWWWSYQS

SEQ ID NO: 84988 - protein, 190 aa, Homo sapiens
  Payload ID: 16903
  Gene Symbol: SOD2
  Gene Name: superoxide dismutase 2, mitochondrial
  ENSP ID: ENSP00000441362
MFAFWPTHRRVAFQAWPQSLARRRTPPGEESTSRQLAPVLGYLGSRQKHSLPDLPYDYGALEPHINAQIMQLHHSKHHAAYVNNLNVTEEKYQEALAKGDVTAQIALQPALKFNGGGHINHSIFWTNLSPNGGGEPKGELLEAIKRDFGSFDKFKEKLTAASVGVQGSGWGWLGFNKERGHLQIAACPNQ

SEQ ID NO: 84989 - protein, 176 aa, Homo sapiens
  Payload ID: 16903
  Gene Symbol: SOD2
  Gene Name: superoxide dismutase 2, mitochondrial
  Uniprot ID: P04179
  ENSP ID: ENSP00000442920
MQLHHSKHHAAYVNNLNVTEEKYQEALAKGDVTAQIALQPALKFNGGGHINHSIFWTNLSPNGGGEPKGELLEAIKRDFGSFDKFKEKLTAASVGVQGSGWGWLGFNKERGHLQIAACPNQDPLQGTTGLIPLLGIDVWEHAYYLQYKNVRPDYLKAIWNVINWENVTERYMACKK

SEQ ID NO: 84990 - protein, 183 aa, Homo sapiens
  Payload ID: 16903
  Gene Symbol: SOD2
  Gene Name: superoxide dismutase 2, mitochondrial
  ENSP ID: ENSP00000445015
MLPRVGGPGATSRERPWAASRGRLLLAEAHLTSRQLAPVLGYLGSRQKHSLPDLPYDYGALEPHINAQIMQLHHSKHHAAYVNNLNVTEEKYQEALAKGDVTAQIALQPALKFNGGGHINHSIFWTNLSPNGGGEPKGELLEAIKRDFGSFDKFKEKLTAASVGVQGSGWGWLGFNKERGHLQ

SEQ ID NO: 84991 - protein, 222 aa, Homo sapiens; identical to SEQ ID NO: 84982
  Payload ID: 16903
  Gene Symbol: SOD2
  Gene Name: superoxide dismutase 2, mitochondrial
  ENSP ID: ENSP00000446252

SEQ ID NO: 84992 - protein, 240 aa, Homo sapiens
  Payload ID: 16904
  Gene Symbol: SOD3
  Gene Name: superoxide dismutase 3, extracellular
  Uniprot ID: P08294
  ENSP ID: ENSP00000371554
MLALLCSCLLLAAGASDAWTGEDSAEPNSDSAEWIRDMYAKVTEIWQEVMQRRDDDGALHAACQVQPSATLDAAQPRVTGVVLFRQLAPRAKLDAFFALEGFPTEPNSSSRAIHVHQFGDLSQGCESTGPHYNPLAVPHPQHPGDFGNFAVRDGSLWRYRAGLAASLAGPHSIVGRAVVVHAGEDDLGRGGNQASVENGNAGRRLACCVVGVCGPGLWERQAREHSERKKRRRESECKAA

SEQ ID NO: 84993 - protein, 54 aa, Homo sapiens
  Payload ID: 16904
  Gene Symbol: SOD3
  Gene Name: superoxide dismutase 3, extracellular
  ENSP ID: ENSP00000472134
MLALLCSCLLLAAGASDAWTGEDSAEPNSDSAEWIRDMYAKVTEIWQEVMQRRD

SEQ ID NO: 84994 - protein, 2214 aa, Homo sapiens
  Payload ID: 16905
  Gene Symbol: SVIL
  Gene Name: supervillin
  Uniprot ID: O95425
  ENSP ID: ENSP00000348128
MKRKERIARRLEGIENDTQPILLQSCTGLVTHRLLEEDTPRYMRASDPASPHIGRSNEEEETSDSSLEKQTRSKYCTETSGVHGDSPYGSGTMDTHSLESKAERIARYKAERRRQLAEKYGLTLDPEADSEYLSRYTKSRKEPDAVEKRGGKSDKQEESSRDASSLYPGTETMGLRTCAGESKDYALHVGDGSSDPEVLLNIENQRRGQELSATRQAHDLSPAAESSSTFSFSGRDSSFTEVPRSPKHAHSSSLQQAASRSPSFGDPQLSPEARPSTGKPKHEWFLQKDSEGDTPSLINWPSRVKVREKLVKEESARNSPELASESVTQRRHQPAPVHYVSFQSEHSAFDRVPSKAAGSTRQPIRGYVQPADTGHTAKLVTPETPENASECSWVASATQNVPKPPSLTVLEGDGRDSPVLHVCESKAEEEEGEGEGEEKEEDVCFTEALEQSKKTLLALEGDGLVRSPEDPSRNEDFGKPAVSTVTLEHQKELENVAQPPQAPHQPTERTGRSEMVLYIQSEPVSQDAKPTGHNREASKKRKVRTRSLSDFTGPPQLQALKYKDPASRRELELPSSKTEGPYGEISMLDTKVSVAQLRSAFLASANACRRPELKSRVERSAEGPGLPTGVERERGSRKPRRYFSPGESRKTSERFRTQPITSAERKESDRCTSHSETPTVDDEEKVDERAKLSVAAKRLLFREMEKSFDEQNVPKRRSRNTAVEQRLRRLQDRSLTQPITTEEVVIAATEPIPASCSGGTHPVMARLPSPTVARSAVQPARLQASAHQKALAKDQTNEGKELAEQGEPDSSTLSLAEKLALFNKLSQPVSKAISTRNRIDTRQRRMNARYQTQPVTLGEVEQVQSGKLIPFSPAVNTSVSTVASTVAPMYAGDLRTKPPLDHNASATDYKFSSSIENSDSPVRSILKSQAWQPLVEGSENKGMLREYGETESKRALTGRDSGMEKYGSFEEAEASYPILNRAREGDSHKESKYAVPRRGSLERANPPITHLGDEPKEFSMAKMNAQGNLDLRDRLPFEEKVEVENVMKRKFSLRAAEFGEPTSEQTGTAAGKTIAQTTAPVSWKPQDSSEQPQEKLCKNPCAMFAAGEIKTPTGEGLLDSPSKTMSIKERLALLKKSGEEDWRNRLSRRQEGGKAPASSLHTQEAGRSLIKKRVTESRESQMTIEERKQLITVREEAWKTRGRGAANDSTQFTVAGRMVKKGLASPTAITPVASPICGKTRGTTPVSKPLEDIEARPDMQLESDLKLDRLETFLRRLNNKVGGMHETVLTVTGKSVKEVMKPDDDETFAKFYRSVDYNMPRSPVEMDEDFDVIFDPYAPKLTSSVAEHKRAVRPKRRVQASKNPLKMLAAREDLLQEYTEQRLNVAFMESKRMKVEKMSSNSNFSEVTLAGLASKENFSNVSLRSVNLTEQNSNNSAVPYKRLMLLQIKGRRHVQTRLVEPRASALNSGDCFLLLSPHCCFLWVGEFANVIEKAKASELATLIQTKRELGCRATYIQTIEEGINTHTHAAKDFWKLLGGQTSYQSAGDPKEDELYEAAIIETNCIYRLMDDKLVPDDDYWGKIPKCSLLQPKEVLVFDFGSEVYVWHGKEVTLAQRKIAFQLAKHLWNGTFDYENCDINPLDPGECNPLIPRKGQGRPDWAIFGRLTEHNETILFKEKFLDWTELKRSNEKNPGELAQHKEDPRTDVKAYDVTRMVSMPQTTAGTILDGVNVGRGYGLVEGHDRRQFEITSVSVDVWHILEFDYSRLPKQSIGQFHEGDAYVVKWKFMVSTAVGSRQKGEHSVRAAGKEKCVYFFWQGRHSTVSEKGTSALMTVELDEERGAQVQVLQGKEPPCFLQCFQGGMVVHSGRREEEEENVQSEWRLYCVRGEVPVEGNLLEVACHCSSLRSRTSMVVLNVNKALIYLWHGCKAQAHTKEVGRTAANKIKEQCPLEAGLHSSSKVTIHECDEGSEPLGFWDALGRRDRKAYDCMLQDPGSFNFAPRLFILSSSSGDFAATEFVYPARAPSVVSSMPFLQEDLYSAPQPALFLVDNHHEVYLWQGWWPIENKITGSARIRWASDRKSAMETVLQYCKGKNLKKPAPKSYLIHAGLEPLTFTNMFPSWEHREDIAEITEMDTEVSNQITLVEDVLAKLCKTIYPLADLLARPLPEGVDPLKLEIYLTDEDFEFALDMTRDEYNALPAWKQVNLKKAKGLF

SEQ ID NO: 84995 - protein, 2182 aa, Homo sapiens
  Payload ID: 16905
  Gene Symbol: SVIL
  Gene Name: supervillin
  Uniprot ID: O95425
  ENSP ID: ENSP00000364547
MKRKERIARRLEGIENDTQPILLQSCTGLVTHRLLEEDTPRYMRASDPASPHIGRSNEEEETSDSSLEKQTRSKYCTETSGVHGDSPYGSGTMDTHSLESKAERIARYKAERRRQLAEKYGLTLDPEADSEYLSRYTKSRKEPDAVEKRGGKSDKQEESSRDASSLYPGTETMGLRTCAGESKDYALHVGDGSSDPEVLLNIENQRRGQELSATRQAHDLSPAAESSSTFSFSGRDSSFTEVPRSPKHAHSSSLQQAASRSPSFGDPQLSPEARPSTGKPKHEWFLQKDSEGDTPSLINWPSRVKVREKLVKEESARNSPELASESVTQRRHQPAPVHYVSFQSEHSAFDRVPSKAAGSTRQPIRGYVQPADTGHTAKLVTPETPENASECSWVASATQNVPKPPSLTVLEGDGRDSPVLHVCESKAEEEEGEGEGEEKEEDVCFTEALEQSKKTLLALEGDGLVRSPEDPSRNEDFGKPAVSTVTLEHQKELENVAQPPQAPHQPTERTGRSEMVLYIQSEPVSQDAKPTGHNREASKKRKVRTRSLSDFTGPPQLQALKYKDPASRRELELPSSKTEGPYGEISMLDTKVSVAQLRSAFLASANACRRPELKSRVERSAEGPGLPTGVERERGSRKPRRYFSPGESRKTSERFRTQPITSAERKESDRCTSHSETPTVDDEEKVDERAKLSVAAKRLLFREMEKSFDEQNVPKRRSRNTAVEQRLRRLQDRSLTQPITTEEVVIAATLQASAHQKALAKDQTNEGKELAEQGEPDSSTLSLAEKLALFNKLSQPVSKAISTRNRIDTRQRRMNARYQTQPVTLGEVEQVQSGKLIPFSPAVNTSVSTVASTVAPMYAGDLRTKPPLDHNASATDYKFSSSIENSDSPVRSILKSQAWQPLVEGSENKGMLREYGETESKRALTGRDSGMEKYGSFEEAEASYPILNRAREGDSHKESKYAVPRRGSLERANPPITHLGDEPKEFSMAKMNAQGNLDLRDRLPFEEKVEVENVMKRKFSLRAAEFGEPTSEQTGTAAGKTIAQTTAPVSWKPQDSSEQPQEKLCKNPCAMFAAGEIKTPTGEGLLDSPSKTMSIKERLALLKKSGEEDWRNRLSRRQEGGKAPASSLHTQEAGRSLIKKRVTESRESQMTIEERKQLITVREEAWKTRGRGAANDSTQFTVAGRMVKKGLASPTAITPVASPICGKTRGTTPVSKPLEDIEARPDMQLESDLKLDRLETFLRRLNNKVGGMHETVLTVTGKSVKEVMKPDDDETFAKFYRSVDYNMPRSPVEMDEDFDVIFDPYAPKLTSSVAEHKRAVRPKRRVQASKNPLKMLAAREDLLQEYTEQRLNVAFMESKRMKVEKMSSNSNFSEVTLAGLASKENFSNVSLRSVNLTEQNSNNSAVPYKRLMLLQIKGRRHVQTRLVEPRASALNSGDCFLLLSPHCCFLWVGEFANVIEKAKASELATLIQTKRELGCRATYIQTIEEGINTHTHAAKDFWKLLGGQTSYQSAGDPKEDELYEAAIIETNCIYRLMDDKLVPDDDYWGKIPKCSLLQPKEVLVFDFGSEVYVWHGKEVTLAQRKIAFQLAKHLWNGTFDYENCDINPLDPGECNPLIPRKGQGRPDWAIFGRLTEHNETILFKEKFLDWTELKRSNEKNPGELAQHKEDPRTDVKAYDVTRMVSMPQTTAGTILDGVNVGRGYGLVEGHDRRQFEITSVSVDVWHILEFDYSRLPKQSIGQFHEGDAYVVKWKFMVSTAVGSRQKGEHSVRAAGKEKCVYFFWQGRHSTVSEKGTSALMTVELDEERGAQVQVLQGKEPPCFLQCFQGGMVVHSGRREEEEENVQSEWRLYCVRGEVPVEGNLLEVACHCSSLRSRTSMVVLNVNKALIYLWHGCKAQAHTKEVGRTAANKIKEQCPLEAGLHSSSKVTIHECDEGSEPLGFWDALGRRDRKAYDCMLQDPGSFNFAPRLFILSSSSGDFAATEFVYPARAPSVVSSMPFLQEDLYSAPQPALFLVDNHHEVYLWQGWWPIENKITGSARIRWASDRKSAMETVLQYCKGKNLKKPAPKSYLIHAGLEPLTFTNMFPSWEHREDIAEITEMDTEVSNQITLVEDVLAKLCKTIYPLADLLARPLPEGVDPLKLEIYLTDEDFEFALDMTRDEYNALPAWKQVNLKKAKGLF

SEQ ID NO: 84996 - protein, 1788 aa, Homo sapiens
  Payload ID: 16905
  Gene Symbol: SVIL
  Gene Name: supervillin
  Uniprot ID: O95425
  ENSP ID: ENSP00000364549
MKRKERIARRLEGIENDTQPILLQSCTGLVTHRLLEEDTPRYMRASDPASPHIGRSNEEEETSDSSLEKQTRSKYCTETSGVHGDSPYGSGTMDTHSLESKAERIARYKAERRRQLAEKYGLTLDPEADSEYLSRYTKSRKEPDAVEKRGGKSDKQEESSRDASSLYPGTETMGLRTCAGESKDYALHVGDGSSDPEVLLNIENQRRGQELSATRQAHDLSPAAESSSTFSFSGRDSSFTEVPRSPKHAHSSSLQQAASRSPSFGDPQLSPEARPRCTSHSETPTVDDEEKVDERAKLSVAAKRLLFREMEKSFDEQNVPKRRSRNTAVEQRLRRLQDRSLTQPITTEEVVIAATLQASAHQKALAKDQTNEGKELAEQGEPDSSTLSLAEKLALFNKLSQPVSKAISTRNRIDTRQRRMNARYQTQPVTLGEVEQVQSGKLIPFSPAVNTSVSTVASTVAPMYAGDLRTKPPLDHNASATDYKFSSSIENSDSPVRSILKSQAWQPLVEGSENKGMLREYGETESKRALTGRDSGMEKYGSFEEAEASYPILNRAREGDSHKESKYAVPRRGSLERANPPITHLGDEPKEFSMAKMNAQGNLDLRDRLPFEEKVEVENVMKRKFSLRAAEFGEPTSEQTGTAAGKTIAQTTAPVSWKPQDSSEQPQEKLCKNPCAMFAAGEIKTPTGEGLLDSPSKTMSIKERLALLKKSGEEDWRNRLSRRQEGGKAPASSLHTQEAGRSLIKKRVTESRESQMTIEERKQLITVREEAWKTRGRGAANDSTQFTVAGRMVKKGLASPTAITPVASPICGKTRGTTPVSKPLEDIEARPDMQLESDLKLDRLETFLRRLNNKVGGMHETVLTVTGKSVKEVMKPDDDETFAKFYRSVDYNMPRSPVEMDEDFDVIFDPYAPKLTSSVAEHKRAVRPKRRVQASKNPLKMLAAREDLLQEYTEQRLNVAFMESKRMKVEKMSSNSNFSEVTLAGLASKENFSNVSLRSVNLTEQNSNNSAVPYKRLMLLQIKGRRHVQTRLVEPRASALNSGDCFLLLSPHCCFLWVGEFANVIEKAKASELATLIQTKRELGCRATYIQTIEEGINTHTHAAKDFWKLLGGQTSYQSAGDPKEDELYEAAIIETNCIYRLMDDKLVPDDDYWGKIPKCSLLQPKEVLVFDFGSEVYVWHGKEVTLAQRKIAFQLAKHLWNGTFDYENCDINPLDPGECNPLIPRKGQGRPDWAIFGRLTEHNETILFKEKFLDWTELKRSNEKNPGELAQHKEDPRTDVKAYDVTRMVSMPQTTAGTILDGVNVGRGYGLVEGHDRRQFEITSVSVDVWHILEFDYSRLPKQSIGQFHEGDAYVVKWKFMVSTAVGSRQKGEHSVRAAGKEKCVYFFWQGRHSTVSEKGTSALMTVELDEERGAQVQVLQGKEPPCFLQCFQGGMVVHSGRREEEEENVQSEWRLYCVRGEVPVEGNLLEVACHCSSLRSRTSMVVLNVNKALIYLWHGCKAQAHTKEVGRTAANKIKEQCPLEAGLHSSSKVTIHECDEGSEPLGFWDALGRRDRKAYDCMLQDPGSFNFAPRLFILSSSSGDFAATEFVYPARAPSVVSSMPFLQEDLYSAPQPALFLVDNHHEVYLWQGWWPIENKITGSARIRWASDRKSAMETVLQYCKGKNLKKPAPKSYLIHAGLEPLTFTNMFPSWEHREDIAEITEMDTEVSNQITLVEDVLAKLCKTIYPLADLLARPLPEGVDPLKLEIYLTDEDFEFALDMTRDEYNALPAWKQVNLKKAKGLF

SEQ ID NO: 84997 - protein, 963 aa, Homo sapiens
  Payload ID: 16905
  Gene Symbol: SVIL
  Gene Name: supervillin
  ENSP ID: ENSP00000488171
  MOD_RES (1)..(1): Any amino acid
XPQEKLCKNPCAMFAAGEIKTPTGEGLLDSPSKTMSIKERLALLKKSGEEDWRNRLSRRQEGGKAPASSLHTQEAGRSLIKKEEGGVADDSAISNLLWRVTESRESQMTIEERKQLITVREEAWKTRGRGAANDSTQFTVAGRMVKKGLASPTAITPVASPICGKTRGTTPVSKPLEDIEARPDMQLESDLKLDRLETFLRRLNNKVGGMHETVLTVTGKSVKEVMKPDDDETFAKFYRSVDYNMPRSPVEMDEDFDVIFDPYAPKLTSSVAEHKRAVRPKRRVQASKNPLKMLAAREDLLQEYTEQRLNVAFMESKRMKVEKMSSNSNFSEVTLAGLASKENFSNVSLRSVNLTEQNSNNSAVPYKRLMLLQIKGRRHVQTRLVEPRASALNSGDCFLLLSPHCCFLWVGEFANVIEKAKASELATLIQTKRELGCRATYIQTIEEGINTHTHAAKDFWKLLGGQTSYQSAGDPKEDELYEAAIIETNCIYRLMDDKLVPDDDYWGKIPKCSLLQPKEVLVFDFGSEVYVWHGKEVTLAQRKIAFQLAKHLWNGTFDYENCDINPLDPGECNPLIPRKGQGRPDWAIFGRLTEHNETILFKEKFLDWTELKRSNEKNPGELAQHKEDPRTDVKAYDVTRMVSMPQTTAGTILDGVNVGRGYGLVEGHDRRQFEITSVSVDVWHILEFDYSRLPKQSIGQFHEGDAYVVKWKFMVSTAVGSRQKGEHSVRAAGKEKCVYFFWQGRHSTVSEKGTSALMTVELDEERGAQVQVLQGKEPPCFLQCFQGGMVVHSGRREEEEENVQSEWRLYCVRGEVPVEGNLLEVACHCSSLRSRTSMVVLNVNKALIYLWHGCKAQAHTKEVGRTAANKIKEQCPLEAGLHSSSKVTIHECDEGSEPLGFWDALGRRDRKAYDCMLQDPGSFNFAPRLFILSSSSGDFAATEFVYPARAPSVVSSMPFLQED

SEQ ID NO: 84998 - protein, 369 aa, Homo sapiens
  Payload ID: 16906
  Gene Symbol: ST13
  Gene Name: suppression of tumorigenicity 13 (colon carcinoma) (Hsp70 interacting protein)
  Uniprot ID: P50502
  ENSP ID: ENSP00000216218
MDPRKVNELRAFVKMCKQDPSVLHTEEMRFLREWVESMGGKVPPATQKAKSEENTKEEKPDSKKVEEDLKADEPSSEESDLEIDKEGVIEPDTDAPQEMGDENAEITEEMMDQANDKKVAAIEALNDGELQKAIDLFTDAIKLNPRLAILYAKRASVFVKLQKPNAAIRDCDRAIEINPDSAQPYKWRGKAHRLLGHWEEAAHDLALACKLDYDEDASAMLKEVQPRAQKIAEHRRKYERKREEREIKERIERVKKAREEHERAQREEEARRQSGAQYGSFPGGFPGGMPGNFPGGMPGMGGGMPGMAGMPGLNEILSDPEVLAAMQDPEVMVAFQDVAQNPANMSKYQSNPKVMNLISKLSAKFGGQA

SEQ ID NO: 84999 - protein, 162 aa, Homo sapiens
  Payload ID: 16906
  Gene Symbol: ST13
  Gene Name: suppression of tumorigenicity 13 (colon carcinoma) (Hsp70 interacting protein)
  ENSP ID: ENSP00000392067
MGGKVPPATQKAKSEENTKEEKPDSKKVEEDLKADEPSSEESDLEIDKEGVIEPDTDAPQEMGDENAEITEEMMDQANDKKVAAIEALNDGELQKAIDLFTDAIKLNPRLAILYAKRASVFVKLQKPNAAIRDCDRAIEINPDSAQPYKWRGKAHRLLGHWE

SEQ ID NO: 85000 - protein, 38 aa, Homo sapiens
  Payload ID: 16906
  Gene Symbol: ST13
  Gene Name: suppression of tumorigenicity 13 (colon carcinoma) (Hsp70 interacting protein)
  ENSP ID: ENSP00000397062
MDPRKVNELRAFVKMCKQDPSVLHTEEMRFLREWVERN

SEQ ID NO: 85001 - protein, 146 aa, Homo sapiens
  Payload ID: 16906
  Gene Symbol: ST13
  Gene Name: suppression of tumorigenicity 13 (colon carcinoma) (Hsp70 interacting protein)
  ENSP ID: ENSP00000412049
  MOD_RES (1)..(1): Any amino acid
XIEPDTDAPQEMGDENAEITEEMMDQANDKKVAAIEALNDGELQKAIDLFTDAIKLNPRLAILYAKRASVFVKLQKPNAAIRDCDRAIEINPDSAQPYKWRGKAHRLLGHWEEAAHDLALACKLDYDEDASAMLKEVQPRVCTTTL

SEQ ID NO: 85002 - protein, 211 aa, Homo sapiens [sequence omitted]

SEQ ID NO: 85003 - protein, 254 aa, Homo sapiens
  Payload ID: 16906
  Gene Symbol: ST13
  Gene Name: suppression of tumorigenicity 13 (colon carcinoma) (Hsp70 interacting protein)
  ENSP ID: ENSP00000484210
MIKVAAIEALNDGELQKAIDLFTDAIKLNPRLAILYAKRASVFVKLQKPNAAIRDCDRAIEINPDSAQPYKWRGKAHRLLGHWEEAAHDLALACKLDYDEDASAMLKEVQPRAQKIAEHRRKYERKREEREIKERIERVKKAREEHERAQREEEARRQSGAQYGSFPGGFPGGMPGNFPGGMPGMGGGMPGMAGMPGLNEILSDPEVLAAMQDPEVMVAFQDVAQNPANMSKYQSNPKVMNLISKLSAKFGGQA

SEQ ID NO: 85004 - protein, 855 aa, Homo sapiens [sequence omitted]

SEQ ID NO: 85005 - protein, 1047 aa, Homo sapiens
  Payload ID: 16908
  Gene Symbol: ST18
  Gene Name: suppression of tumorigenicity 18, zinc finger
  Uniprot ID: O60284
  ENSP ID: ENSP00000276480
MDAEAEDKTLRTRSKGTEVPMDSLIQELSVAYDCSMAKKRTAEDQALGVPVNKRKSLLMKPRHYSPKADCQEDRSDRTEDDGPLETHGHSTAEEIMIKPMDESLLSTAQENSSRKEDRYSCYQELMVKSLMHLGKFEKNVSVQTVSENLNDSGIQSLKAESDEADECFLIHSDDGRDKIDDSQPPFCSSDDNESNSESAENGWDSGSNFSEETKPPRVPKYVLTDHKKDLLEVPEIKTEGDKFIPCENRCDSETERKDPQNALAEPLDGNAQPSFPDVEEEDSESLAVMTEEGSDLEKAKGNLSLLEQAIALQAERGCVFHNTYKELDRFLLEHLAGERRQTKVIDMGGRQIFNNKHSPRPEKRETKCPIPGCDGTGHVTGLYPHHRSLSGCPHKVRVPLEILAMHENVLKCPTPGCTGRGHVNSNRNTHRSLSGCPIAAAEKLAMSQDKNQLDSPQTGQCPDQAHRTSLVKQIEFNFPSQAITSPRATVSKEQEKFGKVPFDYASFDAQVFGKRPLIQTVQGRKTPPFPESKHFPNPVKFPNRLPSAGAHTQSPGRASSYSYGQCSEDTHIAAAAAILNLSTRCREATDILSNKPQSLHAKGAEIEVDENGTLDLSMKKNRILDKSAPLTSSNTSIPTPSSSPFKTSSILVNAAFYQALCDQEGWDTPINYSKTHGKTEEEKEKDPVSSLENLEEKKFPGEASIPSPKPKLHARDLKKELITCPTPGCDGSGHVTGNYASHRSVSGCPLADKTLKSLMAANSQELKCPTPGCDGSGHVTGNYASHRSLSGCPRARKGGVKMTPTKEEKEDPELKCPVIGCDGQGHISGKYTSHRTASGCPLAAKRQKENPLNGASLSWKLNKQELPHCPLPGCNGLGHVNNVFVTHRSLSGCPLNAQVIKKGKVSEELMTIKLKATGGIESDEEIRHLDEEIKELNESNLKIEADMMKLQTQITSMESNLKTIEEENKLIEQNNESLLKELAGLSQALISSLADIQLPQMGPISEQNFEAYVNTLTDMYSNLERDYSPECKALLESIKQAVKGIHV

SEQ ID NO: 85006 - protein, 12 aa, Homo sapiens
  Payload ID: 16908
  Gene Symbol: ST18
  Gene Name: suppression of tumorigenicity 18, zinc finger
  ENSP ID: ENSP00000428096
MDAEAEDKTLRT

SEQ ID NO: 85007 - protein, 620 aa, Homo sapiens
  Payload ID: 16908
  Gene Symbol: ST18
  Gene Name: suppression of tumorigenicity 18, zinc finger
  ENSP ID: ENSP00000428521
MDAEAEDKTLRTRSKGTEVPMDSLIQELSVAYDCSMAKKRTAEDQALGVPVNKRKSLLMKPRHYSPKADCQEDRSDRTEDDGPLETHGHSTAEEIMIKPMDESLLSTAQENSSRKEDRYSCYQELMVKSLMHLGKFEKNVSVQTVSENLNDSGIQSLKAESDEADECFLIHSDDGRDKIDDSQPPFCSSDDNESNSESAENGWDSGSNFSEETKPPRVPKYVLTDHKKDLLEVPEIKTEGDKFIPCENRCDSETERKDPQNALAEPLDGNAQPSFPDVEEEDSESLAVMTEEGSDLEKAKGNLSLLEQAIALQAERGCVFHNTYKELDRFLLEHLAGERRQTKVIDMGGRQIFNNKHSPRPEKRETKCPIPGCDGTGHVTGLYPHHRSLSGCPHKVRVPLEILAMHENVLKCPTPGCTGRGHVNSNRNTHRSLSGCPIAAAEKLAMSQDKNQLDSPQTGQCPDQAHRTSLVKQIEFNFPSQAITSPRATVSKEQEKFGKVPFDYASFDAQVFGKRPLIQTVQGRKTPPFPESKHFPNPVKFPNRLPSAGAHTQSPGRASSYSYGQCSEDTHIAAAAAILNLSTRCREATDILSNKPQSLHAKGAEIEVDENGTLDLSMKK

SEQ ID NO: 85008 - protein, 41 aa, Homo sapiens
  Payload ID: 16908
  Gene Symbol: ST18
  Gene Name: suppression of tumorigenicity 18, zinc finger
  ENSP ID: ENSP00000428920
MDAEAEDKTLRTRSKGTEVPMDSLIQELRISVPVDMRPLTW

SEQ ID NO: 85009 - protein, 94 aa, Homo sapiens
  Payload ID: 16908
  Gene Symbol: ST18
  Gene Name: suppression of tumorigenicity 18, zinc finger
  ENSP ID: ENSP00000429579
MDAEAEDKTLRTRSKGTEVPMDSLIQELSVAYDCSMAKKRTAEDQALGVPVNKRKSLLMKPRHYSPKADCQEDRSDRTEDDGPLETHGHSTRKS

SEQ ID NO: 85010 - protein, 364 aa, Homo sapiens
  Payload ID: 16908
  Gene Symbol: ST18
  Gene Name: suppression of tumorigenicity 18, zinc finger
  ENSP ID: ENSP00000430763
MDAEAEDKTLRTRSKGTEVPMDSLIQELSVAYDCSMAKKRTAEDQALGVPVNKRKSLLMKPRHYSPKADCQEDRSDRTEDDGPLETHGHSTAEEIMIKPMDESLLSTAQENSSRKEDRYSCYQELMVKSLMHLGKFEKNVSVQTVSENLNDSGIQSLKAESDEADECFLIHSDDGRDKIDDSQPPFCSSDDNESNSESAENGWDSGSNFSEETKPPRVPKYVLTDHKKDLLEVPEIKTEGDKFIPCENRCDSETERKDPQNALAEPLDGNAQPSFPDVEEEDSESLAVMTEEGSDLEKAKGNLSLLEQAIALQAERGCVFHNTYKELDRFLLEHLAGERRQTKVIDMGGRQIFNNKHYPPIKLC

SEQ ID NO: 85011 - protein, 1137 aa, Homo sapiens
  Payload ID: 16909
  Gene Symbol: ST5
  Gene Name: suppression of tumorigenicity 5
  Uniprot ID: P78524
  ENSP ID: ENSP00000319678
MTMTANKNSSITHGAGGTKAPRGTLSRSQSVSPPPVLSPPRSPIYPLSDSETSACRYPSHSSSRVLLKDRHPPAPSPQNPQDPSPDTSPPTCPFKTASFGYLDRSPSACKRDAQKESVQGAAQDVAGVAACLPLAQSTPFPGPAAGPRGVLLTRTGTRAHSLGIREKISAWEGRREASPRMSMCGEKREGSGSEWAASEGCPSLGCPSVVPSPCSSEKTFDFKGLRRMSRTFSECSYPETEEEGEALPVRDSFYRLEKRLGRSEPSAFLRGHGSRKESSAVLSRIQKIEQVLKEQPGRGLPQLPSSCYSVDRGKRKTGTLGSLEEPAGGASVSAGSRAVGVAGVAGEAGPPPEREGSGSTKPGTPGNSPSSQRLPSKSSLDPAVNPVPKPKRTFEYEADKNPKSKPSNGLPPSPTPAAPPPLPSTPAPPVTRRPKKDMRGHRKSQSRKSFEFEDASSLQSLYPSSPTENGTENQPKFGSKSTLEENAYEDIVGDLPKENPYEDVDLKSRRAGRKSQQLSENSLDSLHRMWSPQDRKYNSPPTQLSLKPNSQSLRSGNWSERKSHRLPRLPKRHSHDDMLLLAQLSLPSSPSSLNEDSLSTTSELLSSRRARRIPKLVQRINSIYNAKRGKKRLKKLSMSSIETASLRDENSESESDSDDRFKAHTQRLVHIQSMLKRAPSYRTLELELLEWQERELFEYFVVVSLKKKPSRNTYLPEVSYQFPKLDRPTKQMREAEERLKAIPQFCFPDAKDWLPVSEYSSETFSFMLTGEDGSRRFGYCRRLLPSGKGPRLPEVYCVISRLGCFGLFSKVLDEVERRRGISAALVYPFMRSLMESPFPAPGKTIKVKTFLPGAGNEVLELRRPMDSRLEHVDFECLFTCLSVRQLIRIFASLLLERRVIFVADKLSTLSSCSHAVVALLYPFSWQHTFIPVLPASMIDIVCCPTPFLVGLLSSSLPKLKELPVEEALMVNLGSDRFIRQMDDEDTLLPRKLQAALEQALERKNELISQDSDSDSDDECNTLNGLVSEVFIRFFVETVGHYSLFLTQSEKGERAFQREAFRKSVASKSIRRFLEVFMESQMFAGFIQDRELRKCRAKGLFEQRVEQYLEELPDTEQSGMNKFLRGLGNKMKFLHKKN

SEQ ID NO: 85012 - protein, 1137 aa, Homo sapiens; identical to SEQ ID NO: 85011
  Payload ID: 16909
  Gene Symbol: ST5
  Gene Name: suppression of tumorigenicity 5
  Uniprot ID: P78524
  ENSP ID: ENSP00000350294

SEQ ID NO: 85013 - protein, 124 aa, Homo sapiens
  Payload ID: 16909
  Gene Symbol: ST5
  Gene Name: suppression of tumorigenicity 5
  ENSP ID: ENSP00000431139
MTMTANKNSSITHGAGGTKAPRGTLSRSQSVSPPPVLSPPRSPIYPLSDSETSACRYPSHSSSRVLLKDRHPPAPSPQNPQDPSPDTSPPTCPFKTASFGYLDRSPSACKRDAQKESVQGAAQD

SEQ ID NO: 85014 - protein, 183 aa, Homo sapiens
  Payload ID: 16909
  Gene Symbol: ST5
  Gene Name: suppression of tumorigenicity 5
  ENSP ID: ENSP00000431252
MTSRKNGGGAHSWQETPWEQRRALGLQRAEMTMTANKNSSITHGAGGTKAPRGTLSRSQSVSPPPVLSPPRSPIYPLSDSETSACRYPSHSSSRVLLKDRHPPAPSPQNPQDPSPDTSPPTCPFKTASFGYLDRSPSACKRDAQKESVQGAAQDVAGVAACLPLAQSTPFPGPAAGPRGVLLT

SEQ ID NO: 85015 - protein, 155 aa, Homo sapiens
  Payload ID: 16909
  Gene Symbol: ST5
  Gene Name: suppression of tumorigenicity 5
  ENSP ID: ENSP00000431332
MQFVEKFQRALGLQRAEMTMTANKNSSITHGAGGTKAPRGTLSRSQSVSPPPVLSPPRSPIYPLSDSETSACRYPSHSSSRVLLKDRHPPAPSPQNPQDPSPDTSPPTCPFKTASFGYLDRSPSACKRDAQKESVQGAAQDVAGVAACLPLAQST

SEQ ID NO: 85016 - protein, 148 aa, Homo sapiens
  Payload ID: 16909
  Gene Symbol: ST5
  Gene Name: suppression of tumorigenicity 5
  ENSP ID: ENSP00000431564
MTMTANKNSSITHGAGGTKAPRGTLSRKSFEFEDASSLQSLYPSSPTENGTENQPKFGSKSTLEENAYEDIVGDLPKENPYEDVDLKSRRAGRKSQQLSENSLDSLHRMWSPQDRKYNSPPTQLSLKPNSQSLRSGNWSERKSHRLPR

SEQ ID NO: 85017 - protein, 179 aa, Homo sapiens
  Payload ID: 16909
  Gene Symbol: ST5
  Gene Name: suppression of tumorigenicity 5
  ENSP ID: ENSP00000431580
MWSPQDRKYNSPPTQLSLKPNSQSLRSGNWSERKSHRLPRLPKRHSHDDMLLLAQLSLPSSPSSLNEDSLSTTSELLSSRRARRIPKLVQRINSIYNAKRGKKRLKKLSMSSIETASLRDENSESESDSDDRFKAHTQRLVHIQSMLKRAPSYRTLELELLEWQERELFEYFVVVSLKK

SEQ ID NO: 85018 - protein, 111 aa, Homo sapiens
  Payload ID: 16909
  Gene Symbol: ST5
  Gene Name: suppression of tumorigenicity 5
  ENSP ID: ENSP00000431673
MTMTANKNSSITHGAGGTKAPRGTLSRSQSVSPPPVLSPPRSPIYPLSDSETSACRYPSHSSSRVLLKDRHPPAPSPQNPQDPSPDTSPPTCPFKTASFGYLDRSPSACKR

SEQ ID NO: 85019 - protein, 95 aa, Homo sapiens
  Payload ID: 16909
  Gene Symbol: ST5
  Gene Name: suppression of tumorigenicity 5
  ENSP ID: ENSP00000431990
MTMTANKNSSITHGAGGTKAPRGTLSRSQSVSPPPVLSPPRSPIYPLSDSETSACRYPSHSSSRVLLKDRHPPAPSPQNPQDPSPDTSPPTCPFK

SEQ ID NO: 85020 - protein, 135 aa, Homo sapiens
  Payload ID: 16909
  Gene Symbol: ST5
  Gene Name: suppression of tumorigenicity 5
  ENSP ID: ENSP00000432521
MTMTANKNSSITHGAGGTKAPRGTLSRKSFEFEDASSLQSLYPSSPTENGTENQPKFGSKSTLEENAYEDIVGDLPKENPYEDVDLKSRRAGRKSQQLSENSLDSLHRMWSPQDRKYNSPPTQLSLKPNSQSLRS

SEQ ID NO: 85021 - protein, 122 aa, Homo sapiens
  Payload ID: 16909
  Gene Symbol: ST5
  Gene Name: suppression of tumorigenicity 5
  ENSP ID: ENSP00000432872
MTMTANKNSSITHGAGGTKAPRGTLSRSQSVSPPPVLSPPRSPIYPLSDSETSACRYPSHSSSRVLLKDRHPPAPSPQNPQDPSPDTSPPTCPFKTASFGYLDRSPSACKRDAQKESVQGAA

SEQ ID NO: 85022 - protein, 609 aa, Homo sapiens
  Payload ID: 16909
  Gene Symbol: ST5
  Gene Name: suppression of tumorigenicity 5
  Uniprot ID: P78524
  ENSP ID: ENSP00000432887
MWSPQDRKYNSPPTQLSLKPNSQSLRSGNWSERKSHRLPRLPKRHSHDDMLLLAQLSLPSSPSSLNEDSLSTTSELLSSRRARRIPKLVQRINSIYNAKRGKKRLKKLSMSSIETASLRDENSESESDSDDRFKAHTQRLVHIQSMLKRAPSYRTLELELLEWQERELFEYFVVVSLKKKPSRNTYLPEVSYQFPKLDRPTKQMREAEERLKAIPQFCFPDAKDWLPVSEYSSETFSFMLTGEDGSRRFGYCRRLLPSGKGPRLPEVYCVISRLGCFGLFSKVLDEVERRRGISAALVYPFMRSLMESPFPAPGKTIKVKTFLPGAGNEVLELRRPMDSRLEHVDFECLFTCLSVRQLIRIFASLLLERRVIFVADKLSTLSSCSHAVVALLYPFSWQHTFIPVLPASMIDIVCCPTPFLVGLLSSSLPKLKELPVEEALMVNLGSDRFIRQMDDEDTLLPRKLQAALEQALERKNELISQDSDSDSDDECNTLNGLVSEVFIRFFVETVGHYSLFLTQSEKGERAFQREAFRKSVASKSIRRFLEVFMESQMFAGFIQDRELRKCRAKGLFEQRVEQYLEELPDTEQSGMNKFLRGLGNKMKFLHKKN

SEQ ID NO: 85023 - protein, 139 aa, Homo sapiens
  Payload ID: 16909
  Gene Symbol: ST5
  Gene Name: suppression of tumorigenicity 5
  ENSP ID: ENSP00000433008
MTMTANKNSSITHGAGGTKAPRGTLSRSQSVSPPPVLSPPRSPIYPLSDSETSACRYPSHSSSRVLLKDRHPPAPSPQNPQDPSPDTSPPTCPFKTASFGYLDRSPSACKRDAQKESVQGAAQDVAGVAACLPLAQSTP

SEQ ID NO: 85024 - protein, 111 aa, Homo sapiens
  Payload ID: 16909
  Gene Symbol: ST5
  Gene Name: suppression of tumorigenicity 5
  ENSP ID: ENSP00000433043
  MOD_RES (1)..(1): Any amino acid
XPASVCASSSESLPHCCWSAGSFLWQISSAASEHIPGPFWEGRSQGLVLGLAGYSSSANLGSWKRCPSCSAWGLPLAGEGRVPSPAAPTRWWPCSTPSPGSTPSFLSSRPP

SEQ ID NO: 85025 - protein, 40 aa, Homo sapiens
  Payload ID: 16909
  Gene Symbol: ST5
  Gene Name: suppression of tumorigenicity 5
  ENSP ID: ENSP00000433175
MTMTANKNSSITHGAGGTKAPRGTLSRSQSVSPPPVLSPP

SEQ ID NO: 85026 - protein, 142 aa, Homo sapiens
  Payload ID: 16909
  Gene Symbol: ST5
  Gene Name: suppression of tumorigenicity 5
  ENSP ID: ENSP00000433346
MTMTANKNSSITHGAGGTKAPRGTLSRSQSVSPPPVLSPPRSPIYPLSDSETSACRYPSHSSSRVLLKDRHPPAPSPQNPQDPSPDTSPPTCPFKTASFGYLDRSPSACKRDAQKESVQGAAQDVAGVAACLPLAQSTPFPG

SEQ ID NO: 85027 - protein, 328 aa, Homo sapiens
  Payload ID: 16909
  Gene Symbol: ST5
  Gene Name: suppression of tumorigenicity 5
  ENSP ID: ENSP00000433349
MVLDEVERRRGISAALVYPFMRSLMESPFPAPGKTIKVKTFLPGAGNEVLELRRPMDSRLEHVDFECLFTCLSVRQLIRIFASLLLERRVIFVADKLSTLSSCSHAVVALLYPFSWQHTFIPVLPASMIDIVCCPTPFLVGLLSSSLPKLKELPVEEALMVNLGSDRFIRQMDDEDTLLPRKLQAALEQALERKNELISQDSDSDSDDECNTLNGLVSEVFIRFFVETVGHYSLFLTQSEKGERAFQREAFRKSVASKSIRRFLEVFMESQMFAGFIQDRELRKCRAKGLFEQRVEQYLEELPDTEQSGMNKFLRGLGNKMKFLHKKN

SEQ ID NO: 85028 - protein, 1137 aa, Homo sapiens; identical to SEQ ID NO: 85011
  Payload ID: 16909
  Gene Symbol: ST5
  Gene Name: suppression of tumorigenicity 5
  Uniprot ID: P78524
  ENSP ID: ENSP00000433528

SEQ ID NO: 85029 - protein, 344 aa, Homo sapiens
  Payload ID: 16909
  Gene Symbol: ST5
  Gene Name: suppression of tumorigenicity 5
  ENSP ID: ENSP00000433588
MWSPQDRKYNSPPTQLSLKPNSQSLRSGNWSERKSHRLPRLPKRHSHDDMLLLAQLSLPSSPSSLNEDSLSTTSELLSSRRARRIPKLVQRINSIYNAKRGKKRLKKLSMSSIETASLRDENSESESDSDDRFKAHTQRLVHIQSMLKRAPSYRTLELELLEWQERELFEYFVVVSLKKKPSRNTYLPEVSYQFPKLDRPTKQMREAEERLKAIPQFCFPDAKDWLPVSEYSSETFSFMLTGEDGSRRFGYCRRLLPSGKGPRLPEVYCVISRLGCFGLFSKVLDEVERRRGISAALVYPFMRSLMESPFPAPGKTIKVKTFLPGAGNEVLELRRPMDSRLEHV

SEQ ID NO: 85030 - protein, 154 aa, Homo sapiens
  Payload ID: 16909
  Gene Symbol: ST5
  Gene Name: suppression of tumorigenicity 5
  ENSP ID: ENSP00000433647
MTMTANKNSSITHGAGGTKAPRGTLSRSQSVSPPPVLSPPRSPIYPLSDSETSACRYPSHSSSRVLLKDRHPPAPSPQNPQDPSPDTSPPTCPFKTASFGYLDRSPSACKRDAQKESVQGAAQDVAGVAACLPLAQSTPFPGPAAGPRGVLLTR

SEQ ID NO: 85031 - protein, 356 aa, Homo sapiens
  Payload ID: 16909
  Gene Symbol: ST5
  Gene Name: suppression of tumorigenicity 5
  ENSP ID: ENSP00000433793
MTSRKNGGGAHSWQETPWEQRRALGLQRAEMTMTANKNSSITHGAGGTKAPRGTLSRKSFEFEDASSLQSLYPSSPTENGTENQPKFGSKSTLEENAYEDIVGDLPKENPYEDVDLKSRRAGRKSQQLSENSLDSLHRMWSPQDRKYNSPPTQLSLKPNSQSLRSGNWSERKSHRLPRLPKRHSHDDMLLLAQLSLPSSPSSLNEDSLSTTSELLSSRRARRIPKLVQRINSIYNAKRGKKRLKKLSMSSIETASLRDENSESESDSDDRFKAHTQRLVHIQSMLKRAPSYRTLELELLEWQERELFEYFVVVSLKKKPSRNTYLPEVSYQFPKECAFSSSSRGCWLLLISQALLK

SEQ ID NO: 85032 - protein, 145 aa, Homo sapiens
  Payload ID: 16909
  Gene Symbol: ST5
  Gene Name: suppression of tumorigenicity 5
  ENSP ID: ENSP00000433858
GRKSQQLSENSLDSLHRMWSPQDRKYNSPPTQLSLKPNSQSLRSGNWSERKSHRLPRLPKRHSHDDMLLLAQLSLPSSPSSLNEDSLSTTSELLSSRRARRIPKVPSPEAAHWSRAGGRAGSQPFSLFPGFLPSLIWTASSIPFE

SEQ ID NO: 85033 - protein, 123 aa, Homo sapiens
  Payload ID: 16909
  Gene Symbol: ST5
  Gene Name: suppression of tumorigenicity 5
  ENSP ID: ENSP00000434332
MFGAEGVLPGERALGLQRAEMTMTANKNSSITHGAGGTKAPRGTLSRSQSVSPPPVLSPPRSPIYPLSDSETSACRYPSHSSSRVLLKDRHPPAPSPQNPQDPSPDTSPPTCPFKTASFGYLD

SEQ ID NO: 85034 - protein, 137 aa, Homo sapiens
  Payload ID: 16909
  Gene Symbol: ST5
  Gene Name: suppression of tumorigenicity 5
  ENSP ID: ENSP00000434701
MTMTANKNSSITHGAGGTKAPRGTLSRKSFEFEDASSLQSLYPSSPTENGTENQPKFGSKSTLEENAYEDIVGDLPKENPYEDVDLKSRRAGRKSQQLSENSLDSLHRMWSPQDRKYNSPPTQPVPAQWELVRKEEP

SEQ ID NO: 85035 - protein, 74 aa, Homo sapiens
  Payload ID: 16909
  Gene Symbol: ST5
  Gene Name: suppression of tumorigenicity 5
  ENSP ID: ENSP00000434930
MTMTANKNSSITHGAGGTKAPRGTLSRSQSVSPPPVLSPPRSPIYPLSDSETSACRYPSHSSSRVLLKDRHPPA

SEQ ID NO: 85036 - protein, 144 aa, Homo sapiens
  Payload ID: 16909
  Gene Symbol: ST5
  Gene Name: suppression of tumorigenicity 5
  ENSP ID: ENSP00000434935
MTMTANKNSSITHGAGGTKAPRGTLSRSQSVSPPPVLSPPRSPIYPLSDSETSACRYPSHSSSRVLLKDRHPPAPSPQNPQDPSPDTSPPTCPFKTASFGYLDRSPSACKRDAQKESVQGAAQDVAGVAACLPLAQSTPFPGPA

SEQ ID NO: 85037 - protein, 98 aa, Homo sapiens
  Payload ID: 16909
  Gene Symbol: ST5
  Gene Name: suppression of tumorigenicity 5
  ENSP ID: ENSP00000435016
  MOD_RES (1)..(1): Any amino acid
XVHIQSMLKRAPSYRTLELELLEWQERELFEYFVVVSLKKKPSRNTYLPEVSYQFPKLDRPTKQMREAEERLKAIPQFCFPDAKDWLPVSEYSPLTPP

SEQ ID NO: 85038 - protein, 717 aa, Homo sapiens
  Payload ID: 16909
  Gene Symbol: ST5
  Gene Name: suppression of tumorigenicity 5
  Uniprot ID: P78524
  ENSP ID: ENSP00000435097
MTMTANKNSSITHGAGGTKAPRGTLSRKSFEFEDASSLQSLYPSSPTENGTENQPKFGSKSTLEENAYEDIVGDLPKENPYEDVDLKSRRAGRKSQQLSENSLDSLHRMWSPQDRKYNSPPTQLSLKPNSQSLRSGNWSERKSHRLPRLPKRHSHDDMLLLAQLSLPSSPSSLNEDSLSTTSELLSSRRARRIPKLVQRINSIYNAKRGKKRLKKLSMSSIETASLRDENSESESDSDDRFKAHTQRLVHIQSMLKRAPSYRTLELELLEWQERELFEYFVVVSLKKKPSRNTYLPEVSYQFPKLDRPTKQMREAEERLKAIPQFCFPDAKDWLPVSEYSSETFSFMLTGEDGSRRFGYCRRLLPSGKGPRLPEVYCVISRLGCFGLFSKVLDEVERRRGISAALVYPFMRSLMESPFPAPGKTIKVKTFLPGAGNEVLELRRPMDSRLEHVDFECLFTCLSVRQLIRIFASLLLERRVIFVADKLSTLSSCSHAVVALLYPFSWQHTFIPVLPASMIDIVCCPTPFLVGLLSSSLPKLKELPVEEALMVNLGSDRFIRQMDDEDTLLPRKLQAALEQALERKNELISQDSDSDSDDECNTLNGLVSEVFIRFFVETVGHYSLFLTQSEKGERAFQREAFRKSVASKSIRRFLEVFMESQMFAGFIQDRELRKCRAKGLFEQRVEQYLEELPDTEQSGMNKFLRGLGNKMKFLHKKN

SEQ ID NO: 85039 - protein, 53 aa, Homo sapiens
  Payload ID: 16909
  Gene Symbol: ST5
  Gene Name: suppression of tumorigenicity 5
  ENSP ID: ENSP00000435180
MTMTANKNSSITHGAGGTKAPRGTLSRSQSVSPPPVLSPPRSPIYPLSDSETS

SEQ ID NO: 85040 - protein, 83 aa, Homo sapiens
  Payload ID: 16909
  Gene Symbol: ST5
  Gene Name: suppression of tumorigenicity 5
  ENSP ID: ENSP00000435228
MTMTANKNSSITHGAGGTKAPRGTLSRSQSVSPPPVLSPPRSPIYPLSDSETSACRYPSHSSSRVLLKDRHPPAPSPQNPQDP

SEQ ID NO: 85041 - protein, 76 aa, Homo sapiens
  Payload ID: 16909
  Gene Symbol: ST5
  Gene Name: suppression of tumorigenicity 5
  ENSP ID: ENSP00000435292
MTMTANKNSSITHGAGGTKAPRGTLSRKSFEFEDASSLQSLYPSSPTENGTENQPKFGSKSTLEENAYEDIVGDLP

SEQ ID NO: 85042 - protein, 52 aa, Homo sapiens
  Payload ID: 16909
  Gene Symbol: ST5
  Gene Name: suppression of tumorigenicity 5
  ENSP ID: ENSP00000435562
MTMTANKNSSITHGAGGTKAPRGTLSRSQSVSPPPVLSPPRSPIYPLSDSET

SEQ ID NO: 85043 - protein, 57 aa, Homo sapiens
  Payload ID: 16909
  Gene Symbol: ST5
  Gene Name: suppression of tumorigenicity 5
  ENSP ID: ENSP00000435925
MTMTANKNSSITHGAGGTKAPRGTLSRSQSVSPPPVLSPPRSPIYPLSDSETSACRY

SEQ ID NO: 85044 - protein, 26 aa, Homo sapiens
  Payload ID: 16909
  Gene Symbol: ST5
  Gene Name: suppression of tumorigenicity 5
  ENSP ID: ENSP00000436154
MTMTANKNSSITHGAGGTKAPRGTLS

SEQ ID NO: 85045 - protein, 30 aa, Homo sapiens
  Payload ID: 16909
  Gene Symbol: ST5
  Gene Name: suppression of tumorigenicity 5
  ENSP ID: ENSP00000436363
MTMTANKNSSITHGAGGTKAPRGTLSRSQS

SEQ ID NO: 85046 - protein, 77 aa, Homo sapiens
  Payload ID: 16909
  Gene Symbol: ST5
  Gene Name: suppression of tumorigenicity 5
  ENSP ID: ENSP00000436506
MTMTANKNSSITHGAGGTKAPRGTLSRKSFEFEDASSLQSLYPSSPTENGTENQPKFGSKSTLEENAYEDIVGDLPK

SEQ ID NO: 85047 - protein, 74 aa, Homo sapiens; identical to SEQ ID NO: 85035
  Payload ID: 16909
  Gene Symbol: ST5
  Gene Name: suppression of tumorigenicity 5
  ENSP ID: ENSP00000436748

SEQ ID NO: 85048 - protein, 72 aa, Homo sapiens
  Payload ID: 16909
  Gene Symbol: ST5
  Gene Name: suppression of tumorigenicity 5
  ENSP ID: ENSP00000436760
MTMTANKNSSITHGAGGTKAPRGTLSRKSFEFEDASSLQSLYPSSPTENGTENQPKFGSKSTLEENAYEDIV

SEQ ID NO: 85049 - protein, 717 aa, Homo sapiens; identical to SEQ ID NO: 85038
  Payload ID: 16909
  Gene Symbol: ST5
  Gene Name: suppression of tumorigenicity 5
  Uniprot ID: P78524
  ENSP ID: ENSP00000436802

SEQ ID NO: 85050 - protein, 650 aa, Homo sapiens
  Payload ID: 16909
  Gene Symbol: ST5
  Gene Name: suppression of tumorigenicity 5
  ENSP ID: ENSP00000436808
MPTLQRDLPKENPYEDVDLKSRRAGRKSQQLSENSLDSLHRMWSPQDRKYNSPPTQLSLKPNSQSLRSGNWSERKSHRLPRLPKRHSHDDMLLLAQLSLPSSPSSLNEDSLSTTSELLSSRRARRIPKLVQRINSIYNAKRGKKRLKKLSMSSIETASLRDENSESESDSDDRFKAHTQRLVHIQSMLKRAPSYRTLELELLEWQERELFEYFVVVSLKKKPSRNTYLPEVSYQFPKLDRPTKQMREAEERLKAIPQFCFPDAKDWLPVSEYSSETFSFMLTGEDGSRRFGYCRRLLPSGKGPRLPEVYCVISRLGCFGLFSKVLDEVERRRGISAALVYPFMRSLMESPFPAPGKTIKVKTFLPGAGNEVLELRRPMDSRLEHVDFECLFTCLSVRQLIRIFASLLLERRVIFVADKLSTLSSCSHAVVALLYPFSWQHTFIPVLPASMIDIVCCPTPFLVGLLSSSLPKLKELPVEEALMVNLGSDRFIRQMDDEDTLLPRKLQAALEQALERKNELISQDSDSDSDDECNTLNGLVSEVFIRFFVETVGHYSLFLTQSEKGERAFQREAFRKSVASKSIRRFLEVFMESQMFAGFIQDRELRKCRAKGLFEQRVEQYLEELPDTEQSGMNKFLRGLGNKMKFLHKKN

SEQ ID NO: 85051 - protein, 47 aa, Homo sapiens
  Payload ID: 16909
  Gene Symbol: ST5
  Gene Name: suppression of tumorigenicity 5
  ENSP ID: ENSP00000437006
MWSPQDRKYNSPPTQLSLKPNSQSLRSGNWSERKSHRLPRLPKRHSH

SEQ ID NO: 85052 - protein, 217 aa, Homo sapiens
  Payload ID: 16909
  Gene Symbol: ST5
  Gene Name: suppression of tumorigenicity 5
  ENSP ID: ENSP00000437096
MWSPQDRKYNSPPTQLSLKPNSQSLRSGNWSERKSHRLPRLPKRHSHDDMLLLAQLSLPSSPSSLNEDSLSTTSELLSSRRARRIPKLVQRINSIYNAKRGKKRLKKLSMSSIETASLRAHTQRLVHIQSMLKRAPSYRTLELELLEWQERELFEYFVVVSLKKKPSRNTYLPEVSYQFPKLDRPTKQMREAEERLKAIPQFCFPDAKDWLPVSEYS

SEQ ID NO: 85053 - protein, 356 aa, Homo sapiens; identical to SEQ ID NO: 85031
  Payload ID: 16909
  Gene Symbol: ST5
  Gene Name: suppression of tumorigenicity 5
  ENSP ID: ENSP00000486899

SEQ ID NO: 85054 - protein, 585 aa, Homo sapiens
  Payload ID: 16910
  Gene Symbol: ST7
  Gene Name: suppression of tumorigenicity 7
  Uniprot ID: Q9NRC1
  ENSP ID: ENSP00000265437
MAEAATGFLEQLKSCIVWSWTYLWTVWFFIVLFLVYILRVPLKINDNLSTVSMFLNTLTPKFYVALTGTSSLISGLILIFEWWYFRKYGTSFIEQVSVSHLRPLLGGVDNNSSNNSNSSNGDSDSNRQSVSECKVWRNPLNLFRGAEYNRYTWVTGREPLTYYDMNLSAQDHQTFFTCDSDHLRPADAIMQKAWRERNPQARISAAHEALEINEIRSRVEVPLIASSTIWEIKLLPKCATAYILLAEEEATTIAEAEKLFKQALKAGDGCYRRSQQLQHHGSQYEAQHRRDTNVLVYIKRRLAMCARRLGRTREAVKMMRDLMKEFPLLSMFNIHENLLEALLELQAYADVQAVLAKYDDISLPKSATICYTAALLKARAVSDKFSPEAASRRGLSTAEMNAVEAIHRAVEFNPHVPKYLLEMKSLILPPEHILKRGDSEAIAYAFFHLAHWKRVEGALNLLHCTWEGTFRMIPYPLEKGHLFYPYPICTETADRELLPSFHEVSVYPKKELPFFILFTAGLCSFTAMLALLTHQFPELMGVFAKAMIDIFCSAEFRDWNCKSIFMRVEDELEIPPAPQSQHFQN

SEQ ID NO: 85055 - protein, 577 aa, Homo sapiens
  Payload ID: 16910
  Gene Symbol: ST7
  Gene Name: suppression of tumorigenicity 7
  ENSP ID: ENSP00000325673
MAEAATGFLEQLKSCIVWSWTYLWTVWFFIVLFLVYILRVPLKINDNLSTVSMFLNTLTPKFYVALTGTSSLISGLILIFEWWYFRKYGTSFIEQVSVSHLRPLLGGVDNNSSNNSNSSNGDSDSNRQSVSECKVWRNPLNLFRGAEYNRYTWVTGREPLTYYDMNLSAQDHQTFFTCDSDHLRPADAIMQKAWRERNPQARISAAHEALEINEIRSRVEVPLIASSTIWEIKLLPKCATAYILLAEEEATTIAEAEKLFKQALKAGDGCYRRSQQLQHHGSQYEAQHRRDTNVLVYIKRRLAMCARRLGRTREAVKMMRDLMKEFPLLSMFNIHENLLEALLELQAYADVQAVLAKYDDISLPKSATICYTAALLKARAVSDKFSPEAASRRGLSTAEMNAVEAIHRAVEFNPHVPKYLLEMKSLILPPEHILKRGDSEAIAYAFFHLAHWKRVEGALNLLHCTWEGTFRMIPYPLEKGHLFYPYPICTETADRELLPSFHEVSVYPKKELPFFILFTAGLCSFTAMLALLTHQFPELMGVFAKAFLSTLFAPLNFVMEKVESILPSSLWHQLTRI

SEQ ID NO: 85056 - protein, 499 aa, Homo sapiens
  Payload ID: 16910
  Gene Symbol: ST7
  Gene Name: suppression of tumorigenicity 7
  Uniprot ID: Q9NRC1
  ENSP ID: ENSP00000377089
MSMFLNTLTPKFYVALTGTSSLISGLILIFEWWYFRKYGTSFIEQVSVSHLRPLLGGVDNNSSNNSNSSNGDSDSNRQSVSECKVWRNPLNLFRGAEYNRYTWVTGREPLTYYDMNLSAQDHQTFFTCDSDHLRPADAIMQKAWRERNPQARISAAHEALEINECATAYILLAEEEATTIAEAEKLFKQALKAGDGCYRRSQQLQHHGSQYEAQHRRDTNVLVYIKRRLAMCARRLGRTREAVKMMRDLMKEFPLLSMFNIHENLLEALLELQAYADVQAVLAKYDDISLPKSATICYTAALLKARAVSDKFSPEAASRRGLSTAEMNAVEAIHRAVEFNPHVPKYLLEMKSLILPPEHILKRGDSEAIAYAFFHLAHWKRVEGALNLLHSFRMIPYPLEKGHLFYPYPICTETADRELLPSFHEVSVYPKKELPFFILFTAGLCSFTAMLALLTHQFPELMGVFAKAFLSTLFAPLNFVMEKVESILPSSLWHQLTRI

SEQ ID NO: 85057 - protein, 511 aa, Homo sapiens
  Payload ID: 16910
  Gene Symbol: ST7
  Gene Name: suppression of tumorigenicity 7
  ENSP ID: ENSP00000377090
MFGTESSLSMFLNTLTPKFYVALTGTSSLISGLILIFEWWYFRKYGTSFIEQVSVSHLRPLLGGVDNNSSNNSNSSNGDSDSNRQSVSECKVWRNPLNLFRGAEYNRYTWVTGREPLTYYDMNLSAQDHQTFFTCDSDHLRPADAIMQKAWRERNPQARISAAHEALEINECATAYILLAEEEATTIAEAEKLFKQALKAGDGCYRRSQQLQHHGSQYEAQHRRDTNVLVYIKRRLAMCARRLGRTREAVKMMRDLMKEFPLLSMFNIHENLLEALLELQAYADVQAVLAKYDDISLPKSATICYTAALLKARAVSDKFSPEAASRRGLSTAEMNAVEAIHRAVEFNPHVPKYLLEMKSLILPPEHILKRGDSEAIAYAFFHLAHWKRVEGALNLLHCTWEGTFRMIPYPLEKGHLFYPYPICTETADRELLPSFHEVSVYPKKELPFFILFTAGLCSFTAMLALLTHQFPELMGVFAKAFLSTLFAPLNFVMEKVESILPSSLWHQLTRI

SEQ ID NO: 85058 - protein, 523 aa, Homo sapiens
  Payload ID: 16910
  Gene Symbol: ST7
  Gene Name: suppression of tumorigenicity 7
  ENSP ID: ENSP00000377092
MAEAATGFLEQLKSCIVWSWTYLWTVWFFIVLFLVYILRVPLKINDNLSTVSMFLNTLTPKFYVALTGTSSLISGLILIFEWWYFRKYGTSFIEQVSVSHLRPLLGGVDNNSSNNSNSSNGDSDSNRQSVSECKVWRNPLNLFRGAEYNRYTWVTGREPLTYYDMNLSAQDHQTFFTCDSDHLRPADAIMQKAWRERNPQARISAAHEALEINECATAYILLAEEEATTIAEAEKLFKQALKAGDGCYRRSQQLQHHGSQYEAQHRRDTNVLVYIKRRLAMCARRLGRTREAVKMMRDLMKEFPLLSMFNIHENLLEALLELQAYADVQAVLAKYDDISLPKSATICYTAALLKARAVSDKFSPEAASRRGLSTAEMNAVEAIHRAVEFNPHVPKYLLEMKSLILPPEHILKRGDSEAIAYAFFHLAHWKRVEGALNLLHCTWEGTFHEVSVYPKKELPFFILFTAGLCSFTAMLALLTHQFPELMGVFAKAFLSTLFAPLNFVMEKVESILPSSLWHQLTRI

SEQ ID NO: 85059 - protein, 534 aa, Homo sapiens
  Payload ID: 16910
  Gene Symbol: ST7
  Gene Name: suppression of tumorigenicity 7
  ENSP ID: ENSP00000377093
MFGTESSLSMFLNTLTPKFYVALTGTSSLISGLILIFEWWYFRKYGTSFIEQVSVSHLRPLLGGVDNNSSNNSNSSNGDSDSNRQSVSECKVWRNPLNLFRGAEYNRYTWVTGREPLTYYDMNLSAQDHQTFFTCDSDHLRPADAIMQKAWRERNPQARISAAHEALEINEIRSRVEVPLIASSTIWEIKLLPKCATAYILLAEEEATTIAEAEKLFKQALKAGDGCYRRSQQLQHHGSQYEAQHRRDTNVLVYIKRRLAMCARRLGRTREAVKMMRDLMKEFPLLSMFNIHENLLEALLELQAYADVQAVLAKYDDISLPKSATICYTAALLKARAVSDKFSPEAASRRGLSTAEMNAVEAIHRAVEFNPHVPKYLLEMKSLILPPEHILKRGDSEAIAYAFFHLAHWKRVEGALNLLHCTWEGTFRMIPYPLEKGHLFYPYPICTETADRELLPSFHEVSVYPKKELPFFILFTAGLCSFTAMLALLTHQFPELMGVFAKAFLSTLFAPLNFVMEKVESILPSSLWHQLTRI

SEQ ID NO: 85060 - protein, 572 aa, Homo sapiens
  Payload ID: 16910
  Gene Symbol: ST7
  Gene Name: suppression of tumorigenicity 7
  ENSP ID: ENSP00000377095
MAEAATGFLEQLKSCIVWSWTYLWTVWFFIVLFLVYILRVPLKINDNLSTVSMFLNTLTPKFYVALTGTSSLISGLILIFEWWYFRKYGTSFIEQVSVSHLRPLLGGVDNNSSNNSNSSNGDSDSNRQSVSECKVWRNPLNLFRGAEYNRYTWVTGREPLTYYDMNLSAQDHQTFFTCDSDHLRPADAIMQKAWRERNPQARISAAHEALEINEIRSRVEVPLIASSTIWEIKLLPKCATAYILLAEEEATTIAEAEKLFKQALKAGDGCYRRSQQLQHHGSQYEAQHRRDTNVLVYIKRRLAMCARRLGRTREAVKMMRDLMKEFPLLSMFNIHENLLEALLELQAYADVQAVLAKYDDISLPKSATICYTAALLKARAVSDKFSPEAASRRGLSTAEMNAVEAIHRAVEFNPHVPKYLLEMKSLILPPEHILKRGDSEAIAYAFFHLAHWKRVEGALNLLHSFRMIPYPLEKGHLFYPYPICTETADRELLPSFHEVSVYPKKELPFFILFTAGLCSFTAMLALLTHQFPELMGVFAKAFLSTLFAPLNFVMEKVESILPSSLWHQLTRI

SEQ ID NO: 85061 - protein, 554 aa, Homo sapiens
  Payload ID: 16910
  Gene Symbol: ST7
  Gene Name: suppression of tumorigenicity 7
  Uniprot ID: Q9NRC1
  ENSP ID: ENSP00000377097
MAEAATGFLEQLKSCIVWSWTYLWTVWFFIVLFLVYILRVPLKINDNLSTVSMFLNTLTPKFYVALTGTSSLISGLILIFEWWYFRKYGTSFIEQVSVSHLRPLLGGVDNNSSNNSNSSNGDSDSNRQSVSECKVWRNPLNLFRGAEYNRYTWVTGREPLTYYDMNLSAQDHQTFFTCDSDHLRPADAIMQKAWRERNPQARISAAHEALEINECATAYILLAEEEATTIAEAEKLFKQALKAGDGCYRRSQQLQHHGSQYEAQHRRDTNVLVYIKRRLAMCARRLGRTREAVKMMRDLMKEFPLLSMFNIHENLLEALLELQAYADVQAVLAKYDDISLPKSATICYTAALLKARAVSDKFSPEAASRRGLSTAEMNAVEAIHRAVEFNPHVPKYLLEMKSLILPPEHILKRGDSEAIAYAFFHLAHWKRVEGALNLLHCTWEGTFRMIPYPLEKGHLFYPYPICTETADRELLPSFHEVSVYPKKELPFFILFTAGLCSFTAMLALLTHQFPELMGVFAKAFLSTLFAPLNFVMEKVESILPSSLWHQLTRI

SEQ ID NO: 85062 - protein, 138 aa, Homo sapiens
  Payload ID: 16910
  Gene Symbol: ST7
  Gene Name: suppression of tumorigenicity 7
  ENSP ID: ENSP00000388698
MFLNTLTPKFYVALTGTSSLISGLILIFEWWYFRKYGTSFIEQVSVSHLRPLLGGVDNNSSNNSNSSNGDSDSNRQSVSECKVWRNPLNLFRGAEYNRYTWVTGREPLTYYDMNLSAQDHQTFFTCDSDHLRPADAIM

SEQ ID NO: 85063 - protein, 52 aa, Homo sapiens
  Payload ID: 16910
  Gene Symbol: ST7
  Gene Name: suppression of tumorigenicity 7
  ENSP ID: ENSP00000390830
MAEAATGFLEQLKSCIVWSWTYLWTVWFFIVLFLVYILRVPLKINDNLSTDI

SEQ ID NO: 85064 - protein, 62 aa, Homo sapiens
  Payload ID: 16910
  Gene Symbol: ST7
  Gene Name: suppression of tumorigenicity 7
  ENSP ID: ENSP00000391444
MSMFLNTLTPKFYVALTGTSSLISGLILIFEWWYFRKYGTSFIEQVSVSHLRPLLGGVDNNS

SEQ ID NO: 85065 - protein, 64 aa, Homo sapiens
  Payload ID: 16910
  Gene Symbol: ST7
  Gene Name: suppression of tumorigenicity 7
  ENSP ID: ENSP00000392876
MAEAATGFLEQLKSCIVWSWTYLWTVWFFIVLFLVYILRVPLKINDNLSTVNEGVPPSEYVQYP

SEQ ID NO: 85066 - protein, 24 aa, Homo sapiens
  Payload ID: 16910
  Gene Symbol: ST7
  Gene Name: suppression of tumorigenicity 7
  ENSP ID: ENSP00000393040
MFLNTLTPKFYVALTGTSSLISGL

SEQ ID NO: 85067 - protein, 558 aa, Homo sapiens
  Payload ID: 16910
  Gene Symbol: ST7
  Gene Name: suppression of tumorigenicity 7
  ENSP ID: ENSP00000402934
MAEAATGFLEQLKSCIVWSWTYLWTVWFFIVLFLVYILRVPLKINDNLSTVSMFLNTLTPKFYVALTGTSSLISGLILIFEWWYFRKYGTSFIEQVSVSHLRPLLGGVDNNSSNNSNSSNGDSDSNRQSVSECKVWRNPLNLFRGAEYNRYTWVTGREPLTYYDMNLSAQDHQTFFTCDSDHLRPADAIMQKAWRERNPQARISAAHEALEINECATAYILLAEEEATTIAEAEKLFKQALKAGDGCYRRSQQLQHHGSQYEAQHRRDTNVLVYIKRRLAMCARRLGRTREAVKMMRDLMKEFPLLSMFNIHENLLEALLELQAYADVQAVLAKYDDISLPKSATICYTAALLKARAVSDKFSPEAASRRGLSTAEMNAVEAIHRAVEFNPHVPKYLLEMKSLILPPEHILKRGDSEAIAYAFFHLAHWKRVEGALNLLHCTWEGIPQHFVCPLKLCHGESGEHPPIQSVAPANTDLREALSSTHLTRRCHHLLCANSLWTARKHDFEKGKPFRDFKMFMDYSILKAVFVVQNSLMFSSILFCLQKRRKSKIKLLCIT

SEQ ID NO: 85068 - protein, 531 aa, Homo sapiens
  Payload ID: 16910
  Gene Symbol: ST7
  Gene Name: suppression of tumorigenicity 7
  ENSP ID: ENSP00000411118
MDYTVSMFLNTLTPKFYVALTGTSSLISGLILIFEWWYFRKYGTSFIEQVSVSHLRPLLGGVDNNSSNNSNSSNGDSDSNRQSVSECKVWRNPLNLFRGAEYNRYTWVTGREPLTYYDMNLSAQDHQTFFTCDSDHLRPADAIMQKAWRERNPQARISAAHEALEINEIRSRVEVPLIASSTIWEIKLLPKCATAYILLAEEEATTIAEAEKLFKQALKAGDGCYRRSQQLQHHGSQYEAQHRRDTNVLVYIKRRLAMCARRLGRTREAVKMMRDLMKEFPLLSMFNIHENLLEALLELQAYADVQAVLAKYDDISLPKSATICYTAALLKARAVSDKFSPEAASRRGLSTAEMNAVEAIHRAVEFNPHVPKYLLEMKSLILPPEHILKRGDSEAIAYAFFHLAHWKRVEGALNLLHCTWEGTFRMIPYPLEKGHLFYPYPICTETADRELLPSFHEVSVYPKKELPFFILFTAGLCSFTAMLALLTHQFPELMGVFAKAFLSTLFAPLNFVMEKVESILPSSLWHQLTRI

SEQ ID NO: 85069 - protein, 87 aa, Homo sapiens
  Payload ID: 16910
  Gene Symbol: ST7
  Gene Name: suppression of tumorigenicity 7
  ENSP ID: ENSP00000413601
MSMFLNTLTPKFYVALTGTSSLISGLILIFEWWYFRKYGTSFIEQVSVSHLRPLLGGVDNNSSNNSNSSNGDSDSNRQSVSECKVWR

SEQ ID NO: 85070 - protein, 508 aa, Homo sapiens
  Payload ID: 16910
  Gene Symbol: ST7
  Gene Name: suppression of tumorigenicity 7
  ENSP ID: ENSP00000414031
MDYTVSMFLNTLTPKFYVALTGTSSLISGLILIFEWWYFRKYGTSFIEQVSVSHLRPLLGGVDNNSSNNSNSSNGDSDSNRQSVSECKVWRNPLNLFRGAEYNRYTWVTGREPLTYYDMNLSAQDHQTFFTCDSDHLRPADAIMQKAWRERNPQARISAAHEALEINECATAYILLAEEEATTIAEAEKLFKQALKAGDGCYRRSQQLQHHGSQYEAQHRRDTNVLVYIKRRLAMCARRLGRTREAVKMMRDLMKEFPLLSMFNIHENLLEALLELQAYADVQAVLAKYDDISLPKSATICYTAALLKARAVSDKFSPEAASRRGLSTAEMNAVEAIHRAVEFNPHVPKYLLEMKSLILPPEHILKRGDSEAIAYAFFHLAHWKRVEGALNLLHCTWEGTFRMIPYPLEKGHLFYPYPICTETADRELLPSFHEVSVYPKKELPFFILFTAGLCSFTAMLALLTHQFPELMGVFAKAFLSTLFAPLNFVMEKVESILPSSLWHQLTRI

SEQ ID NO: 85071 - protein, 79 aa, Homo sapiens
  Payload ID: 16910
  Gene Symbol: ST7
  Gene Name: suppression of tumorigenicity 7
  ENSP ID: ENSP00000416858
MFLNTLTPKFYVALTGTSSLISGLILIFEWWYFRKYGTSFIEQVSVSHLRPLLGGVDNNSSNNSNSSNGDSDSNRQSVS

SEQ ID NO: 85072 - protein, 561 aa, Homo sapiens
  Payload ID: 16910
  Gene Symbol: ST7
  Gene Name: suppression of tumorigenicity 7
  ENSP ID: ENSP00000419516
MFLNTLTPKFYVALTGTSSLISGLILIFEWWYFRKYGTSFIEQVSVSHLRPLLGGVDNNSSNNSNSSNGDSDSNRQSVSECKVWRNPLNLFRGAEYNRYTWVTGREPLTYYDMNLSAQDHQTFFTCDSDHLRPADAIMQKAWRERNPQARISAAHEALEINEIRSRVEVPLIASSTIWEIKLLPKCATAYILLAEEEATTIAEAEKLFKQALKAGDGCYRRSQQLQHHGSQYEAQHRRDTNVLVYIKRRLAMCARRLGRTREAVKMMRDLMKEFPLLSMFNIHENLLEALLELQAYADVQAVLAKYDDISLPKSATICYTAALLKARAVSDKFSPEAASRRGLSTAEMNAVEAIHRAVEFNPHVPKYLLEMKSLILPPEHILKRGDSEAIAYAFFHLAHWKRVEGALNLLHCTWEGTFRMIPYPLEKGHLFYPYPICTETADRELLPFPQHFVCPLKLCHGESGEHPPIQSVAPANTDLREALSSTHLTRRCHHLLCANSLWTARKHDFEKGKPFRDFKMFMDYSILKAVFVVQNSLMFSSILFCLQKRRKSKIKLLCITA

SEQ ID NO: 85073 - protein, 97 aa, Homo sapiens
  Payload ID: 16910
  Gene Symbol: ST7
  Gene Name: suppression of tumorigenicity 7
  ENSP ID: ENSP00000419715
MFLNTLTPKFYVALTGTSSLISGLILIFEWWYFRKYGTSFIEQVSVSHLRPLLGGVDNNSSNNSNSSNGDSDSNRQSVSECKVWRNPLNLFRGAEYN

SEQ ID NO: 85074 - protein, 251 aa, Homo sapiens
  Payload ID: 16910
  Gene Symbol: ST7
  Gene Name: suppression of tumorigenicity 7
  ENSP ID: ENSP00000420052
MFGTESSLSMFLNTLTPKFYVALTGTSSLISGLILIFEWWYFRKYGTSFIEQVSVSHLRPLLGGVDNNSSNNSNSSNGDSDSNRQSVSECKVWRNPLNLFRGAEYNRYTWVTGREPLTYYDMNLSAQDHQTFFTCDSDHLRPADAIMQKAWRERNPQARISAAHEALEINECATAYILLAEEEATTIAEAEKLFKQALKAGDGCYRRSQQLQHHGSQYEAQHSKVSCRLMHWGIRIVKIINQSKFLVQFKI

SEQ ID NO: 85075 - protein, 555 aa, Homo sapiens
  Payload ID: 16911
  Gene Symbol: ST7L
  Gene Name: suppression of tumorigenicity 7 like
  Uniprot ID: Q8TDW4
  ENSP ID: ENSP00000345312
MADRGGVGEAAAVGASPASVPGLNPTLGWRERLRAGLAGTGASLWFVAGLGLLYALRIPLRLCENLAAVTVFLNSLTPKFYVALTGTSSLISGLIFIFEWWYFHKHGTSFIEQVSVSHLQPLMGGTESSISEPGSPSRNRENETSRQNLSECKVWRNPLNLFRGAEYRRYTWVTGKEPLTYYDMNLSAQDHQTFFTCDTDFLRPSDTVMQKAWRERNPPARIKAAYQALELNNDCATAYVLLAEEEATTIVDAERLFKQALKAGETIYRQSQQCQHQSPQHEAQLRRDTNVLVYIKRRLAMCARKLGRIREAVKIMRDLMKEFPPLTMLNIHENLLESLLELQAYPDVQAVLAKYDDISLPKSAAICYTAALLKTRTVSEKFSPETASRRGLSTAEINAVEAIHRAVEFNPHVPKYLLEMKSLILPPEHILKRGDSEAIAYAFFHLQHWKRIEGALNLLQCTWEGTFRMIPYPLEKGHLFYPYPSCTETADRELLPTFHHVSVYPKKELPLFIHFTAGFCSSTAMIAILTHQFPEIMGIFAKAVSMISRTCVDYL

SEQ ID NO: 85076 - protein, 575 aa, Homo sapiens
  Payload ID: 16911
  Gene Symbol: ST7L
  Gene Name: suppression of tumorigenicity 7 like
  Uniprot ID: Q8TDW4
  ENSP ID: ENSP00000350734
MADRGGVGEAAAVGASPASVPGLNPTLGWRERLRAGLAGTGASLWFVAGLGLLYALRIPLRLCENLAAVTVFLNSLTPKFYVALTGTSSLISGLIFIFEWWYFHKHGTSFIEQVSVSHLQPLMGGTESSISEPGSPSRNRENETSRQNLSECKVWRNPLNLFRGAEYRRYTWVTGKEPLTYYDMNLSAQDHQTFFTCDTDFLRPSDTVMQKAWRERNPPARIKAAYQALELNNDCATAYVLLAEEEATTIVDAERLFKQALKAGETIYRQSQQCQHQSPQHEAQLRRDTNVLVYIKRRLAMCARKLGRIREAVKIMRDLMKEFPPLTMLNIHENLLESLLELQAYPDVQAVLAKYDDISLPKSAAICYTAALLKTRTVSEKFSPETASRRGLSTAEINAVEAIHRAVEFNPHVPKYLLEMKSLILPPEHILKRGDSEAIAYAFFHLQHWKRIEGALNLLQCTWEGTFRMIPYPLEKGHLFYPYPSCTETADRELLPTFHHVSVYPKKELPLFIHFTAGFCSSTAMIAILTHQFPEIMGIFAKAVLGLWCPQPWASSGFEENTQDLKSEDLGLSSG

SEQ ID NO: 85077 - protein, 544 aa, Homo sapiens
  Payload ID: 16911
  Gene Symbol: ST7L
  Gene Name: suppression of tumorigenicity 7 like
  Uniprot ID: Q8TDW4
  ENSP ID: ENSP00000353972
MADRGGVGEAAAVGASPASVPGLNPTLGWRERLRAGLAGTGASLWFVAGLGLLYALRIPLRLCENLAAVTVFLNSLTPKFYVALTGTSSLISGLIFIFEWWYFHKHGTSFIEQVSVSHLQPLMGGTESSISEPGSPSRNRENETSRQNLSECKVWRNPLNLFRGAEYRRYTWVTGKEPLTYYDMNLSAQDHQTFFTCDTDFLRPSDTVMQKAWRERNPPARIKAAYQALELNNDCATAYVLLAEEEATTIVDAERLFKQALKAGETIYRQSQQCQHQSPQHEAQLRRDTNVLVYIKRRLAMCARKLGRIREAVKIMRDLMKEFPPLTMLNIHENLLESLLELQAYPDVQAVLAKYDDISLPKSAAICYTAALLKTRTVSEKFSPETASRRGLSTAEINAVEAIHRAVEFNPHVPKYLLEMKSLILPPEHILKRGDSEAIAYAFFHLQHWKRIEGALNLLQCTWEGTFHHVSVYPKKELPLFIHFTAGFCSSTAMIAILTHQFPEIMGIFAKAVLGLWCPQPWASSGFEENTQDLKSEDLGLSSG

SEQ ID NO: 85078 - protein, 229 aa, Homo sapiens
  Payload ID: 16911
  Gene Symbol: ST7L
  Gene Name: suppression of tumorigenicity 7 like
  ENSP ID: ENSP00000358678
MSPFLFRDDMKDLTVFLNSLTPKFYVALTGTSSLISGLIFIFEWWYFHKHGTSFIEQVSVSHLQPLMGGTESSISEPGSPSRNRENETSRQNLSECKVWRNPLNLFRGAEYRRYTWVTGKEPLTYYDMNLSAQDHQTFFTCDTDFLRPSDTVMQKAWRERNPPARIKAAYQALELNNDCATAYVLLAEEEATTIVDAERLFKQALKAGETIYRQSQQCQHQSPQHEAQL

SEQ ID NO: 85079 - protein, 538 aa, Homo sapiens
  Payload ID: 16911
  Gene Symbol: ST7L
  Gene Name: suppression of tumorigenicity 7 like
  Uniprot ID: Q8TDW4
  ENSP ID: ENSP00000358680
MADRGGVGEAAAVGASPASVPGLNPTLGWRERLRAGLAGTGASLWFVAGLGLLYALRIPLRLCENLAAGTSSLISGLIFIFEWWYFHKHGTSFIEQVSVSHLQPLMGGTESSISEPGSPSRNRENETSRQNLSECKVWRNPLNLFRGAEYRRYTWVTGKEPLTYYDMNLSAQDHQTFFTCDTDFLRPSDTVMQKAWRERNPPARIKAAYQALELNNDCATAYVLLAEEEATTIVDAERLFKQALKAGETIYRQSQQCQHQSPQHEAQLRRDTNVLVYIKRRLAMCARKLGRIREAVKIMRDLMKEFPPLTMLNIHENLLESLLELQAYPDVQAVLAKYDDISLPKSAAICYTAALLKTRTVSEKFSPETASRRGLSTAEINAVEAIHRAVEFNPHVPKYLLEMKSLILPPEHILKRGDSEAIAYAFFHLQHWKRIEGALNLLQCTWEGTFRMIPYPLEKGHLFYPYPSCTETADRELLPTFHHVSVYPKKELPLFIHFTAGFCSSTAMIAILTHQFPEIMGIFAKAVSMISRTCVDYL

SEQ ID NO: 85080 - protein, 392 aa, Homo sapiens
  Payload ID: 16911
  Gene Symbol: ST7L
  Gene Name: suppression of tumorigenicity 7 like
  Uniprot ID: Q8TDW4
  ENSP ID: ENSP00000358683
MNLSAQDHQTFFTCDTDFLRPSDTVMQKAWRERNPPARIKAAYQALELNNDCATAYVLLAEEEATTIVDAERLFKQALKAGETIYRQSQQCQHQSPQHEAQLRRDTNVLVYIKRRLAMCARKLGRIREAVKIMRDLMKEFPPLTMLNIHENLLESLLELQAYPDVQAVLAKYDDISLPKSAAICYTAALLKTRTVSEKFSPETASRRGLSTAEINAVEAIHRAVEFNPHVPKYLLEMKSLILPPEHILKRGDSEAIAYAFFHLQHWKRIEGALNLLQCTWEGTFRMIPYPLEKGHLFYPYPSCTETADRELLPTFHHVSVYPKKELPLFIHFTAGFCSSTAMIAILTHQFPEIMGIFAKAVLGLWCPQPWASSGFEENTQDLKSEDLGLSSG

SEQ ID NO: 85081 - protein, 287 aa, Homo sapiens
  Payload ID: 16911
  Gene Symbol: ST7L
  Gene Name: suppression of tumorigenicity 7 like
  ENSP ID: ENSP00000413718
  MOD_RES (1)..(1): Any amino acid
XISEPGSPSRNRENETSRQNLSECKVWRNPLNLFRGAEYRRYTWVTGKEPLTYYDMNLSAQDHQTFFTCDTDFLRPSDTVMQKAWRERNPPARIKAAYQALELNNDCATAYVLLAEEEATTIVDAERLFKQALKAGETIYRQSQQCQHQSPQHEAQLRRDTNVLVYIKRRLAMCARKLGRIREAVKIMRDYLLEMKSLILPPEHILKRGDSEAIAYAFFHLQHWKRIEGALNLLQCTWEGTFHHVSVYPKKELPLFIHFTAGFCSSTAMIAILTHQFPEIMGIFAKA

SEQ ID NO: 85082 - protein, 558 aa, Homo sapiens
  Payload ID: 16911
  Gene Symbol: ST7L
  Gene Name: suppression of tumorigenicity 7 like
  Uniprot ID: Q8TDW4
  ENSP ID: ENSP00000417140
MADRGGVGEAAAVGASPASVPGLNPTLGWRERLRAGLAGTGASLWFVAGLGLLYALRIPLRLCENLAAGTSSLISGLIFIFEWWYFHKHGTSFIEQVSVSHLQPLMGGTESSISEPGSPSRNRENETSRQNLSECKVWRNPLNLFRGAEYRRYTWVTGKEPLTYYDMNLSAQDHQTFFTCDTDFLRPSDTVMQKAWRERNPPARIKAAYQALELNNDCATAYVLLAEEEATTIVDAERLFKQALKAGETIYRQSQQCQHQSPQHEAQLRRDTNVLVYIKRRLAMCARKLGRIREAVKIMRDLMKEFPPLTMLNIHENLLESLLELQAYPDVQAVLAKYDDISLPKSAAICYTAALLKTRTVSEKFSPETASRRGLSTAEINAVEAIHRAVEFNPHVPKYLLEMKSLILPPEHILKRGDSEAIAYAFFHLQHWKRIEGALNLLQCTWEGTFRMIPYPLEKGHLFYPYPSCTETADRELLPTFHHVSVYPKKELPLFIHFTAGFCSSTAMIAILTHQFPEIMGIFAKAVLGLWCPQPWASSGFEENTQDLKSEDLGLSSG

SEQ ID NO: 85083 - protein, 555 aa, Homo sapiens
  Payload ID: 16911
  Gene Symbol: ST7L
  Gene Name: suppression of tumorigenicity 7 like
  Uniprot ID: Q8TDW4
  ENSP ID: ENSP00000436499
MADRGGVGEAAAVGASPASVPGLNPTLGWRERLRAGLAGTGASLWFVAGLGLLYALRIPLRLCENLAAVTVFLNSLTPKFYVALTGTSSLISGLIFIFEWWYFHKHGTSFIEQVSVSHLQPLMGGTESSISEPGSPSRNRENETSRQNLSECKVWRNPLNLFRGAEYRRYTWVTGKEPLTYYDMNLSAQDHQTFFTCDTDFLRPSDTVMQKAWRERNPPARIKAAYQALELNNDCATAYVLLAEEEATTIVDAERLFKQALKAGETIYRQSQQCQHQSPQHEAQLRRDTNVLVYIKRRLAMCARKLGRIREAVKIMRDLMKEFPPLTMLNIHENLLESLLELQAYPDVQAVLAKYDDISLPKSAAICYTAALLKTRTVSEKFSPETASRRGLSTAEINAVEAIHRAVEFNPHVPKYLLEMKSLILPPEHILKRGDSEAIAYAFFHLQHWKRIEGALNLLQCTWEGTFRMIPYPLEKGHLFYPYPSCTETADRELLPTFHHVSVYPKKELPLFIHFTAGFCSSTAMIAILTHQFPEIMGIFAKAVVGVKTQKENAD

SEQ ID NO: 85084 - protein, 555 aa, Homo sapiens; identical to SEQ ID NO: 85083
  Payload ID: 16911
  Gene Symbol: ST7L
  Gene Name: suppression of tumorigenicity 7 like
  Uniprot ID: Q8TDW4
  ENSP ID: ENSP00000436544

SEQ ID NO: 85085 - protein, 147 aa, Homo sapiens
  Payload ID: 16912
  Gene Symbol: SAPCD1
  Gene Name: suppressor APC domain containing 1
  ENSP ID: ENSP00000372692
MGSQGSGGVPLVQAPYTVLLLPLGTSRQDPGAQSFFLWLRRMQALEREQDALWQGLELLQHGQAWFEDHLREAQRQQLHLGALGENFLTDLHSEPGRPPLAQIQKVNICLQNLIHEKLSRQQKGVTQPKEEMAQRGCTKGPRGPTRV

SEQ ID NO: 85086 - protein, 178 aa, Homo sapiens
  Payload ID: 16912
  Gene Symbol: SAPCD1
  Gene Name: suppressor APC domain containing 1
  Uniprot ID: Q5SSQ6
  ENSP ID: ENSP00000387942
MGSQGSGGVPLVQAPYTVLLLPLGTSRQDPGAQSFFLWLRRMQALEREQDALWQGLELLQHGQAWFEDHLREAQRQQLHLGALGENFLTDLHSEPGRPPLAQIQKVNICLQNLIHEKFSPSPLNKASSCTTQDSKERRREQNLWQQQELSRQQKGVTQPKEEMAQRGCTKGPRGPTRV

SEQ ID NO: 85087 - protein, 178 aa, Homo sapiens; identical to SEQ ID NO: 85086
  Payload ID: 16912
  Gene Symbol: SAPCD1
  Gene Name: suppressor APC domain containing 1
  Uniprot ID: Q5SSQ6
  ENSP ID: ENSP00000403346

SEQ ID NO: 85088 - protein, 178 aa, Homo sapiens; identical to SEQ ID NO: 85086
  Payload ID: 16912
  Gene Symbol: SAPCD1
  Gene Name: suppressor APC domain containing 1
  Uniprot ID: Q5SSQ6
  ENSP ID: ENSP00000403687

SEQ ID NO: 85089 - protein, 178 aa, Homo sapiens; identical to SEQ ID NO: 85086
  Payload ID: 16912
  Gene Symbol: SAPCD1
  Gene Name: suppressor APC domain containing 1
  Uniprot ID: Q5SSQ6
  ENSP ID: ENSP00000404105

SEQ ID NO: 85090 - protein, 178 aa, Homo sapiens; identical to SEQ ID NO: 85086
  Payload ID: 16912
  Gene Symbol: SAPCD1
  Gene Name: suppressor APC domain containing 1
  Uniprot ID: Q5SSQ6
  ENSP ID: ENSP00000405513

SEQ ID NO: 85091 - protein, 117 aa, Homo sapiens
  Payload ID: 16912
  Gene Symbol: SAPCD1
  Gene Name: suppressor APC domain containing 1
  ENSP ID: ENSP00000408918
MGSQGSGGVPLVQAPYTVLLLPLGTSRQDPGAQSFFLWLRRMQALEREQDALWQGLELLQHGQAWFEDHLREAQRQQLHLGALGENFLTDLHSEPGRPPLAQIQKVNICLQNLIHEK

SEQ ID NO: 85092 - protein, 147 aa, Homo sapiens; identical to SEQ ID NO: 85085
  Payload ID: 16912
  Gene Symbol: SAPCD1
  Gene Name: suppressor APC domain containing 1
  ENSP ID: ENSP00000410585

SEQ ID NO: 85093 - protein, 178 aa, Homo sapiens; identical to SEQ ID NO: 85086
  Payload ID: 16912
  Gene Symbol: SAPCD1
  Gene Name: suppressor APC domain containing 1
  Uniprot ID: Q5SSQ6
  ENSP ID: ENSP00000411948

SEQ ID NO: 85094 - protein, 147 aa, Homo sapiens; identical to SEQ ID NO: 85085
  Payload ID: 16912
  Gene Symbol: SAPCD1
  Gene Name: suppressor APC domain containing 1
  ENSP ID: ENSP00000412154

SEQ ID NO: 85095 - protein, 148 aa, Homo sapiens; identical to SEQ ID NO: 53046
  Payload ID: 16912
  Gene Symbol: SAPCD1
  Gene Name: suppressor APC domain containing 1
  Uniprot ID: Q5SSQ6
  ENSP ID: ENSP00000413372

SEQ ID NO: 85096 - protein, 147 aa, Homo sapiens; identical to SEQ ID NO: 85085
  Payload ID: 16912
  Gene Symbol: SAPCD1
  Gene Name: suppressor APC domain containing 1
  ENSP ID: ENSP00000414539

SEQ ID NO: 85097 - protein, 147 aa, Homo sapiens; identical to SEQ ID NO: 85085
  Payload ID: 16912
  Gene Symbol: SAPCD1
  Gene Name: suppressor APC domain containing 1
  ENSP ID: ENSP00000414654

SEQ ID NO: 85098 - protein, 148 aa, Homo sapiens; identical to SEQ ID NO: 53046
  Payload ID: 16912
  Gene Symbol: SAPCD1
  Gene Name: suppressor APC domain containing 1
  Uniprot ID: Q5SSQ6
  ENSP ID: ENSP00000450257

SEQ ID NO: 85099 - protein, 394 aa, Homo sapiens
  Payload ID: 16913
  Gene Symbol: SAPCD2
  Gene Name: suppressor APC domain containing 2
  Uniprot ID: Q86UD0
  ENSP ID: ENSP00000386348
MAGAAMAERGRVPPPAPAPSTEGLPRAFLQSLRTLFDILDDRRRGCVHLREIESRWQGTDARELPRGVLEGLRQVAPASGYLTFERFVAGLRTSLLSADGGPRDPTRAPARPGDQPPPPPQRLVFAPADEPRTVLERKPLPLGVRAPLAGPSAAARSPEQLCAPAEAAPCPAEPERSQSAALEPSSSADAGAVACRALEADSGDARRAPRARGERRRHTIASGVDCGLLKQMKELEQEKEVLLQGLEMMARGRDWYQQQLQRVQERQRRLGQSRASADFGAAGSPRPLGRLLPKVQEVARCLGELLAAACASRALPPSSSGPPCPALTSTSPPVWQQQTILMLKEQNRLLTQEVTEKSERITQLEQEKSALIKQLFEARALSQQDGGPLDSTFI

SEQ ID NO: 85100 - protein, 606 aa, Homo sapiens
  Payload ID: 16914
  Gene Symbol: SCAI
  Gene Name: suppressor of cancer cell invasion
  Uniprot ID: Q8N9R8
  ENSP ID: ENSP00000336756
MVRGARQPQQPRSRLAPRLTGTVEKPPRKRRSRTEFALKEIMSSGGAEDDIPQGERKTVTDFCYLLDKSKQLFNGLRDLPQYGQKQWQSYFGRTFDVYTKLWKFQQQHRQVLDNRYGLKRWQIGEIASKIGQLYYHYYLRTSETSYLNEAFSFYSAIRQRSYYSQVNKEDRPELVVKKLRYYARFIVVCLLLNKMDVVKDLVKELSDEIEDYTHRFNTEDQVEWNLVLQEVAAFIEADPVMVLNDDNTIVITSNRLAETGAPLLEQGMIVGQLSLADALIIGNCNNQVKFSELTVDMFRMLQALEREPMNLASQMNKPGMQESADKPTRRENPHKYLLYKPTFSQLYTFLAASFKELPANSVLLIYLSATGVFPTGRSDSEGPYDFGGVLTNSNRDIINGDAIHKRNQSHKEMHCLHPGDLYPFTRKPLFIIVDSSNSVAYKNFTNLFGQPLVCLLSPTAYPKALQDQSQRGSLFTLFLNNPLMAFLFVSGLSSMRRGLWEKCQEYLRKINRDIAQLLTHSRSIDQAFLQFFGDEFLRLLLTRFIFCSATMRMHKIFRETRNYPESYPQLPRDETVENPHLQKHILELASILDVRNVFFENTIDDY

SEQ ID NO: 85101 - protein, 629 aa, Homo sapiens
  Payload ID: 16914
  Gene Symbol: SCAI
  Gene Name: suppressor of cancer cell invasion
  Uniprot ID: Q8N9R8
  ENSP ID: ENSP00000362650
MVRGARQPQQPRSRLAPRLTGTVEKPPRKRRSSIRGSGDSSHSQSQGERYQHFTEKTEFALKEIMSSGGAEDDIPQGERKTVTDFCYLLDKSKQLFNGLRDLPQYGQKQWQSYFGRTFDVYTKLWKFQQQHRQVLDNRYGLKRWQIGEIASKIGQLYYHYYLRTSETSYLNEAFSFYSAIRQRSYYSQVNKEDRPELVVKKLRYYARFIVVCLLLNKMDVVKDLVKELSDEIEDYTHRFNTEDQVEWNLVLQEVAAFIEADPVMVLNDDNTIVITSNRLAETGAPLLEQGMIVGQLSLADALIIGNCNNQVKFSELTVDMFRMLQALEREPMNLASQMNKPGMQESADKPTRRENPHKYLLYKPTFSQLYTFLAASFKELPANSVLLIYLSATGVFPTGRSDSEGPYDFGGVLTNSNRDIINGDAIHKRNQSHKEMHCLHPGDLYPFTRKPLFIIVDSSNSVAYKNFTNLFGQPLVCLLSPTAYPKALQDQSQRGSLFTLFLNNPLMAFLFVSGLSSMRRGLWEKCQEYLRKINRDIAQLLTHSRSIDQAFLQFFGDEFLRLLLTRFIFCSATMRMHKIFRETRNYPESYPQLPRDETVENPHLQKHILELASILDVRNVFFENTIDDY

SEQ ID NO: 85102 - protein, 88 aa, Homo sapiens
  Payload ID: 16914
  Gene Symbol: SCAI
  Gene Name: suppressor of cancer cell invasion
  ENSP ID: ENSP00000418148
  MOD_RES (1)..(1): Any amino acid
XKRNQSHKEMHCLHPGDLYPFTRKPLFIIVDSSNSVAYKNFTNLFGQPLVCLLSPTAYPKALQVLMSLCGRWHFTATSQPEVLSADIV

SEQ ID NO: 85103 - protein, 32 aa, Homo sapiens
  Payload ID: 16914
  Gene Symbol: SCAI
  Gene Name: suppressor of cancer cell invasion
  ENSP ID: ENSP00000419358
NFTNLFGQPLVCLLSPTAYPKALQGTGSHHVA

SEQ ID NO: 85104 - protein, 490 aa, Homo sapiens
  Payload ID: 16914
  Gene Symbol: SCAI
  Gene Name: suppressor of cancer cell invasion
  ENSP ID: ENSP00000419576
MVRGARQPQQPRSRLAPRLTGTVEKPPRKRRSRTEFALKEIMSSGGAEDDIPQGERKTVTDFCYLLDKSKQLFNGLRDLPQYGQKQWQSYFGRTFDVYTKLWKFQQQHRQVLDNRYGLKRWQIGEIASKIGQLYYHYYLRTSETSYLNEAFSFYSAIRQRSYYSQVNKEDRPELVVKKLRYYARFIVVCLLLNKMDVVKDLVKELSDEIEDYTHRFNTEDQVEWNLVLQEVAAFIEADPVMVLNDDNTIVITSNRLAETGAPLLEQGMIVGQLSLADALIIGNCNNQVKFSELTVDMFRMLQALEREPMNLASQMNKPGMQESADKPTRRENPHKYLLYKPTFSQLYTFLAASFKELPANSVLLIYLSATGVFPTGRSDSEGPYDFGGVLTNSNRDIINGDAIHKRNQSHKEMHCLHPGDLYPFTRKPLFIIVDSSNSVAYKNFTNLFGQPLVCLLSPTAYPKALQACAEAYGKSVKNIFEKSTVILPSY

SEQ ID NO: 85105 - protein, 211 aa, Homo sapiens
  Payload ID: 16915
  Gene Symbol: SOCS1
  Gene Name: suppressor of cytokine signaling 1
  Uniprot ID: O15524
  ENSP ID: ENSP00000329418
MVAHNQVAADNAVSTAAEPRRRPEPSSSSSSSPAAPARPRPCPAVPAPAPGDTHFRTFRSHADYRRITRASALLDACGFYWGPLSVHGAHERLRAEPVGTFLVRDSRQRNCFFALSVKMASGPTSIRVHFQAGRFHLDGSRESFDCLFELLEHYVAAPRRMLGAPLRQRRVRPLQELCRQRIVATVGRENLARIPLNPVLRDYLSSFPFQI

SEQ ID NO: 85106 - protein, 198 aa, Homo sapiens
  Payload ID: 16916
  Gene Symbol: SOCS2
  Gene Name: suppressor of cytokine signaling 2
  Uniprot ID: O14508
  ENSP ID: ENSP00000339428
MTLRCLEPSGNGGEGTRSQWGTAGSAEEPSPQAARLAKALRELGQTGWYWGSMTVNEAKEKLKEAPEGTFLIRDSSHSDYLLTISVKTSAGPTNLRIEYQDGKFRLDSIICVKSKLKQFDSVVHLIDYYVQMCKDKRTGPEAPRNGTVHLYLTKPLYTSAPSLQHLCRLTINKCTGAIWGLPLPTRLKDYLEEYKFQV

SEQ ID NO: 85107 - protein, 198 aa, Homo sapiens; identical to SEQ ID NO: 85106
  Payload ID: 16916
  Gene Symbol: SOCS2
  Gene Name: suppressor of cytokine signaling 2
  Uniprot ID: O14508
  ENSP ID: ENSP00000442898

SEQ ID NO: 85108 - protein, 198 aa, Homo sapiens; identical to SEQ ID NO: 85106
  Payload ID: 16916
  Gene Symbol: SOCS2
  Gene Name: suppressor of cytokine signaling 2
  Uniprot ID: O14508
  ENSP ID: ENSP00000447161

SEQ ID NO: 85109 - protein, 142 aa, Homo sapiens
  Payload ID: 16916
  Gene Symbol: SOCS2
  Gene Name: suppressor of cytokine signaling 2
  ENSP ID: ENSP00000447902
MTLRCLEPSGNGGEGTRSQWGTAGSAEEPSPQAARLAKALRELGQTGWYWGSMTVNEAKEKLKEAPEGTFLIRDSSHSDYLLTISVKTSAGPTNLRIEYQDGKFRLDSIICVKSKLKQFDSVVHLIDYYVQMCKDKRTGPEA

SEQ ID NO: 85110 - protein, 161 aa, Homo sapiens
  Payload ID: 16916
  Gene Symbol: SOCS2
  Gene Name: suppressor of cytokine signaling 2
  ENSP ID: ENSP00000448611
MTLRCLEPSGNGGEGTRSQWGTAGSAEEPSPQAARLAKALRELGQTGWYWGSMTVNEAKEKLKEAPEGTFLIRDSSHSDYLLTISVKTSAGPTNLRIEYQDGKFRLDSIICVKSKLKQFDSVVHLIDYYVQMCKDKRTGPEAPRNGTVHLYLTKPLYTSAP

SEQ ID NO: 85111 - protein, 102 aa, Homo sapiens
  Payload ID: 16916
  Gene Symbol: SOCS2
  Gene Name: suppressor of cytokine signaling 2
  ENSP ID: ENSP00000448709
MTLRCLEPSGNGGEGTRSQWGTAGSAEEPSPQAARLAKALRELGQTGREPIGRDACGRERLPKEAARKRGRGGKQRIRWKYVPCFQGTAESTLAGSWVLGNA

SEQ ID NO: 85112 - protein, 198 aa, Homo sapiens; identical to SEQ ID NO: 85106
  Payload ID: 16916
  Gene Symbol: SOCS2
  Gene Name: suppressor of cytokine signaling 2
  Uniprot ID: O14508
  ENSP ID: ENSP00000448815

SEQ ID NO: 85113 - protein, 198 aa, Homo sapiens; identical to SEQ ID NO: 85106
  Payload ID: 16916
  Gene Symbol: SOCS2
  Gene Name: suppressor of cytokine signaling 2
  Uniprot ID: O14508
  ENSP ID: ENSP00000449227

SEQ ID NO: 85114 - protein, 2 aa, Homo sapiens
  Payload ID: 16916
  Gene Symbol: SOCS2
  Gene Name: suppressor of cytokine signaling 2
  ENSP ID: ENSP00000473902
MT

SEQ ID NO: 85115 - protein, 116 aa, Homo sapiens
  Payload ID: 16916
  Gene Symbol: SOCS2
  Gene Name: suppressor of cytokine signaling 2
  ENSP ID: ENSP00000474805
  MOD_RES (1)..(1): Any amino acid
XYVQMCKDKRTGPEAPRNGTVHLYLTKPLYTSAPSLQHLCRLTINKCTGAIWGLPLPTRLKDYLEEYKFQVQAPVGEKELLIGILKKWEGTKLTQASLQFDMPADQSLLGILYFAF

SEQ ID NO: 85116 - protein, 46 aa, Homo sapiens
  Payload ID: 16916
  Gene Symbol: SOCS2
  Gene Name: suppressor of cytokine signaling 2
  ENSP ID: ENSP00000474888
  MOD_RES (1)..(1): Any amino acid
XAPSLQHLCRLTINKCTGAIWGLPLPTRLKDYLEEYKFQPAVFYPG

SEQ ID NO: 85117 - protein, 198 aa, Homo sapiens; identical to SEQ ID NO: 85106
  Payload ID: 16916
  Gene Symbol: SOCS2
  Gene Name: suppressor of cytokine signaling 2
  Uniprot ID: O14508
  ENSP ID: ENSP00000481249

SEQ ID NO: 85118 - protein, 225 aa, Homo sapiens
  Payload ID: 16917
  Gene Symbol: SOCS3
  Gene Name: suppressor of cytokine signaling 3
  Uniprot ID: O14543
  ENSP ID: ENSP00000330341
MVTHSKFPAAGMSRPLDTSLRLKTFSSKSEYQLVVNAVRKLQESGFYWSAVTGGEANLLLSAEPAGTFLIRDSSDQRHFFTLSVKTQSGTKNLRIQCEGGSFSLQSDPRSTQPVPRFDCVLKLVHHYMPPPGAPSFPSPPTEPSSEVPEQPSAQPLPGSPPRRAYYIYSGGEKIPLVLSRPLSSNVATLQHLCRKTVNGHLDSYEKVTQLPGPIREFLDQYDAPL

SEQ ID NO: 85119 - protein, 15 aa, Homo sapiens
  Payload ID: 16917
  Gene Symbol: SOCS3
  Gene Name: suppressor of cytokine signaling 3
  ENSP ID: ENSP00000464727
MVTHSKFPAAGMSRP

SEQ ID NO: 85120 - protein, 440 aa, Homo sapiens
  Payload ID: 16918
  Gene Symbol: SOCS4
  Gene Name: suppressor of cytokine signaling 4
  Uniprot ID: Q8WXH5
  ENSP ID: ENSP00000341327
MAENNENISKNVDVRPKTSRSRSADRKDGYVWSGKKLSWSKKSESYSDAETVNGIEKTEVSLRNQERKHSCSSIELDLDHSCGHRFLGRSLKQKLQDAVGQCFPIKNCSSRHSSGLPSKRKIHISELMLDKCPFPPRSDLAFRWHFIKRHTAPINSKSDEWVSTDLSQTELRDGQLKRRNMEENINCFSHTNVQPCVITTDNALCREGPMTGSVMNLVSNNSIEDSDMDSDDEILTLCTSSRKRNKPKWDLDDEILQLETPPKYHTQIDYVHCLVPDLLQINNNPCYWGVMDKYAAEALLEGKPEGTFLLRDSAQEDYLFSVSFRRYSRSLHARIEQWNHNFSFDAHDPCVFHSPDITGLLEHYKDPSACMFFEPLLSTPLIRTFPFSLQHICRTVICNCTTYDGIDALPIPSSMKLYLKEYHYKSKVRVLRIDAPEQQC

SEQ ID NO: 85121 - protein, 440 aa, Homo sapiens; identical to SEQ ID NO: 85120
  Payload ID: 16918
  Gene Symbol: SOCS4
  Gene Name: suppressor of cytokine signaling 4
  Uniprot ID: Q8WXH5
  ENSP ID: ENSP00000378855

SEQ ID NO: 85122 - protein, 440 aa, Homo sapiens; identical to SEQ ID NO: 85120
  Payload ID: 16918
  Gene Symbol: SOCS4
  Gene Name: suppressor of cytokine signaling 4
  Uniprot ID: Q8WXH5
  ENSP ID: ENSP00000452522

SEQ ID NO: 85123 - protein, 536 aa, Homo sapiens
  Payload ID: 16919
  Gene Symbol: SOCS5
  Gene Name: suppressor of cytokine signaling 5
  Uniprot ID: O75159
  ENSP ID: ENSP00000305133
MDKVGKMWNNFKYRCQNLFGHEGGSRSENVDMNSNRCLSVKEKNISIGDSTPQQQSSPLRENIALQLGLSPSKNSSRRNQNCATEIPQIVEISIEKDNDSCVTPGTRLARRDSYSRHAPWGGKKKHSCSTKTQSSLDADKKFGRTRSGLQRRERRYGVSSVHDMDSVSSRTVGSRSLRQRLQDTVGLCFPMRTYSKQSKPLFSNKRKIHLSELMLEKCPFPAGSDLAQKWHLIKQHTAPVSPHSTFFDTFDPSLVSTEDEEDRLRERRRLSIEEGVDPPPNAQIHTFEATAQVNPLYKLGPKLAPGMTEISGDSSAIPQANCDSEEDTTTLCLQSRRQKQRQISGDSHTHVSRQGAWKVHTQIDYIHCLVPDLLQITGNPCYWGVMDRYEAEALLEGKPEGTFLLRDSAQEDYLFSVSFRRYNRSLHARIEQWNHNFSFDAHDPCVFHSSTVTGLLEHYKDPSSCMFFEPLLTISLNRTFPFSLQYICRAVICRCTTYDGIDGLPLPSMLQDFLKEYHYKQKVRVRWLEREPVKAK

SEQ ID NO: 85124 - protein, 536 aa, Homo sapiens; identical to SEQ ID NO: 85123
  Payload ID: 16919
  Gene Symbol: SOCS5
  Gene Name: suppressor of cytokine signaling 5
  Uniprot ID: O75159
  ENSP ID: ENSP00000378330

SEQ ID NO: 85125 - protein, 535 aa, Homo sapiens
  Payload ID: 16920
  Gene Symbol: SOCS6
  Gene Name: suppressor of cytokine signaling 6
  Uniprot ID: O14544
  ENSP ID: ENSP00000381034
MKKISLKTLRKSFNLNKSKEETDFMVVQQPSLASDFGKDDSLFGSCYGKDMASCDINGEDEKGGKNRSKSESLMGTLKRRLSAKQKSKGKAGTPSGSSADEDTFSSSSAPIVFKDVRAQRPIRSTSLRSHHYSPAPWPLRPTNSEETCIKMEVRVKALVHSSSPSPALNGVRKDFHDLQSETTCQEQANSLKSSASHNGDLHLHLDEHVPVVIGLMPQDYIQYTVPLDEGMYPLEGSRSYCLDSSSPMEVSAVPPQVGGRAFPEDESQVDQDLVVAPEIFVDQSVNGLLIGTTGVMLQSPRAGHDDVPPLSPLLPPMQNNQIQRNFSGLTGTEAHVAESMRCHLNFDPNSAPGVARVYDSVQSSGPMVVTSLTEELKKLAKQGWYWGPITRWEAEGKLANVPDGSFLVRDSSDDRYLLSLSFRSHGKTLHTRIEHSNGRFSFYEQPDVEGHTSIVDLIEHSIRDSENGAFCYSRSRLPGSATYPVRLTNPVSRFMQVRSLQYLCRFVIRQYTRIDLIQKLPLPNKMKDYLQEKHY

SEQ ID NO: 85126 - protein, 227 aa, Homo sapiens
  Payload ID: 16920
  Gene Symbol: SOCS6
  Gene Name: suppressor of cytokine signaling 6
  ENSP ID: ENSP00000463064
MKKISLKTLRKSFNLNKSKEETDFMVVQQPSLASDFGKDDSLFGSCYGKDMASCDINGEDEKGGKNRSKSESLMGTLKRRLSAKQKSKGKAGTPSGSSADEDTFSSSSAPIVFKDVRAQRPIRSTSLRSHHYSPAPWPLRPTNSEETCIKMEVRVKALVHSSSPSPALNGVRKDFHDLQSETTCQEQANSLKSSASHNGDLHLHLDEHVPVVIGLMPQDYIQYTVPL

SEQ ID NO: 85127 - protein, 535 aa, Homo sapiens; identical to SEQ ID NO: 85125
  Payload ID: 16920
  Gene Symbol: SOCS6
  Gene Name: suppressor of cytokine signaling 6
  Uniprot ID: O14544
  ENSP ID: ENSP00000463395

SEQ ID NO: 85128 - protein, 581 aa, Homo sapiens
  Payload ID: 16921
  Gene Symbol: SOCS7
  Gene Name: suppressor of cytokine signaling 7
  Uniprot ID: O14512
  ENSP ID: ENSP00000480736
MVFRNVGRPPEEEDVEAAPEPGPSELLCPRHRCALDPKALPPGLALERTWGPAAGLEAQLAALGLGQPAGPGVKTVGGGCCPCPCPPQPPPPQPQPPAAAPQAGEDPTETSDALLVLEGLESEAESLETNSCSEEELSSPGRGGGGGGRLLLQPPGPELPPVPFPLQDLVPLGRLSRGEQQQQQQQQPPPPPPPPGPLRPLAGPSRKGSFKIRLSRLFRTKSCNGGSGGGDGTGKRPSGELAASAASLTDMGGSAGRELDAGRKPKLTRTQSAFSPVSFSPLFTGETVSLVDVDISQRGLTSPHPPTPPPPPRRSLSLLDDISGTLPTSVLVAPMGSSLQSFPLPPPPPPHAPDAFPRIAPIRAAESLHSQPPQHLQCPLYRPDSSSFAASLRELEKCGWYWGPMNWEDAEMKLKGKPDGSFLVRDSSDPRYILSLSFRSQGITHHTRMEHYRGTFSLWCHPKFEDRCQSVVEFIKRAIMHSKNGKFLYFLRSRVPGLPPTPVQLLYPVSRFSNVKSLQHLCRFRIRQLVRIDHIPDLPLPKPLISYIRKFYYYDPQEEVYLSLKEAQLISKQKQEVEPST

SEQ ID NO: 85129 - protein, 581 aa, Homo sapiens; identical to SEQ ID NO: 85128
  Payload ID: 16921
  Gene Symbol: SOCS7
  Gene Name: suppressor of cytokine signaling 7
  Uniprot ID: O14512
  ENSP ID: ENSP00000482229

SEQ ID NO: 85130 - protein, 160 aa, Homo sapiens
  Payload ID: 16921
  Gene Symbol: SOCS7
  Gene Name: suppressor of cytokine signaling 7
  ENSP ID: ENSP00000482278
  MOD_RES (1)..(1): Any amino acid
XGKRPSGELAASAASLTDMGGSAGRELDAGRKPKLTRTQSAFSPVSFSPLFTDAFPRIAPIRAAESLHSQPPQHLQCPLYRPDSSSFAASLRELEKCGWYWGPMNWEDAEMKLKGKPDGSFLVRDSSDPRYILSLSFRSQGITHHTRMEHYRGTFSLWCH

SEQ ID NO: 85131 - protein, 547 aa, Homo sapiens
  Payload ID: 16921
  Gene Symbol: SOCS7
  Gene Name: suppressor of cytokine signaling 7
  ENSP ID: ENSP00000484381
MVFRNVGRPPEEEDVEAAPEPGPSELLCPRHRCALDPKALPPGLALERTWGPAAGLEAQLAALGLGQPAGPGVKTVGGGCCPCPCPPQPPPPQPQPPAAAPQAGEDPTETSDALLVLEGLESEAESLETNSCSEEELSSPGRGGGGGGRLLLQPPGPELPPVPFPLQDLVPLGRLSRGEQQQQQQQQPPPPPPPPGPLRPLAGPSRKGSFKIRLSRLFRTKSCNGGSGGGDGTGKRPSGELAASAASLTDMGGSAGRELDAGRKPKLTRTQSAFSPVSFSPLFTGETVSLVDVDISQRGLTSPHPPTPPPPPRRSLSLLDAFPRIAPIRAAESLHSQPPQHLQCPLYRPDSSSFAASLRELEKCGWYWGPMNWEDAEMKLKGKPDGSFLVRDSSDPRYILSLSFRSQGITHHTRMEHYRGTFSLWCHPKFEDRCQSVVEFIKRAIMHSKNGKFLYFLRSRVPGLPPTPVQLLYPVSRFSNVKSLQHLCRFRIRQLVRIDHIPDLPLPKPLISYIRKFYYYDPQEEVYLSLKEAQLISKQKQEVEPST

SEQ ID NO: 85132 - protein, 160 aa, Homo sapiens; identical to SEQ ID NO: 85130
  Payload ID: 16921
  Gene Symbol: SOCS7
  Gene Name: suppressor of cytokine signaling 7
  ENSP ID: ENSP00000487855
  MOD_RES (1)..(1): Any amino acid

SEQ ID NO: 85133 - protein, 547 aa, Homo sapiens; identical to SEQ ID NO: 85131
  Payload ID: 16921
  Gene Symbol: SOCS7
  Gene Name: suppressor of cytokine signaling 7
  ENSP ID: ENSP00000488601

SEQ ID NO: 85134 - protein, 433 aa, Homo sapiens
  Payload ID: 16922
  Gene Symbol: SUFU
  Gene Name: suppressor of fused homolog (Drosophila)
  Uniprot ID: Q9UMX1
  ENSP ID: ENSP00000358915
MAELRPSGAPGPTAPPAPGPTAPPAFASLFPPGLHAIYGECRRLYPDQPNPLQVTAIVKYWLGGPDPLDYVSMYRNVGSPSANIPEHWHYISFGLSDLYGDNRVHEFTGTDGPSGFGFELTFRLKRETGESAPPTWPAELMQGLARYVFQSENTFCSGDHVSWHSPLDNSESRIQHMLLTEDPQMQPVQTPFGVVTFLQIVGVCTEELHSAQQWNGQGILELLRTVPIAGGPWLITDMRRGETIFEIDPHLQERVDKGIETDGSNLSGVSAKCAWDDLSRPPEDDEDSRSICIGTQPRRLSGKDTEQIRETLRRGLEINSKPVLPPINPQRQNGLAHDRAPSRKDSLESDSSTAIIPHELIRTRQLESVHLKFNQESGALIPLCLRGRLLHGRHFTYKSITGDMAITFVSTGVEGAFATEEHPYAAHGPWLQL

SEQ ID NO: 85135 - protein, 484 aa, Homo sapiens
  Payload ID: 16922
  Gene Symbol: SUFU
  Gene Name: suppressor of fused homolog (Drosophila)
  Uniprot ID: Q9UMX1
  ENSP ID: ENSP00000358918
MAELRPSGAPGPTAPPAPGPTAPPAFASLFPPGLHAIYGECRRLYPDQPNPLQVTAIVKYWLGGPDPLDYVSMYRNVGSPSANIPEHWHYISFGLSDLYGDNRVHEFTGTDGPSGFGFELTFRLKRETGESAPPTWPAELMQGLARYVFQSENTFCSGDHVSWHSPLDNSESRIQHMLLTEDPQMQPVQTPFGVVTFLQIVGVCTEELHSAQQWNGQGILELLRTVPIAGGPWLITDMRRGETIFEIDPHLQERVDKGIETDGSNLSGVSAKCAWDDLSRPPEDDEDSRSICIGTQPRRLSGKDTEQIRETLRRGLEINSKPVLPPINPQRQNGLAHDRAPSRKDSLESDSSTAIIPHELIRTRQLESVHLKFNQESGALIPLCLRGRLLHGRHFTYKSITGDMAITFVSTGVEGAFATEEHPYAAHGPWLQILLTEEFVEKMLEDLEDLTSPEEFKLPKEYSWPEKKLKVSILPDVVFDSPLH

SEQ ID NO: 85136 - protein, 481 aa, Homo sapiens
  Payload ID: 16922
  Gene Symbol: SUFU
  Gene Name: suppressor of fused homolog (Drosophila)
  Uniprot ID: Q9UMX1
  ENSP ID: ENSP00000411597
MAELRPSGAPGPTAPPAPGPTAPPAFASLFPPGLHAIYGECRRLYPDQPNPLQVTAIVKYWLGGPDPLDYVSMYRNVGSPSANIPEHWHYISFGLSDLYGDNRVHEFTGTDGPSGFGFELTFRLKRETGESAPPTWPAELMQGLARYVFQSENTFCSGDHVSWHSPLDNSESRIQHMLLTEDPQMQPVQTPFGVVTFLQIVGVCTEELHSAQQWNGQGILELLRTVPIAGGPWLITDMRRGETIFEIDPHLQERVDKGIETDGSNLSGVSAKCAWDDLSRPPEDDEDSRSICIGTQPRRLSGKDTEQIRETLRRGLEINSKPVLPPINPQRQNGLAHDRAPSRKDSLESDSSTAIIPHELIRTRQLESVHLKFNQESGALIPLCLRGRLLHGRHFTYKSITGDMAITFVSTGVEGAFATEEHPYAAHGPWLQVRRPFFFSLLPFIDFLAHPSSSPLAALDGTPSWGAGHECLMDSGPGACV

SEQ ID NO: 85137 - protein, 1661 aa, Homo sapiens
  Payload ID: 16923
  Gene Symbol: SOGA1
  Gene Name: suppressor of glucose, autophagy associated 1
  Uniprot ID: O94964
  ENSP ID: ENSP00000237536
MEAPAAEPPVRGCGPQPAPAPAPAPERKKSHRAPSPARPKDVAGWSLAKGRRGPGPGSAVACSAAFSSRPDKKGRAVAPGARGAGVRVAGVRTGVRAKGRPRSGAGPRPPPPPPSLTDSSSEVSDCASEEARLLGLELALSSDAESAAGGPAGVRTGQPAQPAPSAQQPPRPPASPDEPSVAASSVGSSRLPLSASLAFSDLTEEMLDCGPSGLVRELEELRSENDYLKDEIEELRAEMLEMRDVYMEEDVYQLQELRQQLDQASKTCRILQYRLRKAERRSLRAAQTGQVDGELIRGLEQDVKVSKDISMRLHKELEVVEKKRARLEEENEELRQRLIETELAKQVLQTELERPREHSLKKRGTRSLGKADKKTLVQEDSADLKCQLHFAKEESALMCKKLTKLAKENDSMKEELLKYRSLYGDLDSALSAEELADAPHSRETELKVHLKLVEEEANLLSRRIVELEVENRGLRAEMDDMKDHGGGCGGPEARLAFSALGGGECGESLAELRRHLQFVEEEAELLRRSSAELEDQNKLLLNELAKFRSEHELDVALSEDSCSVLSEPSQEELAAAKLQIGELSGKVKKLQYENRVLLSNLQRCDLASCQSTRPMLETDAEAGDSAQCVPAPLGETHESHAVRLCRAREAEVLPGLREQAALVSKAIDVLVADANGFTAGLRLCLDNECADFRLHEAPDNSEGPRDTKLIHAILVRLSVLQQELNAFTRKADAVLGCSVKEQQESFSSLPPLGSQGLSKEILLAKDLGSDFQPPDFRDLPEWEPRIREAFRTGDLDSKPDPSRSFRPYRAEDNDSYASEIKELQLVLAEAHDSLRGLQEQLSQERQLRKEEADNFNQKMVQLKEDQQRALLRREFELQSLSLQRRLEQKFWSQEKNMLVQESQQFKHNFLLLFMKLRWFLKRWRQGKVLPSEGDDFLEVNSMKELYLLMEEEEINAQHSDNKACTGDSWTQNTPNEYIKTLADMKVTLKELCWLLRDERRGLTELQQQFAKAKATWETERAELKGHTSQMELKTGKGAGERAGPDWKAALQREREEQQHLLAESYSAVMELTRQLQISERNWSQEKLQLVERLQGEKQQVEQQVKELQNRLSQLQKAADPWVLKHSELEKQDNSWKETRSEKIHDKEAVSEVELGGNGLKRTKSVSSMSEFESLLDCSPYLAGGDARGKKLPNNPAFGFVSSEPGDPEKDTKEKPGLSSRDCNHLGALACQDPPGRQMQRSYTAPDKTGIRVYYSPPVARRLGVPVVHDKEGKIIIEPGFLFTTAKPKESAEADGLAESSYGRWLCNFSRQRLDGGSAGSPSAAGPGFPAALHDFEMSGNMSDDMKEITNCVRQAMRSGSLERKVKSTSSQTVGLASVGTQTIRTVSVGLQTDPPRSSLHGKAWSPRSSSLVSVRSKQISSSLDKVHSRIERPCCSPKYGSPKLQRRSVSKLDSSKDRSLWNLHQGKQNGSAWARSTTTRDSPVLRNINDGLSSLFSVVEHSGSTESVWKLGMSETRAKPEPPKYGIVQEFFRNVCGRAPSPTSSAGEEGTKKPEPLSPASYHQPEGVARILNKKAAKLGSSEEVRLTMLPQVGKDGVLRDGDGAVVLPNEDAVCDCSTQSLTSCFARSSRSAIRHSPSKCRLHPSESSWGGEERALPPSE

SEQ ID NO: 85138 - protein, 1016 aa, Homo sapiens
  Payload ID: 16923
  Gene Symbol: SOGA1
  Gene Name: suppressor of glucose, autophagy associated 1
  ENSP ID: ENSP00000279034
MLEMRDVYMEEDVYQLQELRQQLDQASKTCRILQYRLRKAERRSLRAAQTGQVDGELIRGLEQDVKVSKDISMRLHKELEVVEKKRARLEEENEELRQRLIETELAKQVLQTELERPREHSLKKRGTRSLGKADKKTLVQEDSADLKCQLHFAKEESALMCKKLTKLAKENDSMKEELLKYRSLYGDLDSALSAEELADAPHSRETELKVHLKLVEEEANLLSRRIVELEVENRGLRAEMDDMKDHGGGCGGPEARLAFSALGGGECGESLAELRRHLQFVEEEAELLRRSSAELEDQNKLLLNELAKFRSEHELDVALSEDSCSVLSEPSQEELAAAKLQIGELSGKVKKLQYENRVLLSNLQRCDLASCQSTRPMLETDAEAGDSAQCVPAPLGETHESHAVRLCRAREAEVLPGLREQAALVSKAIDVLVADANGFTAGLRLCLDNECADFRLHEAPDNSEGPRDTKLIHAILVRLSVLQQELNAFTRKADAVLGCSVKEQQESFSSLPPLGSQGLSKEILLAKDLGSDFQPPDFRDLPEWEPRIREAFRTGDLDSKPDPSRSFRPYRAEDNDSYASEIKELQLVLAEAHDSLRGLQEQLSQERQLRKEEADNFNQKMVQLKEDQQRALLRREFELQSLSLQRRLEQKFWSQEKNMLVQESQQFKHNFLLLFMKLRWFLKRWRQGKVLPSEGDDFLEVNSMKELYLLMEEEEINAQHSDNKACTGDSWTQNTPNEYIKTLADMKVTLKELCWLLRDERRGLTELQQQFAKAKATWETERAELKGHTSQMELKTGKGAGERAGPDWKAALQREREEQQHLLAESYSAVMELTRQLQISERNWSQEKLQLVERLQGEKQQVEQQVKELQNRLSQLQKAADPWVLKHSELEKQDNSWKETRSEKIHDKEAVSEVELGGNGLKRTKSVSSMSEFESLLDCSPYLAGGDARGKKLPNNPAFGFVSSEPGDPEKDTKEKPGLSSRDCNHLGALACQDPPGSQKLPFLLILAPPQPPPIL

SEQ ID NO: 85139 - protein, 1275 aa, Homo sapiens
  Payload ID: 16923
  Gene Symbol: SOGA1
  Gene Name: suppressor of glucose, autophagy associated 1
  ENSP ID: ENSP00000433939
  MOD_RES (1)..(1): Any amino acid
XLHFAKEESALMCKKLTKLAKENDSMKEELLKYRSLYGDLDSALSAEELADAPHSRETELKVHLKLVEEEANLLSRRIVELEVENRGLRAEMDDMKDHGGGCGGPEARLAFSALGGGECGESLAELRRHLQFVEEEAELLRRSSAELEDQNKLLLNELAKFRSEHELDVALSEDSCSVLSEPSQEELAAAKLQIGELSGKVKKLQYENRVLLSNLQRCDLASCQSTRPMLETDAEAGDSAQCVPAPLGETHESHAVRLCRAREAEVLPGLREQAALVSKAIDVLVADANGFTAGLRLCLDNECADFRLHEAPDNSEGPRDTKLIHAILVRLSVLQQELNAFTRKADAVLGCSVKEQQESFSSLPPLGSQGLSKEILLAKDLGSDFQPPDFRDLPEWEPRIREAFRTGDLDSKPDPSRSFRPYRAEDNDSYASEIKELQLVLAEAHDSLRGLQEQLSQERQLRKEEADNFNQKMVQLKEDQQRALLRREFELQSLSLQRRLEQKFWSQEKNMLVQESQQFKHNFLLLFMKLRWFLKRWRQGKVLPSEGDDFLEVNSMKELYLLMEEEEINAQHSDNKACTGDSWTQNTPNEYIKTLADMKVTLKELCWLLRDERRGLTELQQQFAKAKATWETERAELKGHTSQMELKTGKGAGERAGPDWKAALQREREEQQHLLAESYSAVMELTRQLQISERNWSQEKLQLVERLQGEKQQVEQQVKELQNRLSQLQKAADPWVLKHSELEKQDNSWKETRSEKIHDKEAVSEVELGGNGLKRTKSVSSMSEFESLLDCSPYLAGGDARGKKLPNNPAFGFVSSEPGDPEKDTKEKPGLSSRDCNHLGALACQDPPGRQMQRSYTAPDKTGIRVYYSPPVARRLGVPVVHDKEGKIIIEPGFLFTTAKPKESAEADGLAESSYGRWLCNFSRQRLDGGSAGSPSAAGPGFPAALHDFEMSGNMSDDMKEITNCVRQAMRSGSLERKVKSTSSQTVGLASVGTQTIRTVSVGLQTDPPRSSLHGKAWSPRSSSLVSVRSKQISSSLDKVHSRIERPCCSPKYGSPKLQRRSVSKLDSSKDRSLWNLHQGKQNGSAWARSTTTRDSPVLRNINDGLSSLFSVVEHSGSTESVWKLGMSETRAKPEPPKYGIVQEFFRNVCGRAPSPTSSAGEEGTKKPEPLSPASYHQPEGVARILNKKAAKLGSSEEVRLTMLPQVGKDGVLRDGDGAVVLPNEDAVCDCSTQSLTSCFARSSRSAIRHSPSKCRLHPSESSWGGEERALPPSE

SEQ ID NO: 85140 - protein, 207 aa, Homo sapiens
  Payload ID: 16924
  Gene Symbol: SIKE1
  Gene Name: suppressor of IKBKE 1
  Uniprot ID: Q9BRV8
  ENSP ID: ENSP00000060969
MSCTIEKILTDAKTLLERLREHDAAAESLVDQSAALHRRVAAMREAGTALPDQYQEDASDMKDMSKYKPHILLSQENTQIRDLQQENRELWISLEEHQDALELIMSKYRKQMLQLMVAKKAVDAEPVLKAHQSHSAEIESQIDRICEMGEVMRKAVQVDDDQFCKIQEKLAQLELENKELRELLSISSESLQARKENSMDTASQAIK

SEQ ID NO: 85141 - protein, 211 aa, Homo sapiens
  Payload ID: 16924
  Gene Symbol: SIKE1
  Gene Name: suppressor of IKBKE 1
  Uniprot ID: Q9BRV8
  ENSP ID: ENSP00000358541
MSCTIEKILTDAKTLLERLREHDAAAESLVDQSAALHRRVAAMREAGTALPDQVRQRYQEDASDMKDMSKYKPHILLSQENTQIRDLQQENRELWISLEEHQDALELIMSKYRKQMLQLMVAKKAVDAEPVLKAHQSHSAEIESQIDRICEMGEVMRKAVQVDDDQFCKIQEKLAQLELENKELRELLSISSESLQARKENSMDTASQAIK

SEQ ID NO: 85142 - protein, 79 aa, Homo sapiens
  Payload ID: 16925
  Gene Symbol: ST20
  Gene Name: suppressor of tumorigenicity 20
  Uniprot ID: Q9HBF5
  ENSP ID: ENSP00000453502
MARSRLTATSVSQVQENGFVKKLEPKSGWMTFLEVTGKICEMLFCPEAILLTRKDTPYCETGLIFLTLTKTIANTYFYF

SEQ ID NO: 85143 - protein, 79 aa, Homo sapiens; identical to SEQ ID NO: 85142
  Payload ID: 16925
  Gene Symbol: ST20
  Gene Name: suppressor of tumorigenicity 20
  Uniprot ID: Q9HBF5
  ENSP ID: ENSP00000453693

SEQ ID NO: 85144 - protein, 79 aa, Homo sapiens; identical to SEQ ID NO: 85142
  Payload ID: 16925
  Gene Symbol: ST20
  Gene Name: suppressor of tumorigenicity 20
  Uniprot ID: Q9HBF5
  ENSP ID: ENSP00000457965

SEQ ID NO: 85145 - protein, 423 aa, Homo sapiens
  Payload ID: 16926
  Gene Symbol: SUV39H1
  Gene Name: suppressor of variegation 3-9 homolog 1 (Drosophila)
  Uniprot ID: O43463
  ENSP ID: ENSP00000337976
MVGMSRLRNDRLADPLTGCSVCCKSSWNQLQDLCRLAKLSCPALGISKRNLYDFEVEYLCDYKKIREQEYYLVKWRGYPDSESTWEPRQNLKCVRILKQFHKDLERELLRRHHRSKTPRHLDPSLANYLVQKAKQRRALRRWEQELNAKRSHLGRITVENEVDLDGPPRAFVYINEYRVGEGITLNQVAVGCECQDCLWAPTGGCCPGASLHKFAYNDQGQVRLRAGLPIYECNSRCRCGYDCPNRVVQKGIRYDLCIFRTDDGRGWGVRTLEKIRKNSFVMEYVGEIITSEEAERRGQIYDRQGATYLFDLDYVEDVYTVDAAYYGNISHFVNHSCDPNLQVYNVFIDNLDERLPRIAFFATRTIRAGEELTFDYNMQVDPVDMESTRMDSNFGLAGLPGSPKKRVRIECKCGTESCRKYLF

SEQ ID NO: 85146 - protein, 412 aa, Homo sapiens
  Payload ID: 16926
  Gene Symbol: SUV39H1
  Gene Name: suppressor of variegation 3-9 homolog 1 (Drosophila)
  Uniprot ID: O43463
  ENSP ID: ENSP00000365877
MAENLKGCSVCCKSSWNQLQDLCRLAKLSCPALGISKRNLYDFEVEYLCDYKKIREQEYYLVKWRGYPDSESTWEPRQNLKCVRILKQFHKDLERELLRRHHRSKTPRHLDPSLANYLVQKAKQRRALRRWEQELNAKRSHLGRITVENEVDLDGPPRAFVYINEYRVGEGITLNQVAVGCECQDCLWAPTGGCCPGASLHKFAYNDQGQVRLRAGLPIYECNSRCRCGYDCPNRVVQKGIRYDLCIFRTDDGRGWGVRTLEKIRKNSFVMEYVGEIITSEEAERRGQIYDRQGATYLFDLDYVEDVYTVDAAYYGNISHFVNHSCDPNLQVYNVFIDNLDERLPRIAFFATRTIRAGEELTFDYNMQVDPVDMESTRMDSNFGLAGLPGSPKKRVRIECKCGTESCRKYLF

SEQ ID NO: 85147 - protein, 350 aa, Homo sapiens
  Payload ID: 16927
  Gene Symbol: SUV39H2
  Gene Name: suppressor of variegation 3-9 homolog 2 (Drosophila)
  Uniprot ID: Q9H5I1
  ENSP ID: ENSP00000319208
MEYYLVKWKGWPDSTNTWEPLQNLKCPLLLQQFSNDKHNYLSQVKKGKAITPKDNNKTLKPAIAEYIVKKAKQRIALQRWQDELNRRKNHKGMIFVENTVDLEGPPSDFYYINEYKPAPGISLVNEATFGCSCTDCFFQKCCPAEAGVLLAYNKNQQIKIPPGTPIYECNSRCQCGPDCPNRIVQKGTQYSLCIFRTSNGRGWGVKTLVKIKRMSFVMEYVGEVITSEEAERRGQFYDNKGITYLFDLDYESDEFTVDAARYGNVSHFVNHSCDPNLQVFNVFIDNLDTRLPRIALFSTRTINAGEELTFDYQMKGSGDISSDSIDHSPAKKRVRTVCKCGAVTCRGYLN

SEQ ID NO: 85148 - protein, 410 aa, Homo sapiens
  Payload ID: 16927
  Gene Symbol: SUV39H2
  Gene Name: suppressor of variegation 3-9 homolog 2 (Drosophila)
  Uniprot ID: Q9H5I1
  ENSP ID: ENSP00000346997
MAAVGAEARGAWCVPCLVSLDTLQELCRKEKLTCKSIGITKRNLNNYEVEYLCDYKVVKDMEYYLVKWKGWPDSTNTWEPLQNLKCPLLLQQFSNDKHNYLSQVKKGKAITPKDNNKTLKPAIAEYIVKKAKQRIALQRWQDELNRRKNHKGMIFVENTVDLEGPPSDFYYINEYKPAPGISLVNEATFGCSCTDCFFQKCCPAEAGVLLAYNKNQQIKIPPGTPIYECNSRCQCGPDCPNRIVQKGTQYSLCIFRTSNGRGWGVKTLVKIKRMSFVMEYVGEVITSEEAERRGQFYDNKGITYLFDLDYESDEFTVDAARYGNVSHFVNHSCDPNLQVFNVFIDNLDTRLPRIALFSTRTINAGEELTFDYQMKGSGDISSDSIDHSPAKKRVRTVCKCGAVTCRGYLN

SEQ ID NO: 85149 - protein, 176 aa, Homo sapiens
  Payload ID: 16927
  Gene Symbol: SUV39H2
  Gene Name: suppressor of variegation 3-9 homolog 2 (Drosophila)
  ENSP ID: ENSP00000351046
  MOD_RES (1)..(1): Any amino acid
XWCVPCLVSLDTLQELCRKEKLTCKSIGITKRNLNNYEVEYLCDYKVVKVITSEEAERRGQFYDNKGITYLFDLDYESDEFTVDAARYGNVSHFVNHSCDPNLQVFNVFIDNLDTRLPRIALFSTRTINAGEELTFDYQMKGSGDISSDSIDHSPAKKRVRTVCKCGAVTCRGYLN

SEQ ID NO: 85150 - protein, 230 aa, Homo sapiens
  Payload ID: 16927
  Gene Symbol: SUV39H2
  Gene Name: suppressor of variegation 3-9 homolog 2 (Drosophila)
  Uniprot ID: Q9H5I1
  ENSP ID: ENSP00000367576
MAAVGAEARGAWCVPCLVSLDTLQELCRKEKLTCKSIGITKRNLNNYEVEYLCDYKVVKDMEYYLVKWKGWPDSTNTWEPLQNLKCPLLLQQFSNDKHNYLSQVITSEEAERRGQFYDNKGITYLFDLDYESDEFTVDAARYGNVSHFVNHSCDPNLQVFNVFIDNLDTRLPRIALFSTRTINAGEELTFDYQMKGSGDISSDSIDHSPAKKRVRTVCKCGAVTCRGYLN

SEQ ID NO: 85151 - protein, 45 aa, Homo sapiens
  Payload ID: 16927
  Gene Symbol: SUV39H2
  Gene Name: suppressor of variegation 3-9 homolog 2 (Drosophila)
  ENSP ID: ENSP00000367582
MAAVGAEARGGYGILSCKMERMARFYKYLGTFAKSEVPVTASAIL

SEQ ID NO: 85152 - protein, 95 aa, Homo sapiens
  Payload ID: 16927
  Gene Symbol: SUV39H2
  Gene Name: suppressor of variegation 3-9 homolog 2 (Drosophila)
  ENSP ID: ENSP00000388218
MEYYLVKWKGWPDSTNTWEPLQNLKCPLLLQQFSNDKHNYLSQVKKGKAITPKDNNKTLKPAIAEYIVKKAKQRIALQRWQDELNRRKNHKGMIF

SEQ ID NO: 85153 - protein, 152 aa, Homo sapiens
  Payload ID: 16927
  Gene Symbol: SUV39H2
  Gene Name: suppressor of variegation 3-9 homolog 2 (Drosophila)
  ENSP ID: ENSP00000388968
MEYYLVKWKGWPDSTNTWEPLQNLKCPLLLQQFSNDKHNYLSQVITSEEAERRGQFYDNKGITYLFDLDYESDEFTVDAARYGNVSHFVNHSCDPNLQVFNVFIDNLDTRLPRIALFSTRTINAGEELTFDYQMKGSGDISSDSIDHSPAKK

SEQ ID NO: 85154 - protein, 220 aa, Homo sapiens
  Payload ID: 16927
  Gene Symbol: SUV39H2
  Gene Name: suppressor of variegation 3-9 homolog 2 (Drosophila)
  ENSP ID: ENSP00000392201
MEYYLVKWKGWPDSTNTWEPLQNLKCPLLLQQFSNDKHNYLSQVKKGKAITPKDNNKTLKPAIAEYIVKKAKQRIALQRWQDELNRRKNHKGMIFVENTVDLEGPPSDFYYINEYKPAPGISLVNEATFGCSCTDCFFQKCCPAEAGVLLAYNKNQQIKIPPGTPIYECNSRCQCGPDCPNRIVQKGTQYSLCIFRTSNGRGWGVKTLVKIKRMSFVMEY

SEQ ID NO: 85155 - protein, 885 aa, Homo sapiens
  Payload ID: 16928
  Gene Symbol: SUV420H1
  Gene Name: suppressor of variegation 4-20 homolog 1 (Drosophila)
  Uniprot ID: Q4FZB7
  ENSP ID: ENSP00000305899
MKWLGESKNMVVNGRRNGGKLSNDHQQNQSKLQHTGKDTLKAGKNAVERRSNRCNGNSGFEGQSRYVPSSGMSAKELCENDDLATSLVLDPYLGFQTHKMNTSAFPSRSSRHFSKSDSFSHNNPVRFRPIKGRQEELKEVIERFKKDEHLEKAFKCLTSGEWARHYFLNKNKMQEKLFKEHVFIYLRMFATDSGFEILPCNRYSSEQNGAKIVATKEWKRNDKIELLVGCIAELSEIEENMLLRHGENDFSVMYSTRKNCAQLWLGPAAFINHDCRPNCKFVSTGRDTACVKALRDIEPGEEISCYYGDGFFGENNEFCECYTCERRGTGAFKSRVGLPAPAPVINSKYGLRETDKRLNRLKKLGDSSKNSDSQSVSSNTDADTTQEKNNATSNRKSSVGVKKNSKSRTLTRQSMSRIPASSNSTSSKLTHINNSRVPKKLKKPAKPLLSKIKLRNHCKRLEQKNASRKLEMGNLVLKEPKVVLYKNLPIKKDKEPEGPAQAAVASGCLTRHAAREHRQNPVRGAHSQGESSPCTYITRRSVRTRTNLKEASDIKLEPNTLNGYKSSVTEPCPDSGEQLQPAPVLQEEELAHETAQKGEAKCHKSDTGMSKKKSRQGKLVKQFAKIEESTPVHDSPGKDDAVPDLMGPHSDQGEHSGTVGVPVSYTDCAPSPVGCSVVTSDSFKTKDSFRTAKSKKKRRITRYDAQLILENNSGIPKLTLRRRHDSSSKTNDQENDGMNSSKISIKLSKDHDNDNNLYVAKLNNGFNSGSGSSSTKLKIQLKRDEENRGSYTEGLHENGVCCSDPLSLLESRMEVDDYSQYEEESTDDSSSSEGDEEEDDYDDDFEDDFIPLPPAKRLRLIVGKDSIDIDISSRRREDQSLRLNA

SEQ ID NO: 85156 - protein, 103 aa, Homo sapiens
  Payload ID: 16928
  Gene Symbol: SUV420H1
  Gene Name: suppressor of variegation 4-20 homolog 1 (Drosophila)
  ENSP ID: ENSP00000313027
  MOD_RES (1)..(1): Any amino acid
XSDSFSHNNPVRFRPIKGRQEELKEVIERFKKDEHLEKAFKCLTSGEWARHYFLNKNKMQEKLFKEHRQNLALSPRLECSGLIMAHCSFHLLGSSDSSSQPPT

SEQ ID NO: 85157 - protein, 370 aa, Homo sapiens
  Payload ID: 16928
  Gene Symbol: SUV420H1
  Gene Name: suppressor of variegation 4-20 homolog 1 (Drosophila)
  ENSP ID: ENSP00000384724
MKWLGESKNMVVNGRRNGGKLSNDHQQNQSKLQHTGKDTLKAGKNAVERRSNRCNGNSGFEGQSRYVPSSGMSAKELCENDDLATSLVLDPYLGFQTHKMNTRFRPIKGRQEELKEVIERFKKDEHLEKAFKCLTSGEWARHYFLNKNKMQEKLFKEHVFIYLRMFATDSGFEILPCNRYSSEQNGAKIVATKEWKRNDKIELLVGCIAELSEIEENMLLRHGENDFSVMYSTRKNCAQLWLGPAAFINHDCRPNCKFVSTGRDTACVKALRDIEPGEEISCYYGDGFFGENNEFCECYTCERRGTGAFKSRVGLPAPAPVINSKYGLRETDKRLNRLKKLGDSSKNSDSQSVSSNTDADTTQEKNNASK

SEQ ID NO: 85158 - protein, 402 aa, Homo sapiens
  Payload ID: 16928
  Gene Symbol: SUV420H1
  Gene Name: suppressor of variegation 4-20 homolog 1 (Drosophila)
  ENSP ID: ENSP00000385005
MKWLGESKNMVVNGRRNGGKLSNDHQQNQSKLQHTGKDTLKAGKNAVERRSNRCNGNSGFEGQSRYVPSSGMSAKELCENDDLATSLVLDPYLGFQTHKMNTSAFPSRSSRHFSKSDSFSHNNPVRFRPIKGRQEELKEVIERFKKDEHLEKAFKCLTSGEWARHYFLNKNKMQEKLFKEHVFIYLRMFATDSGFEILPCNRYSSEQNGAKIVATKEWKRNDKIELLVGCIAELSEIEENMLLRHGENDFSVMYSTRKNCAQLWLGPAAFINHDCRPNCKFVSTGRDTACVKALRDIEPGEEISCYYGDGFFGENNEFCECYTCERRGTGAFKSRVGLPAPAPVINSKYGLRETDKRLNRLKKLGDSSKNSDSQSVSSNTDADTTQEKNNAKNPEEKGRCFP

SEQ ID NO: 85159 - protein, 393 aa, Homo sapiens
  Payload ID: 16928
  Gene Symbol: SUV420H1
  Gene Name: suppressor of variegation 4-20 homolog 1 (Drosophila)
  Uniprot ID: Q4FZB7
  ENSP ID: ENSP00000385640
MKWLGESKNMVVNGRRNGGKLSNDHQQNQSKLQHTGKDTLKAGKNAVERRSNRCNGNSGFEGQSRYVPSSGMSAKELCENDDLATSLVLDPYLGFQTHKMNTSAFPSRSSRHFSKSDSFSHNNPVRFRPIKGRQEELKEVIERFKKDEHLEKAFKCLTSGEWARHYFLNKNKMQEKLFKEHVFIYLRMFATDSGFEILPCNRYSSEQNGAKIVATKEWKRNDKIELLVGCIAELSEIEENMLLRHGENDFSVMYSTRKNCAQLWLGPAAFINHDCRPNCKFVSTGRDTACVKALRDIEPGEEISCYYGDGFFGENNEFCECYTCERRGTGAFKSRVGLPAPAPVINSKYGLRETDKRLNRLKKLGDSSKNSDSQSVSSNTDADTTQEKNNASK

SEQ ID NO: 85160 - protein, 393 aa, Homo sapiens; identical to SEQ ID NO: 85159
  Payload ID: 16928
  Gene Symbol: SUV420H1
  Gene Name: suppressor of variegation 4-20 homolog 1 (Drosophila)
  Uniprot ID: Q4FZB7
  ENSP ID: ENSP00000385965

SEQ ID NO: 85161 - protein, 159 aa, Homo sapiens
  Payload ID: 16928
  Gene Symbol: SUV420H1
  Gene Name: suppressor of variegation 4-20 homolog 1 (Drosophila)
  ENSP ID: ENSP00000387685
MKWLGESKNMVVNGRRNGGKLSNDHQQNQSKLQHTGKDTLKAGKNAVERRSNRCNGNSGFEGQSRYVPSSGMSAKELCENDDLATSLVLDPYLGFQTHKMNTSAFPSRSSRHFSKSDSFSHNNPVSGETEKPNSKKTWEVSLWKEWGTDLGLLKEGRKN

SEQ ID NO: 85162 - protein, 118 aa, Homo sapiens
  Payload ID: 16928
  Gene Symbol: SUV420H1
  Gene Name: suppressor of variegation 4-20 homolog 1 (Drosophila)
  ENSP ID: ENSP00000402921
MKWLGESKNMVVNGRRNGGKLSNDHQQNQSKLQHTGKDTLKAGKNAVERRSNRCNGNSGFEGQSRYVPSSGMSAKELCENDDLATSLVLDPYLGFQTHKMNTSAFPSRSSRHFSKSDS

SEQ ID NO: 85163 - protein, 100 aa, Homo sapiens
  Payload ID: 16928
  Gene Symbol: SUV420H1
  Gene Name: suppressor of variegation 4-20 homolog 1 (Drosophila)
  ENSP ID: ENSP00000403233
MSAKELCENDDLATSLVLDPYLGFQTHKMNTSAFPSRSSRHFSKSDSFSHNNPVRFRPIKGRQEELKEVIERFKKDEHLEKAFKCLTSGEWARHYFLNKN

SEQ ID NO: 85164 - protein, 120 aa, Homo sapiens
  Payload ID: 16928
  Gene Symbol: SUV420H1
  Gene Name: suppressor of variegation 4-20 homolog 1 (Drosophila)
  ENSP ID: ENSP00000406377
MSAKELCENDDLATSLVLDPYLGFQTHKMNTSAFPSRSSRHFSKSDSFSHNNPVRFRPIKGRQEELKEVIERFKKDEHLEKAFKCLTSGEWARHYFLNKNKMQEKLFKEHVFIYLRMFAT

SEQ ID NO: 85165 - protein, 278 aa, Homo sapiens
  Payload ID: 16928
  Gene Symbol: SUV420H1
  Gene Name: suppressor of variegation 4-20 homolog 1 (Drosophila)
  ENSP ID: ENSP00000411146
MKWLGESKNMVVNGRRNGGKLSNDHQQNQSKLQHTGKDTLKAGKNAVERRSNRCNGNSGFEGQSRYVPSSGMSAKELCENDDLATSLVLDPYLGFQTHKMNTSAFPSRSSRHFSKSDSFSHNNPVRFRPIKGRQEELKEVIERFKKDEHLEKAFKCLTSGEWARHYFLNKNKMQEKLFKEHVFIYLRMFATDSGFEILPCNRYSSEQNGAKIVATKEWKRNDKIELLVGCIAELSEIEENMLLRHGENDFSVMYSTRKNCAQLWLGPAAFINHDLINS

SEQ ID NO: 85166 - protein, 885 aa, Homo sapiens; identical to SEQ ID NO: 85155
  Payload ID: 16928
  Gene Symbol: SUV420H1
  Gene Name: suppressor of variegation 4-20 homolog 1 (Drosophila)
  Uniprot ID: Q4FZB7
  ENSP ID: ENSP00000484858

SEQ ID NO: 85167 - protein, 462 aa, Homo sapiens
  Payload ID: 16929
  Gene Symbol: SUV420H2
  Gene Name: suppressor of variegation 4-20 homolog 2 (Drosophila)
  Uniprot ID: Q86Y97
  ENSP ID: ENSP00000255613
MGPDRVTARELCENDDLATSLVLDPYLGFRTHKMNVSPVPPLRRQQHLRSALETFLRQRDLEAAYRALTLGGWTARYFQSRGPRQEAALKTHVYRYLRAFLPESGFTILPCTRYSMETNGAKIVSTRAWKKNEKLELLVGCIAELREADEGLLRAGENDFSIMYSTRKRSAQLWLGPAAFINHDCKPNCKFVPADGNAACVKVLRDIEPGDEVTCFYGEGFFGEKNEHCECHTCERKGEGAFRTRPREPALPPRPLDKYQLRETKRRLQQGLDSGSRQGLLGPRACVHPSPLRRDPFCAACQPLRLPACSARPDTSPLWLQWLPQPQPRVRPRKRRRPRPRRAPVLSTHHAARVSLHRWGGCGPHCRLRGEALVALGQPPHARWAPQQDWHWARRYGLPYVVRVDLRRLAPAPPATPAPAGTPGPILIPKQALAFAPFSPPKRLRLVVSHGSIDLDVGGEEL

SEQ ID NO: 85168 - protein, 97 aa, Homo sapiens
  Payload ID: 16929
  Gene Symbol: SUV420H2
  Gene Name: suppressor of variegation 4-20 homolog 2 (Drosophila)
  Uniprot ID: Q86Y97
  ENSP ID: ENSP00000397296
MGPDRVTARELCENDDLATSLVLDPYLGFRTHKMNVRSIATSVPSCRKVALPSCPARATPWRPTGPRSCPLVLGKRMRSWSCWWAALQSCGRQMRGC

SEQ ID NO: 85169 - protein, 97 aa, Homo sapiens; identical to SEQ ID NO: 85168
  Payload ID: 16929
  Gene Symbol: SUV420H2
  Gene Name: suppressor of variegation 4-20 homolog 2 (Drosophila)
  Uniprot ID: Q86Y97
  ENSP ID: ENSP00000467499

SEQ ID NO: 85170 - protein, 347 aa, Homo sapiens
  Payload ID: 16929
  Gene Symbol: SUV420H2
  Gene Name: suppressor of variegation 4-20 homolog 2 (Drosophila)
  ENSP ID: ENSP00000486397
METNGAKIVSTRAWKKNEKLELLVGCIAELREADEGLLRAGENDFSIMYSTRKRSAQLWLGPAAFINHDCKPNCKFVPADGNAACVKVLRDIEPGDEVTCFYGEGFFGEKNEHCECHTCERKGEGAFRTRPREPALPPRPLDKYQLRETKRRLQQGLDSGSRQGLLGPRACVHPSPLRRDPFCAACQPLRLPACSARPDTSPLWLQWLPQPQPRVRPRKRRRPRPRRAPVLSTHHAARVSLHRWGGCGPHCRLRGEALVALGQPPHARWAPQQDWHWARRYGLPYVVRVDLRRLAPAPPATPAPAGTPGPILIPKQALAFAPFSPPKRLRLVVSHGSIDLDVGGEEL

SEQ ID NO: 85171 - protein, 247 aa, Homo sapiens
  Payload ID: 16930
  Gene Symbol: SBSN
  Gene Name: suprabasin
  Uniprot ID: Q6UWP8
  ENSP ID: ENSP00000428771
MHLARLVGSCSLLLLLGALSGWAASDDPIEKVIEGINRGLSNAEREVGKALDGINSGITHAGREVEKVFNGLSNMGSHTGKELDKGVQGLNHGMDKVAHEINHGIGQAGKEAEKLGHGVNNAAGQAGKEADKAVQGFHTGVHQAGKEAEKLGQGVNHAADQAGKEVEKLGQGAHHAAGQAGKELQNAHNGVNQASKEANQLLNGNHQSGSSSHQGGATTTPLASGASVNTPFINLPALWRSVANIMP

SEQ ID NO: 85172 - protein, 590 aa, Homo sapiens
  Payload ID: 16930
  Gene Symbol: SBSN
  Gene Name: suprabasin
  Uniprot ID: Q6UWP8
  ENSP ID: ENSP00000430242
MHLARLVGSCSLLLLLGALSGWAASDDPIEKVIEGINRGLSNAEREVGKALDGINSGITHAGREVEKVFNGLSNMGSHTGKELDKGVQGLNHGMDKVAHEINHGIGQAGKEAEKLGHGVNNAAGQVGKEADKLIHHGVHHGANQAGSEAGKFGQGVDNAAGQAGNEAGRFGQGVHHAAGQAGNEAGRFGQGVHHAAGQAGNEAGRFGQGAHHGLSEGWKETEKFGQGIHHAAGQVGKEAEKFGQGAHHAAGQAGNEAGRFGQGVHHGLSEGWKETEKFGQGVHHTAGQVGKEAEKFGQGAHHAAGQAGNEAGRFGQGAHHAAGQAGNEAGRFGQGVHHGLSEGWKETEKFGQGVHHAASQFGKETEKLGHGVHHGVNEAWKEAEKFGQGVHHAASQVGKEEDRVVQGLHHGVSQAGREAGQFGHDIHHTAGQAGKEGDIAVHGVQPGVHEAGKEAGQFGQGVHHTLEQAGKEADKAVQGFHTGVHQAGKEAEKLGQGVNHAADQAGKEVEKLGQGAHHAAGQAGKELQNAHNGVNQASKEANQLLNGNHQSGSSSHQGGATTTPLASGASVNTPFINLPALWRSVANIMP

SEQ ID NO: 85173 - protein, 149 aa, Homo sapiens
  Payload ID: 16930
  Gene Symbol: SBSN
  Gene Name: suprabasin
  ENSP ID: ENSP00000468646
GWAASDDPIEKVIEGINRGLSNAEREVGKALDGINSGITHAGREVEKVFNGLSNMGSHTGKELDKGVQGLNHGMDKVAHEINHGIGQAGKEAEKLGHGVNNAAGQGNHQSGSSSHQGGATTTPLASGASVNTPFINLPALWRSVANIMP

SEQ ID NO: 85174 - protein, 78 aa, Homo sapiens
  Payload ID: 16931
  Gene Symbol: SFTA2
  Gene Name: surfactant associated 2
  Uniprot ID: Q6UW10
  ENSP ID: ENSP00000351989
MGSGLPLVLLLTLLGSSHGTGPGMTLQLKLKESFLTNSSYESSFLELLEKLCLLLHLPSGTSVTLHHARSQHHVVCNT

SEQ ID NO: 85175 - protein, 78 aa, Homo sapiens; identical to SEQ ID NO: 85174
  Payload ID: 16931
  Gene Symbol: SFTA2
  Gene Name: surfactant associated 2
  Uniprot ID: Q6UW10
  ENSP ID: ENSP00000373031

SEQ ID NO: 85176 - protein, 78 aa, Homo sapiens; identical to SEQ ID NO: 85174
  Payload ID: 16931
  Gene Symbol: SFTA2
  Gene Name: surfactant associated 2
  Uniprot ID: Q6UW10
  ENSP ID: ENSP00000390291

SEQ ID NO: 85177 - protein, 78 aa, Homo sapiens; identical to SEQ ID NO: 85174
  Payload ID: 16931
  Gene Symbol: SFTA2
  Gene Name: surfactant associated 2
  Uniprot ID: Q6UW10
  ENSP ID: ENSP00000398777

SEQ ID NO: 85178 - protein, 78 aa, Homo sapiens; identical to SEQ ID NO: 85174
  Payload ID: 16931
  Gene Symbol: SFTA2
  Gene Name: surfactant associated 2
  Uniprot ID: Q6UW10
  ENSP ID: ENSP00000407762

SEQ ID NO: 85179 - protein, 78 aa, Homo sapiens
  Payload ID: 16931
  Gene Symbol: SFTA2
  Gene Name: surfactant associated 2
  ENSP ID: ENSP00000409248
MGSGLPLVLLLTLLGSSHGTGPGMTLQLKLKESFLTSSSYESSFLELLEKLCLLLHLPSGTSVTLHHARSQHHVVCNT

SEQ ID NO: 85180 - protein, 55 aa, Homo sapiens
  Payload ID: 16931
  Gene Symbol: SFTA2
  Gene Name: surfactant associated 2
  ENSP ID: ENSP00000489572
MTLQLKLKESFLTNSSYESSFLELLEKLCLLLHLPSGTSVTLHHARSQHHVVCNT

SEQ ID NO: 85181 - protein, 76 aa, Homo sapiens
  Payload ID: 16932
  Gene Symbol: SFTA3
  Gene Name: surfactant associated 3
  ENSP ID: ENSP00000427853
MRAGFSDFQLIRDQVLFLQDQAQRLTEWLQLSGFENPVSESTTLYGGGEETSGDQLDIQSSPGHMERTNVRSARSL

SEQ ID NO: 85182 - protein, 76 aa, Homo sapiens; identical to SEQ ID NO: 85181
  Payload ID: 16932
  Gene Symbol: SFTA3
  Gene Name: surfactant associated 3
  ENSP ID: ENSP00000428198

SEQ ID NO: 85183 - protein, 95 aa, Homo sapiens
  Payload ID: 16932
  Gene Symbol: SFTA3
  Gene Name: surfactant associated 3
  ENSP ID: ENSP00000428247
MRAGFSDFQLIRDQVLFLQDQAQRLTEWLQLSGFENPVSESTTLCLREREKRIPTCVAVCVPSPGTVHTALLHPTTLSQSRSSSEAKMEKLRPRN

SEQ ID NO: 85184 - protein, 94 aa, Homo sapiens
  Payload ID: 16932
  Gene Symbol: SFTA3
  Gene Name: surfactant associated 3
  Uniprot ID: P0C7M3
  ENSP ID: ENSP00000428331
MRAGFSDFQLIRDQVLFLQDQAQRLTEWLQLSGFENPVSESTTLCLREREKRIPTCVAVCVPSPGTVHTALLHPTTLSQSRSSSEAKMLIIHTA

SEQ ID NO: 85185 - protein, 76 aa, Homo sapiens; identical to SEQ ID NO: 85181
  Payload ID: 16932
  Gene Symbol: SFTA3
  Gene Name: surfactant associated 3
  ENSP ID: ENSP00000429830

SEQ ID NO: 85186 - protein, 248 aa, Homo sapiens
  Payload ID: 16933
  Gene Symbol: SFTPA1
  Gene Name: surfactant protein A1
  Uniprot ID: Q8IWL2
  ENSP ID: ENSP00000381633
MWLCPLALNLILMAASGAVCEVKDVCVGSPGIPGTPGSHGLPGRDGRDGLKGDPGPPGPMGPPGEMPCPPGNDGLPGAPGIPGECGEKGEPGERGPPGLPAHLDEELQATLHDFRHQILQTRGALSLQGSIMTVGEKVFSSNGQSITFDAIQEACARAGGRIAVPRNPEENEAIASFVKKYNTYAYVGLTEGPSPGDFRYSDGTPVNYTNWYRGEPAGRGKEQCVEMYTDGQWNDRNCLYSRLTICEF

SEQ ID NO: 85187 - protein, 158 aa, Homo sapiens
  Payload ID: 16933
  Gene Symbol: SFTPA1
  Gene Name: surfactant protein A1
  ENSP ID: ENSP00000395527
MWLCPLALNLILMAASGAVCEVKDVCVGSPGIPGTPGSHGLPGRDGRDGLKGDPGPPGPMGPPGEMPCPPGNDGLPGAPGIPGECGEKGEPGERGPPGLPAHLDEELQATLHDFRHQILQTRGALSLQGSIMTVGEKVFSSNGQSITFDAIQEACARA

SEQ ID NO: 85188 - protein, 263 aa, Homo sapiens
  Payload ID: 16933
  Gene Symbol: SFTPA1
  Gene Name: surfactant protein A1
  Uniprot ID: Q8IWL2
  ENSP ID: ENSP00000397082
MRPCQVPGAATGPRAMWLCPLALNLILMAASGAVCEVKDVCVGSPGIPGTPGSHGLPGRDGRDGLKGDPGPPGPMGPPGEMPCPPGNDGLPGAPGIPGECGEKGEPGERGPPGLPAHLDEELQATLHDFRHQILQTRGALSLQGSIMTVGEKVFSSNGQSITFDAIQEACARAGGRIAVPRNPEENEAIASFVKKYNTYAYVGLTEGPSPGDFRYSDGTPVNYTNWYRGEPAGRGKEQCVEMYTDGQWNDRNCLYSRLTICEF

SEQ ID NO: 85189 - protein, 158 aa, Homo sapiens; identical to SEQ ID NO: 85187
  Payload ID: 16933
  Gene Symbol: SFTPA1
  Gene Name: surfactant protein A1
  ENSP ID: ENSP00000401649

SEQ ID NO: 85190 - protein, 248 aa, Homo sapiens; identical to SEQ ID NO: 85186
  Payload ID: 16933
  Gene Symbol: SFTPA1
  Gene Name: surfactant protein A1
  Uniprot ID: Q8IWL2
  ENSP ID: ENSP00000411102

SEQ ID NO: 85191 - protein, 248 aa, Homo sapiens
  Payload ID: 16934
  Gene Symbol: SFTPA2
  Gene Name: surfactant protein A2
  Uniprot ID: Q8IWL1
  ENSP ID: ENSP00000361400
MWLCPLALTLILMAASGAACEVKDVCVGSPGIPGTPGSHGLPGRDGRDGVKGDPGPPGPMGPPGETPCPPGNNGLPGAPGVPGERGEKGEAGERGPPGLPAHLDEELQATLHDFRHQILQTRGALSLQGSIMTVGEKVFSSNGQSITFDAIQEACARAGGRIAVPRNPEENEAIASFVKKYNTYAYVGLTEGPSPGDFRYSDGTPVNYTNWYRGEPAGRGKEQCVEMYTDGQWNDRNCLYSRLTICEF

SEQ ID NO: 85192 - protein, 248 aa, Homo sapiens; identical to SEQ ID NO: 85191
  Payload ID: 16934
  Gene Symbol: SFTPA2
  Gene Name: surfactant protein A2
  Uniprot ID: Q8IWL1
  ENSP ID: ENSP00000361402

SEQ ID NO: 85193 - protein, 158 aa, Homo sapiens
  Payload ID: 16934
  Gene Symbol: SFTPA2
  Gene Name: surfactant protein A2
  ENSP ID: ENSP00000397375
MWLCPLALTLILMAASGAACEVKDVCVGSPGIPGTPGSHGLPGRDGRDGVKGDPGPPGPMGPPGETPCPPGNNGLPGAPGVPGERGEKGEAGERGPPGLPAHLDEELQATLHDFRHQILQTRGALSLQGSIMTVGEKVFSSNGQSITFDAIQEACARA

SEQ ID NO: 85194 - protein, 97 aa, Homo sapiens
  Payload ID: 16934
  Gene Symbol: SFTPA2
  Gene Name: surfactant protein A2
  ENSP ID: ENSP00000473275
MWLCPLALTLILMAASGAACEVKDVCVGSPGIPGTPGSHGLPGRDGRDGVKGDPGPPGPMGPPGETPCPPGNNGLPGAPGVPGERGEKGEAGERGPP

SEQ ID NO: 85195 - protein, 381 aa, Homo sapiens
  Payload ID: 16935
  Gene Symbol: SFTPB
  Gene Name: surfactant protein B
  Uniprot ID: P07988
  ENSP ID: ENSP00000377409
MAESHLLQWLLLLLPTLCGPGTAAWTTSSLACAQGPEFWCQSLEQALQCRALGHCLQEVWGHVGADDLCQECEDIVHILNKMAKEAIFQDTMRKFLEQECNVLPLKLLMPQCNQVLDDYFPLVIDYFQNQTDSNGICMHLGLCKSRQPEPEQEPGMSDPLPKPLRDPLPDPLLDKLVLPVLPGALQARPGPHTQDLSEQQFPIPLPYCWLCRALIKRIQAMIPKGALAVAVAQVCRVVPLVAGGICQCLAERYSVILLDTLLGRMLPQLVCRLVLRCSMDDSAGPRSPTGEWLPRDSECHLCMSVTTQAGNSSEQAIPQAMLQACVGSWLDREKCKQFVEQHTPQLLTLVPRGWDAHTTCQALGVCGTMSSPLQCIHSPDL

SEQ ID NO: 85196 - protein, 393 aa, Homo sapiens
  Payload ID: 16935
  Gene Symbol: SFTPB
  Gene Name: surfactant protein B
  ENSP ID: ENSP00000386346
MHQAGYPGCRGAMAESHLLQWLLLLLPTLCGPGTAAWTTSSLACAQGPEFWCQSLEQALQCRALGHCLQEVWGHVGADDLCQECEDIVHILNKMAKEAIFQDTMRKFLEQECNVLPLKLLMPQCNQVLDDYFPLVIDYFQNQTDSNGICMHLGLCKSRQPEPEQEPGMSDPLPKPLRDPLPDPLLDKLVLPVLPGALQARPGPHTQDLSEQQFPIPLPYCWLCRALIKRIQAMIPKGALAVAVAQVCRVVPLVAGGICQCLAERYSVILLDTLLGRMLPQLVCRLVLRCSMDDSAGPRSPTGEWLPRDSECHLCMSVTTQAGNSSEQAIPQAMLQACVGSWLDREKCKQFVEQHTPQLLTLVPRGWDAHTTCQALGVCGTMSSPLQCIHSPDL

SEQ ID NO: 85197 - protein, 374 aa, Homo sapiens
  Payload ID: 16935
  Gene Symbol: SFTPB
  Gene Name: surfactant protein B
  ENSP ID: ENSP00000415347
  MOD_RES (1)..(1): Any amino acid
XHLLQWLLLLLPTLCGPGTAAWTTSSLACAQGPEFWCQSLEQALQCRALGHCLQEVWGHVGADDLCQECEDIVHILNKMAKEAIFQDTMRKFLEQECNVLPLKLLMPQCNQVLDDYFPLVIDYFQNQTDSNGICMHLGLCKSRQPEPEQEPGMSDPLPKPLRDPLPDPLLDKLVLPVLPGALQARPGPHTQDLSEQQFPIPLPYCWLCRALIKRIQAMIPKGALAVAVAQVCRVVPLVAGGICQCLAERYSVILLDTLLGRMLPQLVCRLVLRCSMDDSAGPREWLPRDSECHLCMSVTTQAGNSSEQAIPQAMLQACVGSWLDREKCKQFVEQHTPQLLTLVPRGWDAHTTCQALGVCGTMSSPLQCIHSPDL

SEQ ID NO: 85198 - protein, 381 aa, Homo sapiens; identical to SEQ ID NO: 85195
  Payload ID: 16935
  Gene Symbol: SFTPB
  Gene Name: surfactant protein B
  Uniprot ID: P07988
  ENSP ID: ENSP00000428719

SEQ ID NO: 85199 - protein, 92 aa, Homo sapiens
  Payload ID: 16935
  Gene Symbol: SFTPB
  Gene Name: surfactant protein B
  ENSP ID: ENSP00000476194
  MOD_RES (1)..(1): Any amino acid
XEWLPRDSECHLCMSVTTQAGNSSEQAIPQAMLQACVGSWLDREKCKQFVEQHTPQLLTLVPRGWDAHTTCQALGVCGTMSSPLQCIHSPDL

SEQ ID NO: 85200 - protein, 197 aa, Homo sapiens [sequence omitted]

SEQ ID NO: 85201 - protein, 161 aa, Homo sapiens
  Payload ID: 16936
  Gene Symbol: SFTPC
  Gene Name: surfactant protein C
  ENSP ID: ENSP00000407931
MDVGSKEVLMESPPDYSAAPRGRFGIPCCPVHLKRLLIVVVVVVLIVVVIVGALLMGLHMSQKHTEMVLEMSIGAPEAQQRLALSEHLVTTATFSIGSTGLVVYDYQQLLIAYKPAPGTCCYIMKIAPESIPSLEALTRKVHNFQHSPSLLMRKLRLREIA

SEQ ID NO: 85202 - protein, 150 aa, Homo sapiens
  Payload ID: 16936
  Gene Symbol: SFTPC
  Gene Name: surfactant protein C
  ENSP ID: ENSP00000429496
MDVGSKEVLMESPPDYSAAPRGRFGIPCCPVHLKRLLIVVVVVVLIVVVIVGALLMGLHMSQKHTEMVLEMSIGAPEAQQRLALSEHLVTTATFSIGSTGLVVYDYQQLLIAYKPAPGTCCYIMKIAPESIPSLEALTRKVHNFQVCVCG

SEQ ID NO: 85203 - protein, 144 aa, Homo sapiens
  Payload ID: 16936
  Gene Symbol: SFTPC
  Gene Name: surfactant protein C
  ENSP ID: ENSP00000429552
MDVGSKEVLMESPPVLEMSIGAPEAQQRLALSEHLVTTATFSIGSTGLVVYDYQQLLIAYKPAPGTCCYIMKIAPESIPSLEALTRKVHNFQMECSLQAKPAVPTSKLGQAEGRDAGSAPSGGDPAFLGMAVSTLCGEVPLYYI

SEQ ID NO: 85204 - protein, 124 aa, Homo sapiens
  Payload ID: 16936
  Gene Symbol: SFTPC
  Gene Name: surfactant protein C
  ENSP ID: ENSP00000429619
MDVGSKEVLMESPPVLEMSIGAPEAQQRLALSEHLVTTATFSIGSTGLVVYDYQQLLIAYKPAPGTCCYIMKIAPESIPSLEALTRKVHNFQAKPAVPTSKLGQAEGRDAGSAPSGGDPAFLGM

SEQ ID NO: 85205 - protein, 155 aa, Homo sapiens
  Payload ID: 16936
  Gene Symbol: SFTPC
  Gene Name: surfactant protein C
  ENSP ID: ENSP00000430266
MDVGSKEVLMESPPVLEMSIGAPEAQQRLALSEHLVTTATFSIGSTGLVVYDYQQLLIAYKPAPGTCCYIMKIAPESIPSLEALTRKVHNFQGQWKPQRERKRPGQRVFCSFCRRARSCFCPHRRDKPWRNGSLGRGWEWAEVAPRGPGTPATTE

SEQ ID NO: 85206 - protein, 191 aa, Homo sapiens
  Payload ID: 16936
  Gene Symbol: SFTPC
  Gene Name: surfactant protein C
  ENSP ID: ENSP00000430410
MDVGSKEVLMESPPDYSAAPRGRFGIPCCPVHLKRLLIVVVVVVLIVVVIVGALLMGLHMSQKHTEMVLEMSIGAPEAQQRLALSEHLVTTATFSIGSTGLVVYDYQQLLIAYKPAPGTCCYIMKIAPESIPSLEALTRKVHNFQAKPAVPTSKLGQAEGRDAGSAPSGGDPAFLGMAVSTLCGEVPLYYI

SEQ ID NO: 85207 - protein, 375 aa, Homo sapiens
  Payload ID: 16937
  Gene Symbol: SFTPD
  Gene Name: surfactant protein D
  Uniprot ID: P35247
  ENSP ID: ENSP00000361366
MLLFLLSALVLLTQPLGYLEAEMKTYSHRTMPSACTLVMCSSVESGLPGRDGRDGREGPRGEKGDPGLPGAAGQAGMPGQAGPVGPKGDNGSVGEPGPKGDTGPSGPPGPPGVPGPAGREGPLGKQGNIGPQGKPGPKGEAGPKGEVGAPGMQGSAGARGLAGPKGERGVPGERGVPGNTGAAGSAGAMGPQGSPGARGPPGLKGDKGIPGDKGAKGESGLPDVASLRQQVEALQGQVQHLQAAFSQYKKVELFPNGQSVGEKIFKTAGFVKPFTEAQLLCTQAGGQLASPRSAAENAALQQLVVAKNEAAFLSMTDSKTEGKFTYPTGESLVYSNWAPGEPNDDGGSEDCVEIFTNGKWNDRACGEKRLVVCEF

SEQ ID NO: 85208 - protein, 218 aa, Homo sapiens
  Payload ID: 16937
  Gene Symbol: SFTPD
  Gene Name: surfactant protein D
  ENSP ID: ENSP00000394325
MFLSTSKHGRQEAMLLFLLSALVLLTQPLGYLEAEMKTYSHRTMPSACTLVMCSSVESGLPGRDGRDGREGPRGEKGDPGLPGAAGQAGMPGQAGPVGPKGDNGSVGEPGPKGDTGPSGPPGPPGVPGPAGREGPLGKQGNIGPQGKPGPKGEAGPKGEVGAPGMQGSAGARGLAGPKGERGVPGERGVPGNTGAAGSAGAMGPQGSPGARGPPGLKG

SEQ ID NO: 85209 - protein, 300 aa, Homo sapiens
  Payload ID: 16938
  Gene Symbol: SURF1
  Gene Name: surfeit 1
  Uniprot ID: Q15526
  ENSP ID: ENSP00000361042
MAAVAALQLGLRAAGLGRAPASAAWRSVLRVSPRPGVAWRPSRCGSSAAEASATKAEDDSFLQWVLLLIPVTAFGLGTWQVQRRKWKLNLIAELESRVLAEPVPLPADPMELKNLEYRPVKVRGCFDHSKELYMMPRTMVDPVREAREGGLISSSTQSGAYVVTPFHCTDLGVTILVNRGFVPRKKVNPETRQKGQIEGEVDLIGMVRLTETRQPFVPENNPERNHWHYRDLEAMARITGAEPIFIDANFQSTVPGGPIGGQTRVTLRNEHLQYIVTWYGLSAATSYLWFKKFLRGTPGV

SEQ ID NO: 85210 - protein, 191 aa, Homo sapiens
  Payload ID: 16938
  Gene Symbol: SURF1
  Gene Name: surfeit 1
  ENSP ID: ENSP00000482067
MELKNLEYRPVKVRGCFDHSKELYMMPRTMVDPVREAREGGLISSSTQSGAYVVTPFHCTDLGVTILVNRGFVPRKKVNPETRQKGQIEGEVDLIGMVRLTETRQPFVPENNPERNHWHYRDLEAMARITGAEPIFIDANFQSTVPGGPIGGQTRVTLRNEHLQYIVTWYGLSAATSYLWFKKFLRGTPGV

SEQ ID NO: 85211 - protein, 191 aa, Homo sapiens; identical to SEQ ID NO: 85210
  Payload ID: 16938
  Gene Symbol: SURF1
  Gene Name: Surfeit 1
  ENSP ID: ENSP00000486289

SEQ ID NO: 85212 - protein, 300 aa, Homo sapiens; identical to SEQ ID NO: 85209
  Payload ID: 16938
  Gene Symbol: SURF1
  Gene Name: Surfeit 1
  ENSP ID: ENSP00000487158

SEQ ID NO: 85213 - protein, 256 aa, Homo sapiens
  Payload ID: 16939
  Gene Symbol: SURF2
  Gene Name: surfeit 2
  Uniprot ID: Q15527
  ENSP ID: ENSP00000361032
MSELPGDVRAFLREHPSLRLQTDARKVRCILTGHELPCRLPELQVYTRGKKYQRLVRASPAFDYAEFEPHIVPSTKNPHQLFCKLTLRHINKCPEHVLRHTQGRRYQRALCKYEECQKQGVEYVPACLVHRRRRREDQMDGDGPRPREAFWEPTSSDEGGAASDDSMTDLYPPELFTRKDLGSTEDGDGTDDFLTDKEDEKAKPPREKATDEGRRETTVYRGLVQKRGKKQLGSLKKKFKSHHRKPKSFSSCKQPG

SEQ ID NO: 85214 - protein, 256 aa, Homo sapiens; identical to SEQ ID NO: 85213
  Payload ID: 16939
  Gene Symbol: SURF2
  Gene Name: Surfeit 2
  ENSP ID: ENSP00000487370

SEQ ID NO: 85215 - protein, 269 aa, Homo sapiens; identical to SEQ ID NO: 38914
  Payload ID: 16940
  Gene Symbol: SURF4
  Gene Name: surfeit 4
  Uniprot ID: O15260
  ENSP ID: ENSP00000361057

SEQ ID NO: 85216 - protein, 186 aa, Homo sapiens; identical to SEQ ID NO: 38917
  Payload ID: 16940
  Gene Symbol: SURF4
  Gene Name: surfeit 4
  ENSP ID: ENSP00000361059

SEQ ID NO: 85217 - protein, 159 aa, Homo sapiens; identical to SEQ ID NO: 38918
  Payload ID: 16940
  Gene Symbol: SURF4
  Gene Name: surfeit 4
  Uniprot ID: O15260
  ENSP ID: ENSP00000419853

SEQ ID NO: 85218 - protein, 128 aa, Homo sapiens; identical to SEQ ID NO: 38916
  Payload ID: 16940
  Gene Symbol: SURF4
  Gene Name: surfeit 4
  Uniprot ID: O15260
  ENSP ID: ENSP00000446061

SEQ ID NO: 85219 - protein, 226 aa, Homo sapiens; identical to SEQ ID NO: 38913
  Payload ID: 16940
  Gene Symbol: SURF4
  Gene Name: surfeit 4
  ENSP ID: ENSP00000481666

SEQ ID NO: 85220 - protein, 226 aa, Homo sapiens; identical to SEQ ID NO: 38913
  Payload ID: 16940
  Gene Symbol: SURF4
  Gene Name: surfeit 4
  ENSP ID: ENSP00000483216

SEQ ID NO: 85221 - protein, 361 aa, Homo sapiens
  Payload ID: 16941
  Gene Symbol: SURF6
  Gene Name: surfeit 6
  Uniprot ID: O75683
  ENSP ID: ENSP00000361092
MASLLAKDAYLQSLAKKICSHSAPEQQARTRAGKTQGSETAGPPKKKRKKTQKKFRKREEKAAEHKAKSLGEKSPAASGARRPEAAKEEAAWASSSAGNPADGLATEPESVFALDVLRQRLHEKIQEARGQGSAKELSPAALEKRRRRKQERDRKKRKRKELRAKEKARKAEEATEAQEVVEATPEGACTEPREPPGLIFNKVEVSEDEPASKAQRRKEKRQRVKGNLTPLTGRNYRQLLERLQARQSRLDELRGQDEGKAQELEAKMKWTNLLYKAEGVKIRDDERLLQEALKRKEKRRAQRQRRWEKRTAGVVEKMQQRQDRRRQNLRRKKAARAERRLLRARKKGRILPQDLERAGLV

SEQ ID NO: 85222 - protein, 361 aa, Homo sapiens; identical to SEQ ID NO: 85221
  Payload ID: 16942
  Gene Symbol:
  Gene Name: Surfeit locus protein 6  [Source:UniProtKB/Swiss-Prot
  Acc:O75683]
  Uniprot ID: O75683
  ENSP ID: ENSP00000485909

SEQ ID NO: 85223 - protein, 645 aa, Homo sapiens
  Payload ID: 16943
  Gene Symbol: SUGP1
  Gene Name: SURP and G patch domain containing 1
  Uniprot ID: Q8IWZ8
  ENSP ID: ENSP00000247001
MSLKMDNRDVAGKANRWFGVAPPKSGKMNMNILHQEELIAQKKREIEAKMEQKAKQNQVASPQPPHPGEITNAHNSSCISNKFANDGSFLQQFLKLQKAQTSTDAPTSAPSAPPSTPTPSAGKRSLLISRRTGLGLASLPGPVKSYSHAKQLPVAHRPSVFQSPDEDEEEDYEQWLEIKVSPPEGAETRKVIEKLARFVAEGGPELEKVAMEDYKDNPAFAFLHDKNSREFLYYRKKVAEIRKEAQKSQAASQKVSPPEDEEVKNLAEKLARFIADGGPEVETIALQNNRENQAFSFLYEPNSQGYKYYRQKLEEFRKAKASSTGSFTAPDPGLKRKSPPEALSGSLPPATTCPASSTPAPTIIPAPAAPGKPASAATVKRKRKSRWGPEEDKVELPPAELVQRDVDASPSPLSVQDLKGLGYEKGKPVGLVGVTELSDAQKKQLKEQQEMQQMYDMIMQHKRAMQDMQLLWEKAVQQHQHGYDSDEEVDSELGTWEHQLRRMEMDKTREWAEQLTKMGRGKHFIGDFLPPDELEKFMETFKALKEGREPDYSEYKEFKLTVENIGYQMLMKMGWKEGEGLGSEGQGIKNPVNKGTTTVDGAGFGIDRPAELSKEDDEYEAFRKRMMLAYRFRPNPLNNPRRPYY

SEQ ID NO: 85224 - protein, 185 aa, Homo sapiens
  Payload ID: 16943
  Gene Symbol: SUGP1
  Gene Name: SURP and G patch domain containing 1
  ENSP ID: ENSP00000439172
MSLKMDNRDVAGKANRWFGVAPPKSGKMNMNILHQEELIAQKKREIEAKMEQKAKQNQVASPQPPHPGEITNAHNSSCISNKFANDGSFLQQFLKLQKAQTSTDAPTSAPSAPPSTPTPSAGKRSLLISRRTGLGLASLPGPVKSYSHAKQLPVAHRPSVFQSPDEDEEEDYEQWLEIKGRRWLR

SEQ ID NO: 85225 - protein, 222 aa, Homo sapiens
  Payload ID: 16943
  Gene Symbol: SUGP1
  Gene Name: SURP and G patch domain containing 1
  Uniprot ID: Q8IWZ8
  ENSP ID: ENSP00000465413
MSLKMDNRDVAGKANRWFGVAPPKSGKMNMNILHQEELIAQKKREIEAKMEQKAKQNQVASPQPPHPGEITNAHNSSCISNKFANDGSFLQQFLKLQKAQTSTDAPTSAPSAPPSTPTPSAGKRSLLISRRTGLGLASLPGPVKSYSHAKQLPVAHRPSVFQSPDEDEEEDYEQWLEIKVCLTKTVRPTPPSSWCFVPGLGTPDSLLHLTLFSPHPLCRCGP

SEQ ID NO: 85226 - protein, 129 aa, Homo sapiens
  Payload ID: 16943
  Gene Symbol: SUGP1
  Gene Name: SURP and G patch domain containing 1
  ENSP ID: ENSP00000466188
MSLKMDNRDVAGKANRWFGVAPPKSGKMNMNILHQEELIAQKKREIEAKMEQKAKQNQVASPQPPHPGERPDQCAQRPSQHTHPQRWEEVPAHQQADRPGAGQPAGPCEELLPRQAAARGAPPECLPVP

SEQ ID NO: 85227 - protein, 78 aa, Homo sapiens
  Payload ID: 16943
  Gene Symbol: SUGP1
  Gene Name: SURP and G patch domain containing 1
  ENSP ID: ENSP00000466402
  MOD_RES (1)..(1): Any amino acid
XETRKVIEKLARFVAEGGPELEKVAMEDYKDNPAFAFLHDKNSREFLYYRKKVAEIRKEAQKSQAASQKEIRLLGVVS

SEQ ID NO: 85228 - protein, 36 aa, Homo sapiens
  Payload ID: 16943
  Gene Symbol: SUGP1
  Gene Name: SURP and G patch domain containing 1
  ENSP ID: ENSP00000468499
MSLKMDNRDVAESQMHTTLPAFPTSLPTMVASCSSF

SEQ ID NO: 85229 - protein, 69 aa, Homo sapiens
  Payload ID: 16943
  Gene Symbol: SUGP1
  Gene Name: SURP and G patch domain containing 1
  ENSP ID: ENSP00000468771
MSLKMDNRDVAGKANRWFGVAPPKSGKMNMNILHQEELIAQKKREIEAKMEQKAKQNQVASPQPPHPGE

SEQ ID NO: 85230 - protein, 242 aa, Homo sapiens
  Payload ID: 16943
  Gene Symbol: SUGP1
  Gene Name: SURP and G patch domain containing 1
  ENSP ID: ENSP00000477290
MLQEELIAQKKREIEAKMEQKAKQNQVASPQPPHPGEITNAHNSSCISNKFANDGSFLQQFLKLQKAQTSTDAPTSAPSAPPSTPTPSAGKRSLLISRRTGLGLASLPGPVKSYSHAKQLPVAHRPSVFQSPDEDEEEDYEQWLEIKVSPPEGAETRKVIEKLARFVAEGGPELEKVAMEDYKDNPAFAFLHDKNSREFLYYRKKVAEIRKEAQKSQAASQKVSPPEDEEVKNLAEKLARFI

SEQ ID NO: 85231 - protein, 1030 aa, Homo sapiens
  Payload ID: 16944
  Gene Symbol: SUGP2
  Gene Name: SURP and G patch domain containing 2
  Uniprot ID: Q8IX01
  ENSP ID: ENSP00000332373
MAARRITQETFDAVLQEKAKRYHMDASGEAVSETLQFKAQDLLRAVPRSRAEMYDDVHSDGRYSLSGSVAHSRDAGREGLRSDVFPGPSFRSSNPSISDDSYFRKECGRDLEFSHSDSRDQVIGHRKLGHFRSQDWKFALRGSWEQDFGHPVSQESSWSQEYSFGPSAVLGDFGSSRLIEKECLEKESRDYDVDHPGEADSVLRGGSQVQARGRALNIVDQEGSLLGKGETQGLLTAKGGVGKLVTLRNVSTKKIPTVNRITPKTQGTNQIQKNTPSPDVTLGTNPGTEDIQFPIQKIPLGLDLKNLRLPRRKMSFDIIDKSDVFSRFGIEIIKWAGFHTIKDDIKFSQLFQTLFELETETCAKMLASFKCSLKPEHRDFCFFTIKFLKHSALKTPRVDNEFLNMLLDKGAVKTKNCFFEIIKPFDKYIMRLQDRLLKSVTPLLMACNAYELSVKMKTLSNPLDLALALETTNSLCRKSLALLGQTFSLASSFRQEKILEAVGLQDIAPSPAAFPNFEDSTLFGREYIDHLKAWLVSSGCPLQVKKAEPEPMREEEKMIPPTKPEIQAKAPSSLSDAVPQRADHRVVGTIDQLVKRVIEGSLSPKERTLLKEDPAYWFLSDENSLEYKYYKLKLAEMQRMSENLRGADQKPTSADCAVRAMLYSRAVRNLKKKLLPWQRRGLLRAQGLRGWKARRATTGTQTLLSSGTRLKHHGRQAPGLSQAKPSLPDRNDAAKDCPPDPVGPSPQDPSLEASGPSPKPAGVDISEAPQTSSPCPSADIDMKTMETAEKLARFVAQVGPEIEQFSIENSTDNPDLWFLHDQNSSAFKFYRKKVFELCPSICFTSSPHNLHTGGGDTTGSQESPVDLMEGEAEFEDEPPPREAELESPEASSGTCFPRKRISSKSLKVGMIPAPKRVCLIQEPKVHEPVRIAYDRPRGRPMSKKKKPKDLDFAQQKLTDKNLGFQMLQKMGWKEGHGLGSLGKGIREPVSVGTPSEGEGLGADGQEHKEDTFDVFRQRMMQMYRHKRANK

SEQ ID NO: 85232 - protein, 1082 aa, Homo sapiens
  Payload ID: 16944
  Gene Symbol: SUGP2
  Gene Name: SURP and G patch domain containing 2
  Uniprot ID: Q8IX01
  ENSP ID: ENSP00000337926
MAARRITQETFDAVLQEKAKRYHMDASGEAVSETLQFKAQDLLRAVPRSRAEMYDDVHSDGRYSLSGSVAHSRDAGREGLRSDVFPGPSFRSSNPSISDDSYFRKECGRDLEFSHSDSRDQVIGHRKLGHFRSQDWKFALRGSWEQDFGHPVSQESSWSQEYSFGPSAVLGDFGSSRLIEKECLEKESRDYDVDHPGEADSVLRGGSQVQARGRALNIVDQEGSLLGKGETQGLLTAKGGVGKLVTLRNVSTKKIPTVNRITPKTQGTNQIQKNTPSPDVTLGTNPGTEDIQFPIQKIPLGLDLKNLRLPRRKMSFDIIDKSDVFSRFGIEIIKWAGFHTIKDDIKFSQLFQTLFELETETCAKMLASFKCSLKPEHRDFCFFTIKFLKHSALKTPRVDNEFLNMLLDKGAVKTKNCFFEIIKPFDKYIMRLQDRLLKSVTPLLMACNAYELSVKMKTLSNPLDLALALETTNSLCRKSLALLGQTFSLASSFRQEKILEAVGLQDIAPSPAAFPNFEDSTLFGREYIDHLKAWLVSSGCPLQVKKAEPEPMREEEKMIPPTKPEIQAKAPSSLSDAVPQRADHRVVGTIDQLVKRVIEGSLSPKERTLLKEDPAYWFLSDENSLEYKYYKLKLAEMQRMSENLRGADQKPTSADCAVRAMLYSRAVRNLKKKLLPWQRRGLLRAQGLRGWKARRATTGTQTLLSSGTRLKHHGRQAPGLSQAKPSLPDRNDAAKDCPPDPVGPSPQDPSLEASGPSPKPAGVDISEAPQTSSPCPSADIDMKTMETAEKLARFVAQVGPEIEQFSIENSTDNPDLWFLHDQNSSAFKFYRKKVFELCPSICFTSSPHNLHTGGGDTTGSQESPVDLMEGEAEFEDEPPPREAELESPEVMPEEEDEDDEDGGEEAPAPGGAGKSEGSTPADGLPGEAAEDDLAGAPALSQASSGTCFPRKRISSKSLKVGMIPAPKRVCLIQEPKVHEPVRIAYDRPRGRPMSKKKKPKDLDFAQQKLTDKNLGFQMLQKMGWKEGHGLGSLGKGIREPVSVGTPSEGEGLGADGQEHKEDTFDVFRQRMMQMYRHKRANK

SEQ ID NO: 85233 - protein, 1082 aa, Homo sapiens; identical to SEQ ID NO: 85232
  Payload ID: 16944
  Gene Symbol: SUGP2
  Gene Name: SURP and G patch domain containing 2
  Uniprot ID: Q8IX01
  ENSP ID: ENSP00000389380

SEQ ID NO: 85234 - protein, 1040 aa, Homo sapiens
  Payload ID: 16944
  Gene Symbol: SUGP2
  Gene Name: SURP and G patch domain containing 2
  Uniprot ID: Q8IX01
  ENSP ID: ENSP00000470915
MAARRITQETFDAVLQEKAKRYHMDASGEAVSETLQFKAQDLLRAVPRSRAEMYDDVHSDGRYSLSGSVAHSRDAGREGLRSDVFPGPSFRSSNPSISDDSYFRKECGRDLEFSHSDSRDQVIGHRKLGHFRSQDWKFALRGSWEQDFGHPVSQESSWSQEYSFGPSAVLGDFGSSRLIEKECLEKESRDYDVDHPGEADSVLRGGSQVQARGRALNIVDQEGSLLGKGETQGLLTAKGGVGKLVTLRNVSTKKIPTVNRITPKTQGTNQIQKNTPSPDVTLGTNPGTEDIQFPIQKIPLGLDLKNLRLPRRKMSFDIIDKSDVFSRFGIEIIKWAGFHTIKDDIKFSQLFQTLFELETETCAKMLASFKCSLKPEHRDFCFFTIKFLKHSALKTPRVDNEFLNMLLDKGAVKTKNCFFEIIKPFDKYIMRLQDRLLKSVTPLLMACNAYELSVKMKTLSNPLDLALALETTNSLCRKSLALLGQTFSLASSFRQEKILEAVGLQDIAPSPAAFPNFEDSTLFGREYIDHLKAWLVSSGCPLQVKKAEPEPMREEEKMIPPTKPEIQAKAPSSLSDAVPQRADHRVVGTIDQLVKRVIEGSLSPKERTLLKEDPAYWFLSDENSLEYKYYKLKLAEMQRMSENLRGADQKPTSADCAVRAMLYSRAVRNLKKKLLPWQRRGLLRAQGLRGWKARRATTGTQTLLSSGTRLKHHGRQAPGLSQAKPSLPDRNDAAKDCPPDPVGPSPQDPSLEASGPSPKPAGVDISEAPQTSSPCPSADIDMKTMETAEKLARFVAQVGPEIEQFSIENSTDNPDLWFLHDQNSSAFKFYRKKVFELCPSICFTSSPHNLHTGGGDTTGSQESPVDLMEGEAEFEDEPPPREAELESPEASSGTCFPRKRISSKSLKVGMIPAPKRVCLIQEPKVHEPVRIAYDRPRGRPMSKKKKPKDLDFAQQKLTDKNLGFQMLQKMGWKEGHGLGSLGKGIREPVSVYAAGSLGWEWVGPQSFHLQPAAWLLHSQDGLQLAVDFCFLNRRHLQMRS

SEQ ID NO: 85235 - protein, 111 aa, Homo sapiens
  Payload ID: 16944
  Gene Symbol: SUGP2
  Gene Name: SURP and G patch domain containing 2
  ENSP ID: ENSP00000471042
MAARRITQETFDAVLQEKAKRYHMDASGEAVSETLQFKAQDLLRAVPRSRAEMYDDVHSDGRYSLSGSVAHSRDAGREGLRSDVFPGPSFRSSNPSISDDSYFRKECGRDL

SEQ ID NO: 85236 - protein, 53 aa, Homo sapiens
  Payload ID: 16944
  Gene Symbol: SUGP2
  Gene Name: SURP and G patch domain containing 2
  ENSP ID: ENSP00000472183
  MOD_RES (1)..(1): Any amino acid
XHEPVRIAYDRPRGRPMSKKKGPGRAQLPEGPDGCPVSHLSRNPRTWTSPSRS

SEQ ID NO: 85237 - protein, 170 aa, Homo sapiens
  Payload ID: 16944
  Gene Symbol: SUGP2
  Gene Name: SURP and G patch domain containing 2
  ENSP ID: ENSP00000472244
  MOD_RES (1)..(1): Any amino acid
XLQEKAKRYHMDASGEAVSETLQFKAQDLLRAVPRSRAEMYDDVHSDGRYSLSGSVAHSRDAGREGLRSDVFPGPSFRSSNPSISDDSYFRKECGRDLEFSHSDSRDQVIGHRKLGHFRSQDWKFALRGSWEQDFGHPVSQESSWSQEYSFDPSGAGSEESSAPQKKDEL

SEQ ID NO: 85238 - protein, 1082 aa, Homo sapiens; identical to SEQ ID NO: 85232
  Payload ID: 16944
  Gene Symbol: SUGP2
  Gene Name: SURP and G patch domain containing 2
  Uniprot ID: Q8IX01
  ENSP ID: ENSP00000472286

SEQ ID NO: 85239 - protein, 65 aa, Homo sapiens
  Payload ID: 16944
  Gene Symbol: SUGP2
  Gene Name: SURP and G patch domain containing 2
  ENSP ID: ENSP00000472878
  MOD_RES (1)..(1): Any amino acid
XSGTCFPRKRISSKSLKVGMIPAPKRVCLIQEPKEARTHQYSRAEACSQNGSLVPLQSPARFSNH

SEQ ID NO: 85240 - protein, 1096 aa, Homo sapiens
  Payload ID: 16944
  Gene Symbol: SUGP2
  Gene Name: SURP and G patch domain containing 2
  ENSP ID: ENSP00000472914
MSPPRAAAAAGQNNMAARRITQETFDAVLQEKAKRYHMDASGEAVSETLQFKAQDLLRAVPRSRAEMYDDVHSDGRYSLSGSVAHSRDAGREGLRSDVFPGPSFRSSNPSISDDSYFRKECGRDLEFSHSDSRDQVIGHRKLGHFRSQDWKFALRGSWEQDFGHPVSQESSWSQEYSFGPSAVLGDFGSSRLIEKECLEKESRDYDVDHPGEADSVLRGGSQVQARGRALNIVDQEGSLLGKGETQGLLTAKGGVGKLVTLRNVSTKKIPTVNRITPKTQGTNQIQKNTPSPDVTLGTNPGTEDIQFPIQKIPLGLDLKNLRLPRRKMSFDIIDKSDVFSRFGIEIIKWAGFHTIKDDIKFSQLFQTLFELETETCAKMLASFKCSLKPEHRDFCFFTIKFLKHSALKTPRVDNEFLNMLLDKGAVKTKNCFFEIIKPFDKYIMRLQDRLLKSVTPLLMACNAYELSVKMKTLSNPLDLALALETTNSLCRKSLALLGQTFSLASSFRQEKILEAVGLQDIAPSPAAFPNFEDSTLFGREYIDHLKAWLVSSGCPLQVKKAEPEPMREEEKMIPPTKPEIQAKAPSSLSDAVPQRADHRVVGTIDQLVKRVIEGSLSPKERTLLKEDPAYWFLSDENSLEYKYYKLKLAEMQRMSENLRGADQKPTSADCAVRAMLYSRAVRNLKKKLLPWQRRGLLRAQGLRGWKARRATTGTQTLLSSGTRLKHHGRQAPGLSQAKPSLPDRNDAAKDCPPDPVGPSPQDPSLEASGPSPKPAGVDISEAPQTSSPCPSADIDMKTMETAEKLARFVAQVGPEIEQFSIENSTDNPDLWFLHDQNSSAFKFYRKKVFELCPSICFTSSPHNLHTGGGDTTGSQESPVDLMEGEAEFEDEPPPREAELESPEVMPEEEDEDDEDGGEEAPAPGGAGKSEGSTPADGLPGEAAEDDLAGAPALSQASSGTCFPRKRISSKSLKVGMIPAPKRVCLIQEPKVHEPVRIAYDRPRGRPMSKKKKPKDLDFAQQKLTDKNLGFQMLQKMGWKEGHGLGSLGKGIREPVSVGTPSEGEGLGADGQEHKEDTFDVFRQRMMQMYRHKRANK

SEQ ID NO: 85241 - protein, 841 aa, Homo sapiens
  Payload ID: 16944
  Gene Symbol: SUGP2
  Gene Name: SURP and G patch domain containing 2
  ENSP ID: ENSP00000473187
MAARRITQETFDAVLQEKAKRYHMDASGEAVSETLQFKAQDLLRAVPRSRAEMYDDVHSDGRYSLSGSVAHSRDAGREGLRSDVFPGPSFRSSNPSISDDSYFRKECGRDLEFSHSDSRDQVIGHRKLGHFRSQDWKFALRGSWEQDFGHPVSQESSWSQEYSFGPSAVLGDFGSSRLIEKECLEKESRDYDVDHPGEADSVLRGGSQVQARGRALNIVDQEGSLLGKGETQGLLTAKGGVGKLVTLRNVSTKKIPTVNRITPKTQGTNQIQKNTPSPDVTLGTNPGTEDIQFPIQKIPLGLDLKNLRLPRRKMSFDIIDKSDVFSRFGIEIIKWAGFHTIKDDIKFSQLFQTLFELETETCAKMLASFKCSLKPEHRDFCFFTIKFLKHSALKTPRVDNEFLNMLLDKGAVKTKNCFFEIIKPFDKYIMRLQDRLLKSVTPLLMACNAYELSVKMKTLSNPLDLALALETTNSLCRKSLALLGQTFSLASSFRQEKILEAVGLQDIAPSPAAFPNFEDSTLFGREYIDHLKAWLVSSGCPLQVKKAEPEPMREEEKMIPPTKPEIQAKAPSSLSDAVPQRADHRVVGTIDQLVKRVIEGSLSPKERTLLKEDPAYWFLSDENSLEYKYYKLKLAEMQRMSENLRGADQKPTSADCAVRAMLYSRAVRNLKKKLLPWQRRGLLRAQGLRGWKARRATTGTQTLLSSGTRLKHHGRQAPGLSQAKPSLPDRNDAAKDCPPDPVGPSPQDPSLEASGPSPKPAGVDISEAPQTSSPCPSADIDMKTMETAEKLARFVAQVGPEIEQFSIENSTDNPDLWGPAFISGIRKNLPRGTFNLHPKAK

SEQ ID NO: 85242 - protein, 238 aa, Homo sapiens
  Payload ID: 16945
  Gene Symbol: SMNDC1
  Gene Name: survival motor neuron domain containing 1
  Uniprot ID: O75940
  ENSP ID: ENSP00000358605
MSEDLAKQLASYKAQLQQVEAALSGNGENEDLLKLKKDLQEVIELTKDLLSTQPSETLASSDSFASTQPTHSWKVGDKCMAVWSEDGQCYEAEIEEIDEENGTAAITFAGYGNAEVTPLLNLKPVEEGRKAKEDSGNKPMSKKEMIAQQREYKKKKALKKAQRIKELEQEREDQKVKWQQFNNRAYSKNKKGQVKRSIFASPESVTGKVGVGTCGIADKPMTQYQDTSKYNVRHLMPQ

SEQ ID NO: 85243 - protein, 238 aa, Homo sapiens; identical to SEQ ID NO: 85242
  Payload ID: 16945
  Gene Symbol: SMNDC1
  Gene Name: survival motor neuron domain containing 1
  Uniprot ID: O75940
  ENSP ID: ENSP00000358616

SEQ ID NO: 85244 - protein, 294 aa, Homo sapiens
  Payload ID: 16946
  Gene Symbol: SMN1
  Gene Name: survival of motor neuron 1, telomeric
  Uniprot ID: Q16637
  ENSP ID: ENSP00000305857
MAMSSGGSGGGVPEQEDSVLFRRGTGQSDDSDIWDDTALIKAYDKAVASFKHALKNGDICETSGKPKTTPKRKPAKKNKSQKKNTAASLQQWKVGDKCSAIWSEDGCIYPATIASIDFKRETCVVVYTGYGNREEQNLSDLLSPICEVANNIEQNAQENENESQVSTDESENSRSPGNKSDNIKPKSAPWNSFLPPPPPMPGPRLGPGKPGLKFNGPPPPPPPPPPHLLSCWLPPFPSGPPIIPPPPPICPDSLDDADALGSMLISWYMSGYHTGYYMGFRQNQKEGRCSHSLN

SEQ ID NO: 85245 - protein, 294 aa, Homo sapiens; identical to SEQ ID NO: 85244
  Payload ID: 16946
  Gene Symbol: SMN1
  Gene Name: survival of motor neuron 1, telomeric
  Uniprot ID: Q16637
  ENSP ID: ENSP00000370083

SEQ ID NO: 85246 - protein, 294 aa, Homo sapiens
  Payload ID: 16946
  Gene Symbol: SMN1
  Gene Name: survival of motor neuron 1, telomeric
  ENSP ID: ENSP00000422679
MAMSSGGSGGGVPEQEDSVLFRRGTGQSDDSDIWDDTALIKAYDKAVASFKHALKNGDICETSGKPKTTPKRKPAKKNKSQKKNTAASLQQWKVGDKCSAIWSEDGCIYPATIASIDFKRETCVVVYTGYGNREEQNLSDLLSPICEVANNIEQNAQENENESQVSTDESENSRSPGNKSDNIKPKSAPWNSFLPPPPPMPGPRLGPGKPGLKFNGPPPPPPPPPPHLLSCWLPPFPSGPPIIPPPPPICPDSLDDADALGSMLISWYMSGYHTGYYMTGFHCVSQDGLNLLTP

SEQ ID NO: 85247 - protein, 227 aa, Homo sapiens
  Payload ID: 16946
  Gene Symbol: SMN1
  Gene Name: survival of motor neuron 1, telomeric
  ENSP ID: ENSP00000423298
MAMSSGGSGGGVPEQEDSVLFRRGTGQSDDSDIWDDTALIKAYDKAVASFKHALKNGDICETSGKPKTTPKRKPAKKNKSQKKNTAASLQQNENESQVSTDESENSRSPGNKSDNIKPKSAPWNSFLPPPPPMPGPRLGPGKPGLKFNGPPPPPPPPPPHLLSCWLPPFPSGPPIIPPPPPICPDSLDDADALGSMLISWYMSGYHTGYYMGFRQNQKEGRCSHSLN

SEQ ID NO: 85248 - protein, 282 aa, Homo sapiens
  Payload ID: 16946
  Gene Symbol: SMN1
  Gene Name: survival of motor neuron 1, telomeric
  Uniprot ID: Q16637
  ENSP ID: ENSP00000424926
MAMSSGGSGGGVPEQEDSVLFRRGTGQSDDSDIWDDTALIKAYDKAVASFKHALKNGDICETSGKPKTTPKRKPAKKNKSQKKNTAASLQQWKVGDKCSAIWSEDGCIYPATIASIDFKRETCVVVYTGYGNREEQNLSDLLSPICEVANNIEQNAQENENESQVSTDESENSRSPGNKSDNIKPKSAPWNSFLPPPPPMPGPRLGPGKPGLKFNGPPPPPPPPPPHLLSCWLPPFPSGPPIIPPPPPICPDSLDDADALGSMLISWYMSGYHTGYYMEMLA

SEQ ID NO: 85249 - protein, 262 aa, Homo sapiens
  Payload ID: 16946
  Gene Symbol: SMN1
  Gene Name: survival of motor neuron 1, telomeric
  Uniprot ID: Q16637
  ENSP ID: ENSP00000428128
MAMSSGGSGGGVPEQEDSVLFRRGTGQSDDSDIWDDTALIKAYDKAVASFKHALKNGDICETSGKPKTTPKRKPAKKNKSQKKNTAASLQQWKVGDKCSAIWSEDGCIYPATIASIDFKRETCVVVYTGYGNREEQNLSDLLSPICEVANNIEQNAQENENESQVSTDESENSRSPGNKSDNIKPKSAPWNSFLPPPPPMPGPRLGPGKIIPPPPPICPDSLDDADALGSMLISWYMSGYHTGYYMGFRQNQKEGRCSHSLN

SEQ ID NO: 85250 - protein, 79 aa, Homo sapiens
  Payload ID: 16946
  Gene Symbol: SMN1
  Gene Name: survival of motor neuron 1, telomeric
  ENSP ID: ENSP00000430657
LSPICEVANNIEQNAQENENESQVSTDESENSRSPGNKSDNIKPKSAPWNSFLPPPPPMPGPRLGPGKKGNEKNPEVVI

SEQ ID NO: 85251 - protein, 294 aa, Homo sapiens; identical to SEQ ID NO: 85246
  Payload ID: 16946
  Gene Symbol: SMN1
  Gene Name: survival of motor neuron 1, telomeric
  ENSP ID: ENSP00000477738

SEQ ID NO: 85252 - protein, 262 aa, Homo sapiens; identical to SEQ ID NO: 85249
  Payload ID: 16946
  Gene Symbol: SMN1
  Gene Name: survival of motor neuron 1, telomeric
  Uniprot ID: Q16637
  ENSP ID: ENSP00000480906

SEQ ID NO: 85253 - protein, 294 aa, Homo sapiens; identical to SEQ ID NO: 85244
  Payload ID: 16946
  Gene Symbol: SMN1
  Gene Name: survival of motor neuron 1, telomeric
  Uniprot ID: Q16637
  ENSP ID: ENSP00000482966

SEQ ID NO: 85254 - protein, 149 aa, Homo sapiens
  Payload ID: 16946
  Gene Symbol: SMN1
  Gene Name: survival of motor neuron 1, telomeric
  ENSP ID: ENSP00000486022
  MOD_RES (1)..(1): Any amino acid
XNTAASLQQWKVGDKCSAIWSEDGCIYPATIASIDFKRETCVVVYTGYGNREEQNLSDLLSPICEVANNIEQNAQEPGLKFNGPPPPPPPPPPHLLSCWLPPFPSGPPIIPPPPPICPDSLDDADALGSMLISWYMSGYHTGYYMEMLA

SEQ ID NO: 85255 - protein, 294 aa, Homo sapiens; identical to SEQ ID NO: 85246
  Payload ID: 16946
  Gene Symbol: SMN1
  Gene Name: survival of motor neuron 1, telomeric
  ENSP ID: ENSP00000486539

SEQ ID NO: 85256 - protein, 282 aa, Homo sapiens; identical to SEQ ID NO: 85248
  Payload ID: 16946
  Gene Symbol: SMN1
  Gene Name: survival of motor neuron 1, telomeric
  Uniprot ID: Q16637
  ENSP ID: ENSP00000487029

SEQ ID NO: 85257 - protein, 143 aa, Homo sapiens
  Payload ID: 16946
  Gene Symbol: SMN1
  Gene Name: survival of motor neuron 1, telomeric
  ENSP ID: ENSP00000487162
  MOD_RES (1)..(1): Any amino acid
XNTAASLQQWKVGDKCSAIWSEDGCIYPATIASIDFKRETCVVVYTGYGNREEQNLSDLLSPICEVANNIEQNAQENENESQVSTDESENSRSPGNKSDNIKPKSAPWNSFLPPPPPMPGPRLGPGKGFRQNQKEGRCSHSLN

SEQ ID NO: 85258 - protein, 180 aa, Homo sapiens
  Payload ID: 16946
  Gene Symbol: SMN1
  Gene Name: survival of motor neuron 1, telomeric
  ENSP ID: ENSP00000487186
  MOD_RES (1)..(1): Any amino acid
XNTAASLQQWKVGDKCSAIWSEDGCIYPATIASIDFKRETCVVVYTGYGNREEQNLSDLLSPICEVANNIEQNAQENENESQVSTDESENSRSPGNKSDNIKPKSAPWNSFLPPPPPMPGPRLGPGKIIPPPPPICPDSLDDADALGSMLISWYMSGYHTGYYMGFRQNQKEGRCSHSLN

SEQ ID NO: 85259 - protein, 79 aa, Homo sapiens; identical to SEQ ID NO: 85250
  Payload ID: 16946
  Gene Symbol: SMN1
  Gene Name: survival of motor neuron 1, telomeric
  ENSP ID: ENSP00000487193

SEQ ID NO: 85260 - protein, 294 aa, Homo sapiens; identical to SEQ ID NO: 85244
  Payload ID: 16946
  Gene Symbol: SMN1
  Gene Name: survival of motor neuron 1, telomeric
  Uniprot ID: Q16637
  ENSP ID: ENSP00000487206

SEQ ID NO: 85261 - protein, 227 aa, Homo sapiens; identical to SEQ ID NO: 85247
  Payload ID: 16946
  Gene Symbol: SMN1
  Gene Name: survival of motor neuron 1, telomeric
  ENSP ID: ENSP00000487289

SEQ ID NO: 85262 - protein, 294 aa, Homo sapiens; identical to SEQ ID NO: 85244
  Payload ID: 16947
  Gene Symbol: SMN2
  Gene Name: survival of motor neuron 2, centromeric
  Uniprot ID: Q16637
  ENSP ID: ENSP00000370117

SEQ ID NO: 85263 - protein, 262 aa, Homo sapiens; identical to SEQ ID NO: 85249
  Payload ID: 16947
  Gene Symbol: SMN2
  Gene Name: survival of motor neuron 2, centromeric
  Uniprot ID: Q16637
  ENSP ID: ENSP00000370118

SEQ ID NO: 85264 - protein, 294 aa, Homo sapiens; identical to SEQ ID NO: 85244
  Payload ID: 16947
  Gene Symbol: SMN2
  Gene Name: survival of motor neuron 2, centromeric
  Uniprot ID: Q16637
  ENSP ID: ENSP00000370119

SEQ ID NO: 85265 - protein, 227 aa, Homo sapiens; identical to SEQ ID NO: 85247
  Payload ID: 16947
  Gene Symbol: SMN2
  Gene Name: survival of motor neuron 2, centromeric
  ENSP ID: ENSP00000424282

SEQ ID NO: 85266 - protein, 294 aa, Homo sapiens; identical to SEQ ID NO: 85246
  Payload ID: 16947
  Gene Symbol: SMN2
  Gene Name: survival of motor neuron 2, centromeric
  ENSP ID: ENSP00000424799

SEQ ID NO: 85267 - protein, 46 aa, Homo sapiens
  Payload ID: 16947
  Gene Symbol: SMN2
  Gene Name: survival of motor neuron 2, centromeric
  ENSP ID: ENSP00000475331
  MOD_RES (1)..(1): Any amino acid
XCPDSLDDADALGSMLISWYMSGYHTGYYMGFRQNQKEGRCSHSLN

SEQ ID NO: 85268 - protein, 79 aa, Homo sapiens; identical to SEQ ID NO: 85250
  Payload ID: 16947
  Gene Symbol: SMN2
  Gene Name: survival of motor neuron 2, centromeric
  ENSP ID: ENSP00000475824

SEQ ID NO: 85269 - protein, 294 aa, Homo sapiens; identical to SEQ ID NO: 85246
  Payload ID: 16947
  Gene Symbol: SMN2
  Gene Name: survival of motor neuron 2, centromeric
  ENSP ID: ENSP00000477720

SEQ ID NO: 85270 - protein, 294 aa, Homo sapiens; identical to SEQ ID NO: 85246
  Payload ID: 16947
  Gene Symbol: SMN2
  Gene Name: survival of motor neuron 2, centromeric
  ENSP ID: ENSP00000478274

SEQ ID NO: 85271 - protein, 227 aa, Homo sapiens; identical to SEQ ID NO: 85247
  Payload ID: 16947
  Gene Symbol: SMN2
  Gene Name: survival of motor neuron 2, centromeric
  ENSP ID: ENSP00000478583

SEQ ID NO: 85272 - protein, 262 aa, Homo sapiens; identical to SEQ ID NO: 85249
  Payload ID: 16947
  Gene Symbol: SMN2
  Gene Name: survival of motor neuron 2, centromeric
  Uniprot ID: Q16637
  ENSP ID: ENSP00000479279

SEQ ID NO: 85273 - protein, 294 aa, Homo sapiens; identical to SEQ ID NO: 85244
  Payload ID: 16947
  Gene Symbol: SMN2
  Gene Name: survival of motor neuron 2, centromeric
  Uniprot ID: Q16637
  ENSP ID: ENSP00000479920

SEQ ID NO: 85274 - protein, 46 aa, Homo sapiens; identical to SEQ ID NO: 85267
  Payload ID: 16947
  Gene Symbol: SMN2
  Gene Name: survival of motor neuron 2, centromeric
  ENSP ID: ENSP00000480541
  MOD_RES (1)..(1): Any amino acid

SEQ ID NO: 85275 - protein, 262 aa, Homo sapiens; identical to SEQ ID NO: 85249
  Payload ID: 16947
  Gene Symbol: SMN2
  Gene Name: survival of motor neuron 2, centromeric
  Uniprot ID: Q16637
  ENSP ID: ENSP00000481427

SEQ ID NO: 85276 - protein, 79 aa, Homo sapiens; identical to SEQ ID NO: 85250
  Payload ID: 16947
  Gene Symbol: SMN2
  Gene Name: survival of motor neuron 2, centromeric
  ENSP ID: ENSP00000482226

SEQ ID NO: 85277 - protein, 294 aa, Homo sapiens; identical to SEQ ID NO: 85244
  Payload ID: 16947
  Gene Symbol: SMN2
  Gene Name: survival of motor neuron 2, centromeric
  Uniprot ID: Q16637
  ENSP ID: ENSP00000483515

SEQ ID NO: 85278 - protein, 262 aa, Homo sapiens; identical to SEQ ID NO: 85249
  Payload ID: 16947
  Gene Symbol: SMN2
  Gene Name: survival of motor neuron 2, centromeric
  Uniprot ID: Q16637
  ENSP ID: ENSP00000483768

SEQ ID NO: 85279 - protein, 294 aa, Homo sapiens; identical to SEQ ID NO: 85244
  Payload ID: 16947
  Gene Symbol: SMN2
  Gene Name: survival of motor neuron 2, centromeric
  Uniprot ID: Q16637
  ENSP ID: ENSP00000483819

SEQ ID NO: 85280 - protein, 262 aa, Homo sapiens; identical to SEQ ID NO: 85249
  Payload ID: 16947
  Gene Symbol: SMN2
  Gene Name: survival of motor neuron 2, centromeric
  Uniprot ID: Q16637
  ENSP ID: ENSP00000485595

SEQ ID NO: 85281 - protein, 79 aa, Homo sapiens; identical to SEQ ID NO: 85250
  Payload ID: 16947
  Gene Symbol: SMN2
  Gene Name: survival of motor neuron 2, centromeric
  ENSP ID: ENSP00000485777

SEQ ID NO: 85282 - protein, 294 aa, Homo sapiens; identical to SEQ ID NO: 85246
  Payload ID: 16947
  Gene Symbol: SMN2
  Gene Name: survival of motor neuron 2, centromeric
  ENSP ID: ENSP00000485830

SEQ ID NO: 85283 - protein, 294 aa, Homo sapiens; identical to SEQ ID NO: 85246
  Payload ID: 16947
  Gene Symbol: SMN2
  Gene Name: survival of motor neuron 2, centromeric
  ENSP ID: ENSP00000486030

SEQ ID NO: 85284 - protein, 282 aa, Homo sapiens; identical to SEQ ID NO: 85248
  Payload ID: 16947
  Gene Symbol: SMN2
  Gene Name: survival of motor neuron 2, centromeric
  Uniprot ID: Q16637
  ENSP ID: ENSP00000486152

SEQ ID NO: 85285 - protein, 294 aa, Homo sapiens; identical to SEQ ID NO: 85246
  Payload ID: 16947
  Gene Symbol: SMN2
  Gene Name: survival of motor neuron 2, centromeric
  ENSP ID: ENSP00000486268

SEQ ID NO: 85286 - protein, 227 aa, Homo sapiens; identical to SEQ ID NO: 85247
  Payload ID: 16947
  Gene Symbol: SMN2
  Gene Name: survival of motor neuron 2, centromeric
  ENSP ID: ENSP00000486922

SEQ ID NO: 85287 - protein, 282 aa, Homo sapiens; identical to SEQ ID NO: 85248
  Payload ID: 16947
  Gene Symbol: SMN2
  Gene Name: survival of motor neuron 2, centromeric
  Uniprot ID: Q16637
  ENSP ID: ENSP00000487015

SEQ ID NO: 85288 - protein, 294 aa, Homo sapiens; identical to SEQ ID NO: 85244
  Payload ID: 16947
  Gene Symbol: SMN2
  Gene Name: survival of motor neuron 2, centromeric
  Uniprot ID: Q16637
  ENSP ID: ENSP00000487421

SEQ ID NO: 85289 - protein, 706 aa, Homo sapiens
  Payload ID: 16948
  Gene Symbol: SUSD1
  Gene Name: sushi domain containing 1
  ENSP ID: ENSP00000347558
  MOD_RES (1)..(1): Any amino acid
XLLLLGLARGAAGAPGPDGLDVCATCHEHATCQQREGKKICICNYGFVGNGRTQCVDKNECQFGATLVCGNHTSCHNTPGGFYCICLEGYRATNNNKTFIPNDGTFCTDIDECEVSGLCRHGGRCVNTHGSFECYCMDGYLPRNGPEPFHPTTDATSCTEIDCGTPPEVPDGYIIGNYTSSLGSQVRYACREGFFSVPEDTVSSCTGLGTWESPKLHCQEINCGNPPEMRHAILVGNHSSRLGGVARYVCQEGFESPGGKITSVCTEKGTWRESTLTCTEILTKINDVSLFNDTCVRWQINSRRINPKISYVISIKGQRLDPMESVREETVNLTTDSRTPEVCLALYPGTNYTVNISTAPPRRSMPAVIGFQTAEVDLLEDDGSFNISIFNETCLKLNRRSRKVGSEHMYQFTVLGQRWYLANFSHATSFNFTTREQVPVVCLDLYPTTDYTVNVTLLRSPKRHSVQITIATPPAVKQTISNISGFNETCLRWRSIKTADMEEMYLFHIWGQRWYQKEFAQEMTFNISSSSRDPEVCLDLRPGTNYNVSLRALSSELPVVISLTTQITEPPLPEVEFFTVHRGPLPRLRLRKAKEKNGPISSYQVLVLPLALQSTFSCDSEGASSFFSNASDADGYVAAELLAKDVPDDAMEIPIGDRLYYGEYYNAPLKRGSDYCIILRITSEWNKIRHSCCCRWRVLDWVPWLL

SEQ ID NO: 85290 - protein, 722 aa, Homo sapiens
  Payload ID: 16948
  Gene Symbol: SUSD1
  Gene Name: sushi domain containing 1
  ENSP ID: ENSP00000363381
MGRGPWDAGPSRRLLPLLLLLGLARGAAGAPGPDGLDVCATCHEHATCQQREGKKICICNYGFVGNGRTQCVDKNECQFGATLVCGNHTSCHNTPGGFYCICLEGYRATNNNKTFIPNDGTFCTDIDECEVSGLCRHGGRCVNTHGSFECYCMDGYLPRNGPEPFHPTTDATSCTEIDCGTPPEVPDGYIIGNYTSSLGSQVRYACREGFFSVPEDTVSSCTGLGTWESPKLHCQEINCGNPPEMRHAILVGNHSSRLGGVARYVCQEGFESPGGKITSVCTEKGTWRESTLTCTEILTKINDVSLFNDTCVRWQINSRRINPKISYVISIKGQRLDPMESVREETVNLTTDSRTPEVCLALYPGTNYTVNISTAPPRRSMPAVIGFQTAEVDLLEDDGSFNISIFNETCLKLNRRSRKVGSEHMYQFTVLGQRWYLANFSHATSFNFTTREQVPVVCLDLYPTTDYTVNVTLLRSPKRHSVQITIATPPAVKQTISNISGFNETCLRWRSIKTADMEEMYLFHIWGQRWYQKEFAQEMTFNISSSSRDPEVCLDLRPGTNYNVSLRALSSELPVVISLTTQITEPPLPEVEFFTVHRGPLPRLRLRKAKEKNGPISSYQVLVLPLALQSTFSCDSEGASSFFSNASDADGYVAAELLAKDVPDDAMEIPIGDRLYYGEYYNAPLKRGSDYCIILRITSEWNKIRHSCCCRWRVLDWVPWLL

SEQ ID NO: 85291 - protein, 757 aa, Homo sapiens
  Payload ID: 16948
  Gene Symbol: SUSD1
  Gene Name: sushi domain containing 1
  Uniprot ID: Q6UWL2
  ENSP ID: ENSP00000363382
MGRGPWDAGPSRRLLPLLLLLGLARGAAGAPGPDGLDVCATCHEHATCQQREGKKICICNYGFVGNGRTQCVDKNECQFGATLVCGNHTSCHNTPGGFYCICLEGYRATNNNKTFIPNDGTFCTDIDECEVSGLCRHGGRCVNTHGSFECYCMDGYLPRNGPEPFHPTTDATSCTEIDCGTPPEVPDGYIIGNYTSSLGSQVRYACREGFFSVPEDTVSSCTGLGTWESPKLHCQEINCGNPPEMRHAILVGNHSSRLGGVARYVCQEGFESPGGKITSVCTEKGTWRESTLTCTEILTKINDVSLFNDTCVRWQINSRRINPKISYVISIKGQRLDPMESVREETVNLTTDSRTPEVCLALYPGTNYTVNISTAPPRRSMPAVIGFQTAEVDLLEDDGSFNISIFNETCLKLNRRSRKVGSEHMYQFTVLGQRWYLANFSHATSFNFTTREQVPVVCLDLYPTTDYTVNVTLLRSPKRHSVQITIATPPAVKQTISNISGFNETCLRWRSIKTADMEEMYLFHIWGQRWYQKEFAQEMTFNISSSSRDPEVCLDLRPGTNYNVSLRALSSELPVVISLTTQITEPPLPEVEFFTVHRGPLPRLRLRKAKEKNGPISSYQVLVLPLALQSTFSCDSEGASSFFSNASDADGYVAAELLAKDVPDDAMEIPIGDRLYYGEYYNAPLKRGSDYCIILRITSEWNKVRRHSCAVWAQVKEIPCNCNFLRLHIHRANSGDTQIRHSCCCRWRVLDWVPWLL

SEQ ID NO: 85292 - protein, 747 aa, Homo sapiens
  Payload ID: 16948
  Gene Symbol: SUSD1
  Gene Name: sushi domain containing 1
  Uniprot ID: Q6UWL2
  ENSP ID: ENSP00000363388
MGRGPWDAGPSRRLLPLLLLLGLARGAAGAPGPDGLDVCATCHEHATCQQREGKKICICNYGFVGNGRTQCVDKNECQFGATLVCGNHTSCHNTPGGFYCICLEGYRATNNNKTFIPNDGTFCTDIDECEVSGLCRHGGRCVNTHGSFECYCMDGYLPRNGPEPFHPTTDATSCTEIDCGTPPEVPDGYIIGNYTSSLGSQVRYACREGFFSVPEDTVSSCTGLGTWESPKLHCQEINCGNPPEMRHAILVGNHSSRLGGVARYVCQEGFESPGGKITSVCTEKGTWRESTLTCTEILTKINDVSLFNDTCVRWQINSRRINPKISYVISIKGQRLDPMESVREETVNLTTDSRTPEVCLALYPGTNYTVNISTAPPRRSMPAVIGFQTAEVDLLEDDGSFNISIFNETCLKLNRRSRKVGSEHMYQFTVLGQRWYLANFSHATSFNFTTREQVPVVCLDLYPTTDYTVNVTLLRSPKRHSVQITIATPPAVKQTISNISGFNETCLRWRSIKTADMEEMYLFHIWGQRWYQKEFAQEMTFNISSSSRDPEVCLDLRPGTNYNVSLRALSSELPVVISLTTQITEPPLPEVEFFTVHRGPLPRLRLRKAKEKNGPISSYQVLVLPLALQSTFSCDSEGASSFFSNASDADGYVAAELLAKDVPDDAMEIPIGDRLYYGEYYNAPLKRGSDYCIILRITSEWNKVRRHSCAVWAQVKDSSLMLLQMAGVGLGSLAVVIILTFLSFSAV

SEQ ID NO: 85293 - protein, 281 aa, Homo sapiens
  Payload ID: 16948
  Gene Symbol: SUSD1
  Gene Name: sushi domain containing 1
  ENSP ID: ENSP00000404269
  MOD_RES (1)..(1): Any amino acid
XGYIIGNYTSSLGSQVRYACREGFFSVPEDTVSSCTGLGTWESPKLHCQEINCGNPPEMRHAILVGNHSSRLGGVARYVCQEGFESPGGKITSVCTEKGTWRESTLTCTEILTKINDVSLFNDTCVRWQINSRRINPKISYVISIKGQRLDPMESVREETVNLTTDSRTPEVCLALYPGTNYTVNISTAPPRRSMPAVIGFQTAGSRNSHGRNTHIKEVDLLEDDGSFNISIFNETCLKLNRRSRKVGSEHMYQFTVLGQRWYLANFSHATSFNFTTREQV

SEQ ID NO: 85294 - protein, 45 aa, Homo sapiens
  Payload ID: 16948
  Gene Symbol: SUSD1
  Gene Name: sushi domain containing 1
  ENSP ID: ENSP00000431590
VITALYYESQVNGISIKFILMRSVYIIVTGDQNPIHTTLSKELHS

SEQ ID NO: 85295 - protein, 822 aa, Homo sapiens
  Payload ID: 16949
  Gene Symbol: SUSD2
  Gene Name: sushi domain containing 2
  Uniprot ID: Q9UGT4
  ENSP ID: ENSP00000351075
MKPALLPWALLLLATALGPGPGPTADAQESCSMRCGALDGPCSCHPTCSGLGTCCLDFRDFCLEILPYSGSMMGGKDFVVRHFKMSSPTDASVICRFKDSIQTLGHVDSSGQVHCVSPLLYESGRIPFTVSLDNGHSFPRAGTWLAVHPNKVSMMEKSELVNETRWQYYGTANTSGNLSLTWHVKSLPTQTITIELWGYEETGMPYSQEWTAKWSYLYPLATHIPNSGSFTFTPKPAPPSYQRWRVGALRIIDSKNYAGQKDVQALWTNDHALAWHLSDDFREDPVAWARTQCQAWEELEDQLPNFLEELPDCPCTLTQARADSGRFFTDYGCDMEQGSVCTYHPGAVHCVRSVQASLRYGSGQQCCYTADGTQLLTADSSGGSTPDRGHDWGAPPFRTPPRVPSMSHWLYDVLSFYYCCLWAPDCPRYMQRRPSNDCRNYRPPRLASAFGDPHFVTFDGTNFTFNGRGEYVLLEAALTDLRVQARAQPGTMSNGTETRGTGLTAVAVQEGNSDVVEVRLANRTGGLEVLLNQEVLSFTEQSWMDLKGMFLSVAAGDRVSIMLASGAGLEVSVQGPFLSVSVLLPEKFLTHTHGLLGTLNNDPTDDFTLHSGRVLPPGTSPQELFLFGANWTVHNASSLLTYDSWFLVHNFLYQPKHDPTFEPLFPSETTLNPSLAQEAAKLCGDDHFCNFDVAATGSLSTGTATRVAHQLHQRRMQSLQPVVSCGWLAPPPNGQKEGNRYLAGSTIYFHCDNGYSLAGAETSTCQADGTWSSPTPKCQPGRSYAVLLGIIFGGLAVVAAVALVYVLLRRRKGNTHVWGAQP

SEQ ID NO: 85296 - protein, 242 aa, Homo sapiens
  Payload ID: 16950
  Gene Symbol: SUSD3
  Gene Name: sushi domain containing 3
  Uniprot ID: Q96L08
  ENSP ID: ENSP00000364618
MKNIGLVMEWEIPEIICTCAKLRLPPQATFQVLRGNGASVGTVLMFRCPSNHQMVGSGLLTCTWKGSIAEWSSGSPVCKLVPPHETFGFKVAVIASIVSCAIILLMSMAFLTCCLLKCVKKSKRRRSNRSAQLWSQLKDEDLETVQAAYLGLKHFNKPVSGPSQAHDNHSFTTDHGESTSKLASVTRSVDKDPGIPRALSLSGSSSSPQAQVMVHMANPRQPLPASGLATGMPQQPAAYALG

SEQ ID NO: 85297 - protein, 255 aa, Homo sapiens
  Payload ID: 16950
  Gene Symbol: SUSD3
  Gene Name: sushi domain containing 3
  Uniprot ID: Q96L08
  ENSP ID: ENSP00000364621
MRWAAATLRGKARPRGRAGVTTPAPGNRTGTCAKLRLPPQATFQVLRGNGASVGTVLMFRCPSNHQMVGSGLLTCTWKGSIAEWSSGSPVCKLVPPHETFGFKVAVIASIVSCAIILLMSMAFLTCCLLKCVKKSKRRRSNRSAQLWSQLKDEDLETVQAAYLGLKHFNKPVSGPSQAHDNHSFTTDHGESTSKLASVTRSVDKDPGIPRALSLSGSSSSPQAQVMVHMANPRQPLPASGLATGMPQQPAAYALG

SEQ ID NO: 85298 - protein, 119 aa, Homo sapiens
  Payload ID: 16950
  Gene Symbol: SUSD3
  Gene Name: sushi domain containing 3
  ENSP ID: ENSP00000474695
  MOD_RES (1)..(1): Any amino acid
XVPPHETFGFKVAVIASIVSCAIILLMSMAFLTCCLLKCVKKSKRRRSNRDHGESTSKLASVTRSVDKDPGIPRALSLSGSSSSPQAQVMVHMANPRQPLPASGLATGMPQQPAAYALG

SEQ ID NO: 85299 - protein, 154 aa, Homo sapiens
  Payload ID: 16950
  Gene Symbol: SUSD3
  Gene Name: sushi domain containing 3
  ENSP ID: ENSP00000475051
RPRGRAGVTTPAPGNRTVVPPHETFGFKVAVIASIVSCAIILLMSMAFLTCCLLKCVKKSKRRRSNRSAQLWSQLKDEDLETVQAAYLGLKHFNKPVSGPSQAHDNHSFTTDHGESTSKLASVTRSVDKDPGIPRALSLSGSSSSPQAQVMVHM

SEQ ID NO: 85300 - protein, 211 aa, Homo sapiens
  Payload ID: 16950
  Gene Symbol: SUSD3
  Gene Name: sushi domain containing 3
  ENSP ID: ENSP00000479555
MRWAAATLRGKARPRGRAGVTTPAPGNRTGTCAKLRLPPQATFQVLRGNGASVGTVLMFRCPSNHQMVGSGLLTCTWKGSIAEWSSGSPVCKLVPPHETFGFKVAVIASIVSCAIILLMSMAFLTCCLLKCVKKSKRRRSNRDHGESTSKLASVTRSVDKDPGIPRALSLSGSSSSPQAQVMVHMANPRQPLPASGLATGMPQQPAAYALG

SEQ ID NO: 85301 - protein, 290 aa, Homo sapiens
  Payload ID: 16951
  Gene Symbol: SUSD4
  Gene Name: sushi domain containing 4
  Uniprot ID: Q5VX71
  ENSP ID: ENSP00000339926
MYHGMNPSNGDGFLEQQQQQQQPQSPQRLLAVILWFQLALCFGPAQLTGGFDDLQVCADPGIPENGFRTPSGGVFFEGSVARFHCQDGFKLKGATKRLCLKHFNGTLGWIPSDNSICVQEDCRIPQIEDAEIHNKTYRHGEKLIITCHEGFKIRYPDLHNMVSLCRDDGTWNNLPICQGCLRPLASSNGYVNISELQTSFPVGTVISYRCFPGFKLDGSAYLECLQNLIWSSSPPRCLALEGGRPEHLFPVLYFPHIRLAAAVLYFCPVLKSSPTPAPTCSSTSTTTSLF

SEQ ID NO: 85302 - protein, 490 aa, Homo sapiens
  Payload ID: 16951
  Gene Symbol: SUSD4
  Gene Name: sushi domain containing 4
  Uniprot ID: Q5VX71
  ENSP ID: ENSP00000344219
MYHGMNPSNGDGFLEQQQQQQQPQSPQRLLAVILWFQLALCFGPAQLTGGFDDLQVCADPGIPENGFRTPSGGVFFEGSVARFHCQDGFKLKGATKRLCLKHFNGTLGWIPSDNSICVQEDCRIPQIEDAEIHNKTYRHGEKLIITCHEGFKIRYPDLHNMVSLCRDDGTWNNLPICQGCLRPLASSNGYVNISELQTSFPVGTVISYRCFPGFKLDGSAYLECLQNLIWSSSPPRCLALEVCPLPPMVSHGDFVCHPRPCERYNHGTVVEFYCDPGYSLTSDYKYITCQYGEWFPSYQVYCIKSEQTWPSTHETLLTTWKIVAFTATSVLLVLLLVILARMFQTKFKAHFPPRGPPRSSSSDPDFVVVDGVPVMLPSYDEAVSGGLSALGPGYMASVGQGCPLPVDDQSPPAYPGSGDTDTGPGESETCDSVSGSSELLQSLYSPPRCQESTHPASDNPDIIASTAEEVASTSPGIDIADEIPLMEEDP

SEQ ID NO: 85303 - protein, 490 aa, Homo sapiens; identical to SEQ ID NO: 85302
  Payload ID: 16951
  Gene Symbol: SUSD4
  Gene Name: sushi domain containing 4
  Uniprot ID: Q5VX71
  ENSP ID: ENSP00000355843

SEQ ID NO: 85304 - protein, 488 aa, Homo sapiens
  Payload ID: 16951
  Gene Symbol: SUSD4
  Gene Name: sushi domain containing 4
  ENSP ID: ENSP00000476954
MYHGMNPSNGDGFLEQQQQQQQPQSPQRLLAVILWFQLALCFGPAQLTGGFDDLQVCADPGIPENGFRTPSGGVFFEGSVARFHCQDGFKLKGATKRLCLKHFNGTLGWIPSDNSICVQEDCRIPQIEDAEIHNKTYRHGEKLIITCHEGFKIRYPDLHNMVSLCRDDGTWNNLPICQGCLRPLASSNGYVNISELQTSFPVGTVISYRCFPGFKLDGSAYLECLQNLIWSSSPPRCLALEVCPLPPMVSHGDFVCHPRPCERYNHGTVVEFYCDPGYSLTSDYKYITCQYGEWFPSYQVYCIKSEQTWPSTHETLLTTWKIVAFTATSVLLVLLLVILARMFQTKFKAHFPPRGPPRSSSSDPDFVVVDGVPVMLPSYDEAVSGGLSALGPGYMASVGQGCPLPVDDQSPPAYPGSGDTDTGPGESETCDSVSGSSELLQSLYSPPRCQESTHPASDNPDIIASTAEEVASTSPGSHHAHWVLFLRN

SEQ ID NO: 85305 - protein, 421 aa, Homo sapiens
  Payload ID: 16951
  Gene Symbol: SUSD4
  Gene Name: sushi domain containing 4
  ENSP ID: ENSP00000477374
MYHGMNPSNGDGFLEQQQQQQQPQSPQRLLAVILWFQLALCFGPAQLTGDCRIPQIEDAEIHNKTYRHGEKLIITCHEGFKIRYPDLHNMVSLCRDDGTWNNLPICQGCLRPLASSNGYVNISELQTSFPVGTVISYRCFPGFKLDGSAYLECLQNLIWSSSPPRCLALEAQVCPLPPMVSHGDFVCHPRPCERYNHGTVVEFYCDPGYSLTSDYKYITCQYGEWFPSYQVYCIKSEQTWPSTHETLLTTWKIVAFTATSVLLVLLLVILARMFQTKFKAHFPPRGPPRSSSSDPDFVVVDGVPVMLPSYDEAVSGGLSALGPGYMASVGQGCPLPVDDQSPPAYPGSGDTDTGPGESETCDSVSGSSELLQSLYSPPRCQESTHPASDNPDIIASTAEEVASTSPGIDIADEIPLMEEDP

SEQ ID NO: 85306 - protein, 463 aa, Homo sapiens
  Payload ID: 16951
  Gene Symbol: SUSD4
  Gene Name: sushi domain containing 4
  ENSP ID: ENSP00000477432
  MOD_RES (1)..(1): Any amino acid
XAVILWFQLALCFGPAQLTGGFDDLQVCADPGIPENGFRTPSGGVFFEGSVARFHCQDGFKLKGATKRLCLKHFNGTLGWIPSDNSICVQEDCRIPQIEDAEIHNKTYRHGEKLIITCHEGFKIRYPDLHNMVSLCRDDGTWNNLPICQGCLRPLASSNGYVNISELQTSFPVGTVISYRCFPGFKLDGSAYLECLQNLIWSSSPPRCLALEAQVCPLPPMVSHGDFVCHPRPCERYNHGTVVEFYCDPGYSLTSDYKYITCQYGEWFPSYQVYCIKSEQTWPSTHETLLTTWKIVAFTATSVLLVLLLVILARMFQTKFKAHFPPRGPPRSSSSDPDFVVVDGVPVMLPSYDEAVSGGLSALGPGYMASVGQGCPLPVDDQSPPAYPGSGDTDTGPGESETCDSVSGSSELLQSLYSPPRCQESTHPASDNPDIIASTAEEVASTSPGIDIADEIPLMEEDP

SEQ ID NO: 85307 - protein, 629 aa, Homo sapiens
  Payload ID: 16952
  Gene Symbol: SUSD5
  Gene Name: sushi domain containing 5
  Uniprot ID: O60279
  ENSP ID: ENSP00000308727
MTAEGPSPPARWHRRLPGLWAAALLLLGLPRLSVRADGKFFVLESQNGSQGLQLEAARLSCKSRGAHLASADELRRVVQDCSFAVCTTGWLADGTLGTTVCSKGSGEQQIMRAVDVRIESNPVPGGTYSALCIKDEEKPCGDPPSFPHTILQGRTGLEMGDELLYVCAPGHIMGHRETAFTLLCNSCGEWYGLVQACGKDEAEAHIDYEDNFPDDRSVSFRELMEDSRTEADEDRGQGDSSEEAPKQDRLVSISVGRENIARDKVFVPTTGLPGAGSSVPADSPGSRLLQKHLFWFPAEAFHKPGLEKEVDDDTKKQFSAGDNHSGVKLVPGEPETKVIYGNTDGPSGPFVGKNDSKAGDPVVSSSDESWLDGYPVTEGAWRKTEAEEEEDGDRGDGSVGLDENVLVTPDQPILVEVKKPKSSTLTPSEGMTHSSVLPSQMLDVEALALRPVNASETEGIGDGDLTKYQSTLPWRFITEESPMATLSYELTSSTLEILTVNTVKQTPNHIPSTIMATTQPPVETTVPEIQDSFPYLLSEDFFGQEGPGPGASEELHPTLESCVGDGCPGLSRGPVIATIVTVLCLLLLLAGVGMVWGYRKCQHKSSVYKLNVGQRQARHYHQQIEMEKV

SEQ ID NO: 85308 - protein, 243 aa, Homo sapiens
  Payload ID: 16952
  Gene Symbol: SUSD5
  Gene Name: sushi domain containing 5
  ENSP ID: ENSP00000406475
  MOD_RES (1)..(1): Any amino acid
XAEGPSPPARWHRRLPGLWAAALLLLGLPRLSVRADGKFFVLESQNGSQGLQLEAARLSCKSRGAHLASADELRRVVQDCSFAVCTTGWLADGTLGTTVCSKGSGEQQIMRAVDVRIESNPVPGGTYSALCIKDEDEAEAHIDYEDNFPDDRSVSFRELMEDSRTEADEDRGQGDSSEEAPKQDRLVSISVGRENIARDKVFVPTTGLPGAGSSVPADSPGSRLLQKHLFWFPAEAFHKPGLE

SEQ ID NO: 85309 - protein, 303 aa, Homo sapiens
  Payload ID: 16953
  Gene Symbol: SUSD6
  Gene Name: sushi domain containing 6
  Uniprot ID: Q92537
  ENSP ID: ENSP00000344424
MCHGRIAPKSTSVFAVASVGHGVFLPLVILCTLLGDGLASVCPLPPEPENGGYICHPRPCRDPLTAGSVIEYLCAEGYMLKGDYKYLTCKNGEWKPAMEISCRLNEDKDTHTSLGVPTLSIVASTASSVALILLLVVLFVLLQPKLKSFHHSRRDQGVSGDQVSIMVDGVQVALPSYEEAVYGSSGHCVPPADPRVQIVLSEGSGPSGRSVPREQQLPDQGACSSAGGEDEAPGQSGLCEAWGSRASETVMVHQATTSSWVAGSGNRQLAHKETADSENSDIQSLLSLTSEEYTDDIPLLKEA

SEQ ID NO: 85310 - protein, 1413 aa, Homo sapiens
  Payload ID: 16954
  Gene Symbol: SNED1
  Gene Name: sushi, nidogen and EGF-like domains 1
  Uniprot ID: Q8TER0
  ENSP ID: ENSP00000308893
MRHGVAWALLVAAALGLGARGVRGAVALADFYPFGAERGDAVTPKQDDGGSGLRPLSVPFPFFGAEHSGLYVNNNGIISFLKEVSQFTPVAFPIAKDRCVVAAFWADVDNRRAGDVYYREATDPAMLRRATEDVRHYFPELLDFNATWVFVATWYRVTFFGGSSSSPVNTFQTVLITDGKLSFTIFNYESIVWTTGTHASSGGNATGLGGIAAQAGFNAGDGQRYFSIPGSRTADMAEVETTTNVGVPGRWAFRIDDAQVRVGGCGHTTSVCLALRPCLNGGKCIDDCVTGNPSYTCSCLSGFTGRRCHLDVNECASQPCQNGGTCTHGINSFRCQCPAGFGGPTCETAQSPCDTKECQHGGQCQVENGSAVCVCQAGYTGAACEMDVDDCSPDPCLNGGSCVDLVGNYTCLCAEPFKGLRCETGDHPVPDACLSAPCHNGGTCVDADQGYVCECPEGFMGLDCRERVPDDCECRNGGRCLGANTTLCQCPLGFFGLLCEFEITAMPCNMNTQCPDGGYCMEHGGSYLCVCHTDHNASHSLPSPCDSDPCFNGGSCDAHDDSYTCECPRGFHGKHCEKARPHLCSSGPCRNGGTCKEAGGEYHCSCPYRFTGRHCEIGKPDSCASGPCHNGGTCFHYIGKYKCDCPPGFSGRHCEIAPSPCFRSPCVNGGTCEDRDTDFFCHCQAGYMGRRCQAEVDCGPPEEVKHATLRFNGTRLGAVALYACDRGYSLSAPSRIRVCQPHGVWSEPPQCLEIDECRSQPCLHGGSCQDRVAGYLCLCSTGYEGAHCELERDECRAHPCRNGGSCRNLPGAYVCRCPAGFVGVHCETEVDACDSSPCQHGGRCESGGGAYLCVCPESFFGYHCETVSDPCFSSPCGGRGYCLASNGSHSCTCKVGYTGEDCAKELFPPTALKMERVEESGVSISWNPPNGPAARQMLDGYAVTYVSSDGSYRRTDFVDRTRSSHQLQALAAGRAYNISVFSVKRNSNNKNDISRPAVLLARTRPRPVEGFEVTNVTASTISVQWALHRIRHATVSGVRVSIRHPEALRDQATDVDRSVDRFTFRALLPGKRYTIQLTTLSGLRGEEHPTESLATAPTHVWTRPLPPANLTAARVTATSAHVVWDAPTPGSLLEAYVINVTTSQSTKSRYVPNGKLASYTVRDLLPGRRYQLSVIAVQSTELGPQHSEPAHLYIITSPRDGADRRWHQGGHHPRVLKNRPPPARLPELRLLNDHSAPETPTQPPRFSELVDGRGRVSARFGGSPSKAATVRSQPTASAQLENMEEAPKRVSLALQLPEHGSKDIGNVPGNCSENPCQNGGTCVPGADAHSCDCGPGFKGRRCELACIKVSRPCTRLFSETKAFPVWEGGVCHHVYKRVYRVHQDICFKESCESTSLKKTPNRKQSKSQTLEKS

SEQ ID NO: 85311 - protein, 599 aa, Homo sapiens
  Payload ID: 16954
  Gene Symbol: SNED1
  Gene Name: sushi, nidogen and EGF-like domains 1
  ENSP ID: ENSP00000342992
MHGILGACGRLRLEPATPLTPLLCAERDECRAHPCRNGGSCRNLPGAYVCRCPAGFVGVHCETEVDACDSSPCQHGGRCESGGGAYLCVCPESFFGYHCETVSDPCFSSPCGGRGYCLASNGSHSCTCKVGYTGEDCAKELFPPTALKMERVEESGVSISWNPPNGPAARQMLDGYAVTYVSSDGSYRRTDFVDRTRSSHQLQALAAGRAYNISVFSVKRNSNNKNDISRPAVLLARTRPRPVEGFEVTNVTASTISVQWALHRIRHATVSGVRVSIRHPEALRDQATDVDRSVDRFTFRALLPGKRYTIQLTTLSGLRGEEHPTESLATAPTHVWTRPLPPANLTAARVTATSAHVVWDAPTPGSLLEAYVINVTTSQSTKSRYVPNGKLASYTVRDLLPGRRYQLSVIAVQSTELGPQHSEPAHLYIITSPRDGADRRWHQGGHHPRVLKNRPPPARLPELRLLNDHSAPETPTQPPRFSELVDGRGRVSARFGGSPSKAATVRSHVPGNCSENPCQNGGTCVPGADAHSCDCGPGFKGRRCELACIKVSRPCTRLFSETKAFPVWEGGVCHHVYKRVYRVHQDICFKESCESTSLK

SEQ ID NO: 85312 - protein, 300 aa, Homo sapiens
  Payload ID: 16954
  Gene Symbol: SNED1
  Gene Name: sushi, nidogen and EGF-like domains 1
  ENSP ID: ENSP00000384789
  MOD_RES (1)..(1): Any amino acid
XSLPHVSDVNECASQPCQNGGTCTHGINSFRCQCPAGFGGPTCETAQSPCDTKECQHGGQCQVENGSAVCVCQAGYTGAACEMDVDDCSPDPCLNGGSCVDLVGNYTCLCAEPFKGLRCETGDHPVPDACLSAPCHNGGTCVDADQGYVCECPEGFMGLDCRERVPDDCECRNGGRCLGANTTLCQCPLGFFGLLCEFEITAMPCNMNTQCPDGGYCMEHGGSYLCVCHTDHNASHSLPSPCDSDPCFNGGSCDAHDDSYTCECPRGFHGKHCEKARPHLCSSGPCRNGGTCKEAGGEYH

SEQ ID NO: 85313 - protein, 1324 aa, Homo sapiens
  Payload ID: 16954
  Gene Symbol: SNED1
  Gene Name: sushi, nidogen and EGF-like domains 1
  Uniprot ID: Q8TER0
  ENSP ID: ENSP00000384871
MRHGVAWALLVAAALGLGARGVRGAVALADFYPFGAERGDAVTPKQDDGGSGLRPLSVPFPFFGAEHSGLYVNNNGIISFLKEVSQFTPVAFPIAKDRCVVAAFWADVDNRRAGDVYYREATDPAMLRRATEDVRHYFPELLDFNATWVFVATWYRVTFFGGSSSSPVNTFQTVLITDGKLSFTIFNYESIVWTTGTHASSGGNATGLGGIAAQAGFNAGDGQRYFSIPGSRTADMAEVETTTNVGVPGRWAFRIDDAQVRVGGCGHTTSVCLALRPCLNGGKCIDDCVTGNPSYTCSCLSGFTGRRCHLDVNECASQPCQNGGTCTHGINSFRCQCPAGFGGPTCETAQSPCDTKECQHGGQCQVENGSAVCVCQAGYTGAACEMDVDDCSPDPCLNGGSCVDLVGNYTCLCAEPFKGLRCETGDHPVPDACLSAPCHNGGTCVDADQGYVCECPEGFMGLDCRERVPDDCECRNGGRCLGANTTLCQCPLGFFGLLCEFEITAMPCNMNTQCPDGGYCMEHGGSYLCVCHTDHNASHSLPSPCDSDPCFNGGSCDAHDDSYTCECPRGFHGKHCEKARPHLCSSGPCRNGGTCKEAGGEYHCSCPYRFTGRHCEIGKPDSCASGPCHNGGTCFHYIGKYKCDCPPGFSGRHCEIAPSPCFRSPCVNGGTCEDRDTDFFCHCQAGYMGRRCQAEVDCGPPEEVKHATLRFNGTRLGAVALYACDRGYSLSAPSRIRVCQPHGVWSEPPQCLEIDECRSQPCLHGGSCQDRVAGYLCLCSTGYEGAHCELERDECRAHPCRNGGSCRNLPGAYVCRCPAGFVGVHCETEVDACDSSPCQHGGRCESGGGAYLCVCPESFFGYHCETVSDPCFSSPCGGRGYCLASNGSHSCTCKVGYTGEDCAKELFPPTALKMERVEESGVSISWNPPNGPAARQMLDGYAVTYVSSDGSYRRTDFVDRTRSSHQLQALAAGRAYNISVFSVKRNSNNKNDISRPAVLLARTRPRPVEGFEVTNVTASTISVQWALHRIRHATVSGVRVSIRHPEALRDQATDVDRSVDRFTFRALLPGKRYTIQLTTLSGLRGEEHPTESLATAPTHVWTRPLPPANLTAARVTATSAHVVWDAPTPGSLLEAYVINVTTSQSTKSRYVPNGKLASYTVRDLLPGRRYQLSVIAVQSTELGPQHSEPAHLYIITSPRDGADRRWHQGGHHPRVLKNRPPPARLPELRLLNDHSAPETPTQPPRFSELVDGRGRVSARFGGSPSKAATVRSQPTASAQLENMEEAPKRVSLALQLPEHGSKDIGSESAALVGTLGLTDCSQGP

SEQ ID NO: 85314 - protein, 1352 aa, Homo sapiens
  Payload ID: 16954
  Gene Symbol: SNED1
  Gene Name: sushi, nidogen and EGF-like domains 1
  Uniprot ID: Q8TER0
  ENSP ID: ENSP00000386007
MRHGVAWALLVAAALGLGARGVRGAVALADFYPFGAERGDAVTPKQDDGGSGLRPLSVPFPFFGAEHSGLYVNNNGIISFLKEVSQFTPVAFPIAKDRCVVAAFWADVDNRRAGDVYYREATDPAMLRRATEDVRHYFPELLDFNATWVFVATWYRVTFFGGSSSSPVNTFQTVLITDGKLSFTIFNYESIVWTTGTHASSGGNATGLGGIAAQAGFNAGDGQRYFSIPGSRTADMAEVETTTNVGVPGRWAFRIDDAQVRVGGCGHTTSVCLALRPCLNGGKCIDDCVTGNPSYTCSCLSGFTGRRCHLDVNECASQPCQNGGTCTHGINSFRCQCPAGFGGPTCETAQSPCDTKECQHGGQCQVENGSAVCVCQAGYTGAACEMDVDDCSPDPCLNGGSCVDLVGNYTCLCAEPFKGLRCETGDHPVPDACLSAPCHNGGTCVDADQGYVCECPEGFMGLDCRERVPDDCECRNGGRCLGANTTLCQCPLGFFGLLCEFEITAMPCNMNTQCPDGGYCMEHGGSYLCVCHTDHNASHSLPSPCDSDPCFNGGSCDAHDDSYTCECPRGFHGKHCEKARPHLCSSGPCRNGGTCKEAGGEYHCSCPYRFTGRHCEIGKPDSCASGPCHNGGTCFHYIGKYKCDCPPGFSGRHCEIAPSPCFRSPCVNGGTCEDRDTDFFCHCQAGYMGRRCQAEVDCGPPEEVKHATLRFNGTRLGAVALYACDRGYSLSAPSRIRVCQPHGVWSEPPQCLEIDECRSQPCLHGGSCQDRVAGYLCLCSTGYEGAHCELERDECRAHPCRNGGSCRNLPGAYVCRCPAGFVGVHCETEVDACDSSPCQHGGRCESGGGAYLCVCPESFFGYHCETVSDPCFSSPCGGRGYCLASNGSHSCTCKVGYTGEDCAKELFPPTALKMERVEESGVSISWNPPNGPAARQMLDGYAVTYVSSDGSYRRTDFVDRTRSSHQLQALAAGRAYNISVFSVKRNSNNKNDISRPAVLLARTRPRPVEGFEVTNVTASTISVQWALHRIRHATVSGVRVSIRHPEALRDQATDVDRSVDRFTFRALLPGKRYTIQLTTLSGLRGEEHPTESLATAPTHVWTRPLPPANLTAARVTATSAHVVWDAPTPGSLLEAYVINVTTSQSTKSRYVPNGKLASYTVRDLLPGRRYQLSVIAVQSTELGPQHSEPAHLYIITSPRDGADRRWHQGGHHPRVLKNRPPPARLPELRLLNDHSAPETPTQPPRFSELVDGRGRVSARFGGSPSKAATVRSHVPGNCSENPCQNGGTCVPGADAHSCDCGPGFKGRRCELACIKVSRPCTRLFSETKAFPVWEGGVCHHVKQSKSQTLEKS

SEQ ID NO: 85315 - protein, 66 aa, Homo sapiens
  Payload ID: 16954
  Gene Symbol: SNED1
  Gene Name: sushi, nidogen and EGF-like domains 1
  ENSP ID: ENSP00000394324
QCQVENGSAVCVCQAGYTGAACEMDVDDCSPDPCLNGGSCVDLVGNYTCLCAEPFKGLRCETVVTC

SEQ ID NO: 85316 - protein, 272 aa, Homo sapiens
  Payload ID: 16954
  Gene Symbol: SNED1
  Gene Name: sushi, nidogen and EGF-like domains 1
  ENSP ID: ENSP00000401865
  MOD_RES (1)..(1): Any amino acid
XPTCETAQSPCDTKECQHGGQCQVENGSAVCVCQAGYTGAACEMDVDDCSPDPCLNGGSCVDLVGNYTCLCAEPFKGLRCETGDHPVPDACLSAPCHNGGTCVDADQGYVCECPEGFMGLDCRERVPDDCECRNGGRCLGANTTLCQCPLGFFGLLCEFEITAMPCNMNTQCPDGGYCMEHGGSYLCVCHTDHNASHSLPSPCDSDPCFNGGSCDAHDDSYTCECPRGFHGKHCEKGMAGRGVRAGVSTLESARGPPSCFSAVSLLVSRIAD

SEQ ID NO: 85317 - protein, 868 aa, Homo sapiens
  Payload ID: 16955
  Gene Symbol: SVEP1
  Gene Name: sushi, von Willebrand factor type A, EGF and pentraxin domain containing 1
  Uniprot ID: Q4LDE5
  ENSP ID: ENSP00000363585
MWPRLAFCCWGLALVSGWATFQQMSPSRNFSFRLFPETAPGAPGSIPAPPAPGDEAAGSRVERLGQAFRRRVRLLRELSERLELVFLVDDSSSVGEVNFRSELMFVRKLLSDFPVVPTATRVAIVTFSSKNYVVPRVDYISTRRARQHKCALLLQEIPAISYRGGGTYTKGAFQQAAQILLHARENSTKVVFLITDGYSNGGDPRPIAASLRDSGVEIFTFGIWQGNIRELNDMASTPKEEHCYLLHSFEEFEALARRALHEDLPSGSFIQDDMVHCSYLCDEGKDCCDRMGSCKCGTHTGHFECICEKGYYGKGLQYECTACPSGTYKPEGSPGGISSCIPCPDENHTSPPGSTSPEDCVCREGYRASGQTCELVHCPALKPPENGYFIQNTCNNHFNAACGVRCHPGFDLVGSSIILCLPNGLWSGSESYCRVRTCPHLRQPKHGHISCSTREMLYKTTCLVACDEGYRLEGSDKLTCQGNSQWDGPEPRCVERHCSTFQMPKDVIISPHNCGKQPAKFGTICYVSCRQGFILSGVKEMLRCTTSGKWNVGVQAAVCKDVEAPQINCPKDIEAKTLEQQDSANVTWQIPTAKDNSGEKVSVHVHPAFTPPYLFPIGDVAIVYTATDLSGNQASCIFHIKVIDAEPPVIDWCRSPPPVQVSEKVHAASWDEPQFSDNSGAELVITRSHTQGDLFPQGETIVQYTATDPSGNNRTCDIHIVIKGSPCEIPFTPVNGDFICTPDNTGVNCTLTCLEGYDFTEGSTDKYYCAYEDGVWKPTYTTEWPDCAKKRFANHGFKSFEMFYKAARCDDTDLMKKFSEAFETTLGKMVPSFCSDAEDIDCRLEENLTKKYCLEYNYDYENGFAIGN

SEQ ID NO: 85318 - protein, 3571 aa, Homo sapiens
  Payload ID: 16955
  Gene Symbol: SVEP1
  Gene Name: sushi, von Willebrand factor type A, EGF and pentraxin domain containing 1
  Uniprot ID: Q4LDE5
  ENSP ID: ENSP00000363593
MWPRLAFCCWGLALVSGWATFQQMSPSRNFSFRLFPETAPGAPGSIPAPPAPGDEAAGSRVERLGQAFRRRVRLLRELSERLELVFLVDDSSSVGEVNFRSELMFVRKLLSDFPVVPTATRVAIVTFSSKNYVVPRVDYISTRRARQHKCALLLQEIPAISYRGGGTYTKGAFQQAAQILLHARENSTKVVFLITDGYSNGGDPRPIAASLRDSGVEIFTFGIWQGNIRELNDMASTPKEEHCYLLHSFEEFEALARRALHEDLPSGSFIQDDMVHCSYLCDEGKDCCDRMGSCKCGTHTGHFECICEKGYYGKGLQYECTACPSGTYKPEGSPGGISSCIPCPDENHTSPPGSTSPEDCVCREGYRASGQTCELVHCPALKPPENGYFIQNTCNNHFNAACGVRCHPGFDLVGSSIILCLPNGLWSGSESYCRVRTCPHLRQPKHGHISCSTREMLYKTTCLVACDEGYRLEGSDKLTCQGNSQWDGPEPRCVERHCSTFQMPKDVIISPHNCGKQPAKFGTICYVSCRQGFILSGVKEMLRCTTSGKWNVGVQAAVCKDVEAPQINCPKDIEAKTLEQQDSANVTWQIPTAKDNSGEKVSVHVHPAFTPPYLFPIGDVAIVYTATDLSGNQASCIFHIKVIDAEPPVIDWCRSPPPVQVSEKVHAASWDEPQFSDNSGAELVITRSHTQGDLFPQGETIVQYTATDPSGNNRTCDIHIVIKGSPCEIPFTPVNGDFICTPDNTGVNCTLTCLEGYDFTEGSTDKYYCAYEDGVWKPTYTTEWPDCAKKRFANHGFKSFEMFYKAARCDDTDLMKKFSEAFETTLGKMVPSFCSDAEDIDCRLEENLTKKYCLEYNYDYENGFAIGPGGWGAANRLDYSYDDFLDTVQETATSIGNAKSSRIKRSAPLSDYKIKLIFNITASVPLPDERNDTLEWENQQRLLQTLETITNKLKRTLNKDPMYSFQLASEILIADSNSLETKKASPFCRPGSVLRGRMCVNCPLGTYYNLEHFTCESCRIGSYQDEEGQLECKLCPSGMYTEYIHSRNISDCKAQCKQGTYSYSGLETCESCPLGTYQPKFGSRSCLSCPENTSTVKRGAVNISACGVPCPEGKFSRSGLMPCHPCPRDYYQPNAGKAFCLACPFYGTTPFAGSRSITECSSFSSTFSAAEESVVPPASLGHIKKRHEISSQVFHECFFNPCHNSGTCQQLGRGYVCLCPLGYTGLKCETDIDECSPLPCLNNGVCKDLVGEFICECPSGYTGQRCEENINECSSSPCLNKGICVDGVAGYRCTCVKGFVGLHCETEVNECQSNPCLNNAVCEDQVGGFLCKCPPGFLGTRCGKNVDECLSQPCKNGATCKDGANSFRCLCAAGFTGSHCELNINECQSNPCRNQATCVDELNSYSCKCQPGFSGKRCETEQSTGFNLDFEVSGIYGYVMLDGMLPSLHALTCTFWMKSSDDMNYGTPISYAVDNGSDNTLLLTDYNGWVLYVNGREKITNCPSVNDGRWHHIAITWTSANGIWKVYIDGKLSDGGAGLSVGLPIPGGGALVLGQEQDKKGEGFSPAESFVGSISQLNLWDYVLSPQQVKSLATSCPEELSKGNVLAWPDFLSGIVGKVKIDSKSIFCSDCPRLGGSVPHLRTASEDLKPGSKVNLFCDPGFQLVGNPVQYCLNQGQWTQPLPHCERISCGVPPPLENGFHSADDFYAGSTVTYQCNNGYYLLGDSRMFCTDNGSWNGVSPSCLDVDECAVGSDCSEHASCLNVDGSYICSCVPPYTGDGKNCAEPIKCKAPGNPENGHSSGEIYTVGAEVTFSCQEGYQLMGVTKITCLESGEWNHLIPYCKAVSCGKPAIPENGCIEELAFTFGSKVTYRCNKGYTLAGDKESSCLANSSWSHSPPVCEPVKCSSPENINNGKYILSGLTYLSTASYSCDTGYSLQGPSIIECTASGIWDRAPPACHLVFCGEPPAIKDAVITGNNFTFRNTVTYTCKEGYTLAGLDTIECLADGKWSRSDQQCLAVSCDEPPIVDHASPETAHRLFGDIAFYYCSDGYSLADNSQLLCNAQGKWVPPEGQDMPRCIAHFCEKPPSVSYSILESVSKAKFAAGSVVSFKCMEGFVLNTSAKIECMRGGQWNPSPMSIQCIPVRCGEPPSIMNGYASGSNYSFGAMVAYSCNKGFYIKGEKKSTCEATGQWSSPIPTCHPVSCGEPPKVENGFLEHTTGRIFESEVRYQCNPGYKSVGSPVFVCQANRHWHSESPLMCVPLDCGKPPPIQNGFMKGENFEVGSKVQFFCNEGYELVGDSSWTCQKSGKWNKKSNPKCMPAKCPEPPLLENQLVLKELTTEVGVVTFSCKEGHVLQGPSVLKCLPSQQWNDSFPVCKIVLCTPPPLISFGVPIPSSALHFGSTVKYSCVGGFFLRGNSTTLCQPDGTWSSPLPECVPVECPQPEEIPNGIIDVQGLAYLSTALYTCKPGFELVGNTTTLCGENGHWLGGKPTCKAIECLKPKEILNGKFSYTDLHYGQTVTYSCNRGFRLEGPSALTCLETGDWDVDAPSCNAIHCDSPQPIENGFVEGADYSYGAIIIYSCFPGFQVAGHAMQTCEESGWSSSIPTCMPIDCGLPPHIDFGDCTKLKDDQGYFEQEDDMMEVPYVTPHPPYHLGAVAKTWENTKESPATHSSNFLYGTMVSYTCNPGYELLGNPVLICQEDGTWNGSAPSCISIECDLPTAPENGFLRFTETSMGSAVQYSCKPGHILAGSDLRLCLENRKWSGASPRCEAISCKKPNPVMNGSIKGSNYTYLSTLYYECDPGYVLNGTERRTCQDDKNWDEDEPICIPVDCSSPPVSANGQVRGDEYTFQKEIEYTCNEGFLLEGARSRVCLANGSWSGATPDCVPVRCATPPQLANGVTEGLDYGFMKEVTFHCHEGYILHGAPKLTCQSDGNWDAEIPLCKPVNCGPPEDLAHGFPNGFSFIHGGHIQYQCFPGYKLHGNSSRRCLSNGSWSGSSPSCLPCRCSTPVIEYGTVNGTDFDCGKAARIQCFKGFKLLGLSEITCEADGQWSSGFPHCEHTSCGSLPMIPNAFISETSSWKENVITYSCRSGYVIQGSSDLICTEKGVWSQPYPVCEPLSCGSPPSVANAVATGEAHTYESEVKLRCLEGYTMDTDTDTFTCQKDGRWFPERISCSPKKCPLPENITHILVHGDDFSVNRQVSVSCAEGYTFEGVNISVCQLDGTWEPPFSDESCSPVSCGKPESPEHGFVVGSKYTFESTIIYQCEPGYELEGNRERVCQENRQWSGGVAICKETRCETPLEFLNGKADIENRTTGPNVVYSCNRGYSLEGPSEAHCTENGTWSHPVPLCKPNPCPVPFVIPENALLSEKEFYVDQNVSIKCREGFLLQGHGIITCNPDETWTQTSAKCEKISCGPPAHVENAIARGVHYQYGDMITYSCYSGYMLEGFLRSVCLENGTWTSPPICRAVCRFPCQNGGICQRPNACSCPEGWMGRLCEEPICILPCLNGGRCVAPYQCDCPPGWTGSRCHTAVCQSPCLNGGKCVRPNRCHCLSSWTGHNCSRKRRTGF

SEQ ID NO: 85319 - protein, 3574 aa, Homo sapiens
  Payload ID: 16955
  Gene Symbol: SVEP1
  Gene Name: sushi, von Willebrand factor type A, EGF and pentraxin domain containing 1
  ENSP ID: ENSP00000384917
MWPRLAFCCWGLALVSGWATFQQMSPSRNFSFRLFPETAPGAPGSIPAPPAPGDEAAGSRVERLGQAFRRRVRLLRELSERLELVFLVDDSSSVGEVNFRSELMFVRKLLSDFPVVPTATRVAIVTFSSKNYVVPRVDYISTRRARQHKCALLLQEIPAISYRGGGTYTKGAFQQAAQILLHARENSTKVVFLITDGYSNGGDPRPIAASLRDSGVEIFTFGIWQGNIRELNDMASTPKEEHCYLLHSFEEFEALARRALHEDLPSGSFIQDDMVHCSYLCDEGKDCCDRMGSCKCGTHTGHFECICEKGYYGKGLQYECTACPSGTYKPEGSPGGISSCIPCPDENHTSPPGSTSPEDCVCREGYRASGQTCELVHCPALKPPENGYFIQNTCNNHFNAACGVRCHPGFDLVGSSIILCLPNGLWSGSESYCRVRTCPHLRQPKHGHISCSTREMLYKTTCLVACDEGYRLEGSDKLTCQGNSQWDGPEPRCVERHCSTFQMPKDVIISPHNCGKQPAKFGTICYVSCRQGFILSGVKEMLRCTTSGKWNVGVQAAVCKDVEAPQINCPKDIEAKTLEQQDSANVTWQIPTAKDNSGEKVSVHVHPAFTPPYLFPIGDVAIVYTATDLSGNQASCIFHIKVIDAEPPVIDWCRSPPPVQVSEKVHAASWDEPQFSDNSGAELVITRSHTQGDLFPQGETIVQYTATDPSGNNRTCDIHIVIKGSPCEIPFTPVNGDFICTPDNTGVNCTLTCLEGYDFTEGSTDKYYCAYEDGVWKPTYTTEWPDCAKKRFANHGFKSFEMFYKAARCDDTDLMKKFSEAFETTLGKMVPSFCSDAEDIDCRLEENLTKKYCLEYNYDYENGFAIGPGGWGAANRLDYSYDDFLDTVQETATSIGNAKSSRIKRSAPLSDYKIKLIFNITASVPLPDERNDTLEWENQQRLLQTLETITNKLKRTLNKDPMYSFQLASEILIADSNSLETKKASPFCRPGSVLRGRMCVNCPLGTYYNLEHFTCESCRIGSYQDEEGQLECKLCPSGMYTEYIHSRNISDCKAQCKQGTYSYSGLETCESCPLGTYQPKFGSRSCLSCPENTSTVKRGAVNISACGVPCPEGKFSRSGLMPCHPCPRDYYQPNAGKAFCLACPFYGTTPFAGSRSITECSSFSSTFSAAEESVVPPASLGHIKKRHEISSQVFHECFFNPCHNSGTCQQLGRGYVCLCPLGYTGLKCETDIDECSPLPCLNNGVCKDLVGEFICECPSGYTGQRCEENINECSSSPCLNKGICVDGVAGYRCTCVKGFVGLHCETEVNECQSNPCLNNAVCEDQVGGFLCKCPPGFLGTRCGKNVDECLSQPCKNGATCKDGANSFRCLCAAGFTGSHCELNINECQSNPCRNQATCVDELNSYSCKCQPGFSGKRCETEQSTGFNLDFEVSGIYGYVMLDGMLPSLHALTCTFWMKSSDDMNYGTPISYAVDNGSDNTLLLTDYNGWVLYVNGREKITNCPSVNDGRWHHIAITWTSANGIWKVYIDGKLSDGGAGLSVGLPIPGMLGGGALVLGQEQDKKGEGFSPAESFVGSISQLNLWDYVLSPQQVKSLATSCPEELSKGNVLAWPDFLSGIVGKVKIDSKSIFCSDCPRLGGSVPHLRTASEDLKPGSKVNLFCDPGFQLVGNPVQYCLNQGQWTQPLPHCERISCGVPPPLENGFHSADDFYAGSTVTYQCNNGYYLLGDSRMFCTDNGSWNGVSPSCLDVDECAVGSDCSEHASCLNVDGSYICSCVPPYTGDGKNCAEPIKCKAPGNPENGHSSGEIYTVGAEVTFSCQEGYQLMGVTKITCLESGEWNHLIPYCKAVSCGKPAIPENGCIEELAFTFGSKVTYRCNKGYTLAGDKESSCLANSSWSHSPPVCEPVKCSSPENINNGKYILSGLTYLSTASYSCDTGYSLQGPSIIECTASGIWDRAPPACHLVFCGEPPAIKDAVITGNNFTFRNTVTYTCKEGYTLAGLDTIECLADGKWSRSDQQCLAVSCDEPPIVDHASPETAHRLFGDIAFYYCSDGYSLADNSQLLCNAQGKWVPPEGQDMPRCIAHFCEKPPSVSYSILESVSKAKFAAGSVVSFKCMEGFVLNTSAKIECMRGGQWNPSPMSIQCIPVRCGEPPSIMNGYASGSNYSFGAMVAYSCNKGFYIKGEKKSTCEATGQWSSPIPTCHPVSCGEPPKVENGFLEHTTGRIFESEVRYQCNPGYKSVGSPVFVCQANRHWHSESPLMCVPLDCGKPPPIQNGFMKGENFEVGSKVQFFCNEGYELVGDSSWTCQKSGKWNKKSNPKCMPAKCPEPPLLENQLVLKELTTEVGVVTFSCKEGHVLQGPSVLKCLPSQQWNDSFPVCKIVLCTPPPLISFGVPIPSSALHFGSTVKYSCVGGFFLRGNSTTLCQPDGTWSSPLPECVPVECPQPEEIPNGIIDVQGLAYLSTALYTCKPGFELVGNTTTLCGENGHWLGGKPTCKAIECLKPKEILNGKFSYTDLHYGQTVTYSCNRGFRLEGPSALTCLETGDWDVDAPSCNAIHCDSPQPIENGFVEGADYSYGAIIIYSCFPGFQVAGHAMQTCEESGWSSSIPTCMPIDCGLPPHIDFGDCTKLKDDQGYFEQEDDMMEVPYVTPHPPYHLGAVAKTWENTKESPATHSSNFLYGTMVSYTCNPGYELLGNPVLICQEDGTWNGSAPSCISIECDLPTAPENGFLRFTETSMGSAVQYSCKPGHILAGSDLRLCLENRKWSGASPRCEAISCKKPNPVMNGSIKGSNYTYLSTLYYECDPGYVLNGTERRTCQDDKNWDEDEPICIPVDCSSPPVSANGQVRGDEYTFQKEIEYTCNEGFLLEGARSRVCLANGSWSGATPDCVPVRCATPPQLANGVTEGLDYGFMKEVTFHCHEGYILHGAPKLTCQSDGNWDAEIPLCKPVNCGPPEDLAHGFPNGFSFIHGGHIQYQCFPGYKLHGNSSRRCLSNGSWSGSSPSCLPCRCSTPVIEYGTVNGTDFDCGKAARIQCFKGFKLLGLSEITCEADGQWSSGFPHCEHTSCGSLPMIPNAFISETSSWKENVITYSCRSGYVIQGSSDLICTEKGVWSQPYPVCEPLSCGSPPSVANAVATGEAHTYESEVKLRCLEGYTMDTDTDTFTCQKDGRWFPERISCSPKKCPLPENITHILVHGDDFSVNRQVSVSCAEGYTFEGVNISVCQLDGTWEPPFSDESCSPVSCGKPESPEHGFVVGSKYTFESTIIYQCEPGYELEGNRERVCQENRQWSGGVAICKETRCETPLEFLNGKADIENRTTGPNVVYSCNRGYSLEGPSEAHCTENGTWSHPVPLCKPNPCPVPFVIPENALLSEKEFYVDQNVSIKCREGFLLQGHGIITCNPDETWTQTSAKCEKISCGPPAHVENAIARGVHYQYGDMITYSCYSGYMLEGFLRSVCLENGTWTSPPICRAVCRFPCQNGGICQRPNACSCPEGWMGRLCEEPICILPCLNGGRCVAPYQCDCPPGWTGSRCHTAVCQSPCLNGGKCVRPNRCHCLSSWTGHNCSRKRRTGF

SEQ ID NO: 85320 - protein, 464 aa, Homo sapiens
  Payload ID: 16956
  Gene Symbol: SRPX
  Gene Name: sushi-repeat containing protein, X-linked
  Uniprot ID: P78539
  ENSP ID: ENSP00000367794
MGSPAHRPALLLLLPPLLLLLLLRVPPSRSFPGSGDSPLEDDEVGYSHPRYKDTPWCSPIKVKYGDVYCRAPQGGYYKTALGTRCDIRCQKGYELHGSSLLICQSNKRWSDKVICKQKRCPTLAMPANGGFKCVDGAYFNSRCEYYCSPGYTLKGERTVTCMDNKAWSGRPASCVDMEPPRIKCPSVKERIAEPNKLTVRVSWETPEGRDTADGILTDVILKGLPPGSNFPEGDHKIQYTVYDRAENKGTCKFRVKVRVKRCGKLNAPENGYMKCSSDGDNYGATCEFSCIGGYELQGSPARVCQSNLAWSGTEPTCAAMNVNVGVRTAAALLDQFYEKRRLLIVSTPTARNLLYRLQLGMLQQAQCGLDLRHITVVELVGVFPTLIGRIGAKIMPPALALQLRLLLRIPLYSFSMVLVDKHGMDKERYVSLVMPVALFNLIDTFPLRKEEMVLQAEMSQTCNT

SEQ ID NO: 85321 - protein, 405 aa, Homo sapiens
  Payload ID: 16956
  Gene Symbol: SRPX
  Gene Name: sushi-repeat containing protein, X-linked
  Uniprot ID: P78539
  ENSP ID: ENSP00000411165
MGSPAHRPALLLLLPPLLLLLLLRVPPSRSFPGSGDSPLEDDEVGYSHPRYKDTPWCSPIKVKYGDVYCRAPQGGYYKTALGTRCDIRCQKGYELHGSSLLICQSNKRWSDKVICKHMEPPRIKCPSVKERIAEPNKLTVRVSWETPEGRDTADGILTDVILKGLPPGSNFPEGDHKIQYTVYDRAENKGTCKFRVKVRVKRCGKLNAPENGYMKCSSDGDNYGATCEFSCIGGYELQGSPARVCQSNLAWSGTEPTCAAMNVNVGVRTAAALLDQFYEKRRLLIVSTPTARNLLYRLQLGMLQQAQCGLDLRHITVVELVGVFPTLIGRIGAKIMPPALALQLRLLLRIPLYSFSMVLVDKHGMDKERYVSLVMPVALFNLIDTFPLRKEEMVLQAEMSQTCNT

SEQ ID NO: 85322 - protein, 444 aa, Homo sapiens
  Payload ID: 16956
  Gene Symbol: SRPX
  Gene Name: sushi-repeat containing protein, X-linked
  Uniprot ID: P78539
  ENSP ID: ENSP00000440758
MGSPAHRPALLLLLPPLLLLLLLRVPPSRSFPDTPWCSPIKVKYGDVYCRAPQGGYYKTALGTRCDIRCQKGYELHGSSLLICQSNKRWSDKVICKQKRCPTLAMPANGGFKCVDGAYFNSRCEYYCSPGYTLKGERTVTCMDNKAWSGRPASCVDMEPPRIKCPSVKERIAEPNKLTVRVSWETPEGRDTADGILTDVILKGLPPGSNFPEGDHKIQYTVYDRAENKGTCKFRVKVRVKRCGKLNAPENGYMKCSSDGDNYGATCEFSCIGGYELQGSPARVCQSNLAWSGTEPTCAAMNVNVGVRTAAALLDQFYEKRRLLIVSTPTARNLLYRLQLGMLQQAQCGLDLRHITVVELVGVFPTLIGRIGAKIMPPALALQLRLLLRIPLYSFSMVLVDKHGMDKERYVSLVMPVALFNLIDTFPLRKEEMVLQAEMSQTCNT

SEQ ID NO: 85323 - protein, 379 aa, Homo sapiens
  Payload ID: 16956
  Gene Symbol: SRPX
  Gene Name: sushi-repeat containing protein, X-linked
  Uniprot ID: P78539
  ENSP ID: ENSP00000445034
MGSPAHRPALLLLLPPLLLLLLLRVPPSRSFPGSGDSPLEDDEVGYSHPRYKDTPWCSPIKVKYGDVYCRAPQGGYYKTALGTRCDIRCQKGYELHGSSLLICQSNKRWSDKVICKQKRCPTLAMPANGGFKCVDGAYFNSRCEYYCSPGYTLKGERTVTCMDNKAWSGRPASCVDMEPPRIKCPSVKERIAEPNKLTVRVSWETPEGRDTADGILTDVILKGLPPGSNFPEGDHKIQYTVYDRAENKGTCKFRVKVRVKRCGKLNAPENGYMKCSSDGDNYGATCEFSCIGGYELQGSPARVCQSNLAWSGTEPTCAAMNVNVGVRTAAALLDQFYEKRRLLIVSTPTARNLLYRLQLGMLQAVAANPTLLLQYGASG

SEQ ID NO: 85324 - protein, 465 aa, Homo sapiens
  Payload ID: 16957
  Gene Symbol: SRPX2
  Gene Name: sushi-repeat containing protein, X-linked 2
  Uniprot ID: O60687
  ENSP ID: ENSP00000362095
MASQLTQRGALFLLFFLTPAVTPTWYAGSGYYPDESYNEVYAEEVPQAPALDYRVPRWCYTLNIQDGEATCYSPKGGNYHSSLGTRCELSCDRGFRLIGRRSVQCLPSRRWSGTAYCRQMRCHALPFITSGTYTCTNGVLLDSRCDYSCSSGYHLEGDRSRICMEDGRWSGGEPVCVDIDPPKIRCPHSREKMAEPEKLTARVYWDPPLVKDSADGTITRVTLRGPEPGSHFPEGEHVIRYTAYDRAYNRASCKFIVKVQVRRCPTLKPPQHGYLTCTSAGDNYGATCEYHCDGGYDRQGTPSRVCQSSRQWSGSPPICAPMKINVNVNSAAGLLDQFYEKQRLLIISAPDPSNRYYKMQISMLQQSTCGLDLRHVTIIELVGQPPQEVGRIREQQLSANIIEELRQFQRLTRSYFNMVLIDKQGIDRDRYMEPVTPEEIFTFIDDYLLSNQELTQRREQRDICE

SEQ ID NO: 85325 - protein, 786 aa, Homo sapiens
  Payload ID: 16958
  Gene Symbol: SUPV3L1
  Gene Name: SUV3-like helicase
  Uniprot ID: Q8IYB8
  ENSP ID: ENSP00000352678
MSFSRALLWARLPAGRQAGHRAAICSALRPHFGPFPGVLGQVSVLATASSSASGGSKIPNTSLFVPLTVKPQGPSADGDVGAELTRPLDKNEVKKVLDKFYKRKEIQKLGADYGLDARLFHQAFISFRNYIMQSHSLDVDIHIVLNDICFGAAHADDLFPFFLRHAKQIFPVLDCKDDLRKISDLRIPPNWYPDARAMQRKIIFHSGPTNSGKTYHAIQKYFSAKSGVYCGPLKLLAHEIFEKSNAAGVPCDLVTGEERVTVQPNGKQASHVSCTVEMCSVTTPYEVAVIDEIQMIRDPARGWAWTRALLGLCAEEVHLCGEPAAIDLVMELMYTTGEEVEVRDYKRLTPISVLDHALESLDNLRPGDCIVCFSKNDIYSVSRQIEIRGLESAVIYGSLPPGTKLAQAKKFNDPNDPCKILVATDAIGMGLNLSIRRIIFYSLIKPSINEKGERELEPITTSQALQIAGRAGRFSSRFKEGEVTTMNHEDLSLLKEILKRPVDPIRAAGLHPTAEQIEMFAYHLPDATLSNLIDIFVDFSQVDGQYFVCNMDDFKFSAELIQHIPLSLRVRYVFCTAPINKKQPFVCSSLLQFARQYSRNEPLTFAWLRRYIKWPLLPPKNIKDLMDLEAVHDVLDLYLWLSYRFMDMFPDASLIRDLQKELDGIIQDGVHNITKLIKMSETHKLLNLEGFPSGSQSRLSGTLKSQARRTRGTKALGSKATEPPSPDAGELSLASRLVQQGLLTPDMLKQLEKEWMTQQTEHNKEKTESGTHPKGTRRKKKEPDSD

SEQ ID NO: 85326 - protein, 263 aa, Homo sapiens
  Payload ID: 16958
  Gene Symbol: SUPV3L1
  Gene Name: SUV3-like helicase
  ENSP ID: ENSP00000409072
MSFSRALLWARLPAGRQAGHRAAICSALRPHFGPFPGVLGQVSVLATASSSASGGSKIPNTSLFVPLTVKPQGPSADGDVGAELTRPLDKNEVAVIDEIQMIRDPARGWAWTRALLGLCAEEVHLCGEPAAIDLVMELMYTTGEEVEVRDYKRLTPISVLDHALESLDNLRPGDCIVCFSKNDIYSVSRQIEIRGLESAVIYGSLPPGTKLAQAKKFNDPNDPCKILVATDAIGMGLNLSIRRIIFYSLIKPSINEKGERELE

SEQ ID NO: 85327 - protein, 152 aa, Homo sapiens
  Payload ID: 16959
  Gene Symbol: SZRD1
  Gene Name: SUZ RNA binding domain containing 1
  Uniprot ID: Q7Z422
  ENSP ID: ENSP00000383866
MEDEEVAESWEEAADSGEIDRRLEKKLKITQKESRKSKSPPKVPIVIQDDSLPAGPPPQIRILKRPTSNGVVSSPNSTSRPTLPVKSLAQREAEYAEARKRILGSASPEEEQEKPILDRPTRISQPEDSRQPNNVIRQPLGPDGSQGFKQRR

SEQ ID NO: 85328 - protein, 133 aa, Homo sapiens
  Payload ID: 16959
  Gene Symbol: SZRD1
  Gene Name: SUZ RNA binding domain containing 1
  Uniprot ID: Q7Z422
  ENSP ID: ENSP00000383867
MRRSLRAGKRRQTAGRKSKSPPKVPIVIQDDSLPAGPPPQIRILKRPTSNGVVSSPNSTSRPTLPVKSLAQREAEYAEARKRILGSASPEEEQEKPILDRPTRISQPEDSRQPNNVIRQPLGPDGSQGFKQRR

SEQ ID NO: 85329 - protein, 132 aa, Homo sapiens
  Payload ID: 16959
  Gene Symbol: SZRD1
  Gene Name: SUZ RNA binding domain containing 1
  Uniprot ID: Q7Z422
  ENSP ID: ENSP00000418012
MRRSLRAGKRRQTAGKSKSPPKVPIVIQDDSLPAGPPPQIRILKRPTSNGVVSSPNSTSRPTLPVKSLAQREAEYAEARKRILGSASPEEEQEKPILDRPTRISQPEDSRQPNNVIRQPLGPDGSQGFKQRR

SEQ ID NO: 85330 - protein, 151 aa, Homo sapiens
  Payload ID: 16959
  Gene Symbol: SZRD1
  Gene Name: SUZ RNA binding domain containing 1
  Uniprot ID: Q7Z422
  ENSP ID: ENSP00000419589
MEDEEVAESWEEAADSGEIDRRLEKKLKITQKERKSKSPPKVPIVIQDDSLPAGPPPQIRILKRPTSNGVVSSPNSTSRPTLPVKSLAQREAEYAEARKRILGSASPEEEQEKPILDRPTRISQPEDSRQPNNVIRQPLGPDGSQGFKQRR

SEQ ID NO: 85331 - protein, 84 aa, Homo sapiens
  Payload ID: 16959
  Gene Symbol: SZRD1
  Gene Name: SUZ RNA binding domain containing 1
  ENSP ID: ENSP00000420441
MRRSLRAGKRRQTAGSGPVCQSLLAVIRQGKCSLVPCSPFTSPGMLRASGVWLLAWSMKAFGLNPQRLLNSTAVKALFMMEKLE

SEQ ID NO: 85332 - protein, 739 aa, Homo sapiens
  Payload ID: 16960
  Gene Symbol: SUZ12
  Gene Name: SUZ12 polycomb repressive complex 2 subunit
  Uniprot ID: Q15022
  ENSP ID: ENSP00000316578
MAPQKHGGGGGGGSGPSAGSGGGGFGGSAAVAAATASGGKSGGGSCGGGGSYSASSSSSAAAAAGAAVLPVKKPKMEHVQADHELFLQAFEKPTQIYRFLRTRNLIAPIFLHRTLTYMSHRNSRTNIKRKTFKVDDMLSKVEKMKGEQESHSLSAHLQLTFTGFFHKNDKPSPNSENEQNSVTLEVLLVKVCHKKRKDVSCPIRQVPTGKKQVPLNPDLNQTKPGNFPSLAVSSNEFEPSNSHMVKSYSLLFRVTRPGRREFNGMINGETNENIDVNEELPARRKRNREDGEKTFVAQMTVFDKNRRLQLLDGEYEVAMQEMEECPISKKRATWETILDGKRLPPFETFSQGPTLQFTLRWTGETNDKSTAPIAKPLATRNSESLHQENKPGSVKPTQTIAVKESLTTDLQTRKEKDTPNENRQKLRIFYQFLYNNNTRQQTEARDDLHCPWCTLNCRKLYSLLKHLKLCHSRFIFNYVYHPKGARIDVSINECYDGSYAGNPQDIHRQPGFAFSRNGPVKRTPITHILVCRPKRTKASMSEFLESEDGEVEQQRTYSSGHNRLYFHSDTCLPLRPQEMEVDSEDEKDPEWLREKTITQIEEFSDVNEGEKEVMKLWNLHVMKHGFIADNQMNHACMLFVENYGQKIIKKNLCRNFMLHLVSMHDFNLISIMSIDKAVTKLREMQQKLEKGESASPANEEITEEQNGTANGFSEINSKEKALETDSVSGVSKQSKKQKL

SEQ ID NO: 85333 - protein, 716 aa, Homo sapiens
  Payload ID: 16960
  Gene Symbol: SUZ12
  Gene Name: SUZ12 polycomb repressive complex 2 subunit
  ENSP ID: ENSP00000463936
MAPQKHGGGGGGGSGPSAGSGGGGFGGSAAVAAATASGGKSGGGSCGGGGSYSASSSSSAAAAAGAAVLPVKKPKMEHVQADHELFLQAFEKPTQIYRFLRTRNLIAPIFLHRTLTYMSHRNSRTNIKSLSAHLQLTFTGFFHKNDKPSPNSENEQNSVTLEVLLVKVCHKKRKDVSCPIRQVPTGKKQVPLNPDLNQTKPGNFPSLAVSSNEFEPSNSHMVKSYSLLFRVTRPGRREFNGMINGETNENIDVNEELPARRKRNREDGEKTFVAQMTVFDKNRRLQLLDGEYEVAMQEMEECPISKKRATWETILDGKRLPPFETFSQGPTLQFTLRWTGETNDKSTAPIAKPLATRNSESLHQENKPGSVKPTQTIAVKESLTTDLQTRKEKDTPNENRQKLRIFYQFLYNNNTRQQTEARDDLHCPWCTLNCRKLYSLLKHLKLCHSRFIFNYVYHPKGARIDVSINECYDGSYAGNPQDIHRQPGFAFSRNGPVKRTPITHILVCRPKRTKASMSEFLESEDGEVEQQRTYSSGHNRLYFHSDTCLPLRPQEMEVDSEDEKDPEWLREKTITQIEEFSDVNEGEKEVMKLWNLHVMKHGFIADNQMNHACMLFVENYGQKIIKKNLCRNFMLHLVSMHDFNLISIMSIDKAVTKLREMQQKLEKGESASPANEEITEEQNGTANGFSEINSKEKALETDSVSGVSKQSKKQKL

SEQ ID NO: 85334 - protein, 155 aa, Homo sapiens
  Payload ID: 16961
  Gene Symbol: SVOP
  Gene Name: SV2 related protein
  ENSP ID: ENSP00000447275
MEEDLFQLRQLPVVKFRRTGESARSEDDTASGEHEVQIEGVHVGLEAVELDDGAAVPKEFANPTDDTFMVEDAVEAIGFGKFQWKLSVLTGLAWVVFVGMMSSSTLWGNISDQYGRKTGLKISVLWTLYYGILSAFAPVYSWILVLRGLVGFGIG

SEQ ID NO: 85335 - protein, 104 aa, Homo sapiens
  Payload ID: 16961
  Gene Symbol: SVOP
  Gene Name: SV2 related protein
  ENSP ID: ENSP00000447583
MEEDLFQLRQLPVVKFRRTGESARSEDDTASGEHEVQIEGVHVGLEAVELDDGAAVPKEFANPTDGGLCRHDVQLHALGKYLRPVRQENRAEDQRAVDSVLWHP

SEQ ID NO: 85336 - protein, 548 aa, Homo sapiens
  Payload ID: 16961
  Gene Symbol: SVOP
  Gene Name: SV2 related protein
  Uniprot ID: Q8N4V2
  ENSP ID: ENSP00000479104
MEEDLFQLRQLPVVKFRRTGESARSEDDTASGEHEVQIEGVHVGLEAVELDDGAAVPKEFANPTDDTFMVEDAVEAIGFGKFQWKLSVLTGLAWMADAMEMMILSILAPQLHCEWRLPSWQVALLTSVVFVGMMSSSTLWGNISDQYGRKTGLKISVLWTLYYGILSAFAPVYSWILVLRGLVGFGIGGVPQSVTLYAEFLPMKARAKCILLIEVFWAIGTVFEVVLAVFVMPSLGWRWLLILSAVPLLLFAVLCFWLPESARYDVLSGNQEKAIATLKRIATENGAPMPLGKLIISRQEDRGKMRDLFTPHFRWTTLLLWFIWFSNAFSYYGLVLLTTELFQAGDVCGISSRKKAVEAKCSLACEYLSEEDYMDLLWTTLSEFPGVLVTLWIIDRLGRKKTMALCFVIFSFCSLLLFICVGRNVLTLLLFIARAFISGGFQAAYVYTPEVYPTATRALGLGTCSGMARVGALITPFIAQVMLESSVYLTLAVYSGCCLLAALASCFLPIETKGRGLQESSHREWGQEMVGRGMHGAGVTRSNSGSQE

SEQ ID NO: 85337 - protein, 340 aa, Homo sapiens
  Payload ID: 16962
  Gene Symbol: SVOPL
  Gene Name: SVOP-like
  Uniprot ID: Q8N434
  ENSP ID: ENSP00000288513
MAAGRLIIKTEFLPTKYRGYMLPLSQVFWLAGSLLIIGLASVIIPTIGWRWLIRVASIPGIILIVAFKFIPESARFNVSTGNTRAALATLERVAKMNRSVMPEGKLVEPVLEKRGRFADLLDAKYLRTTLQIWVIWLGISFAYYGVILASAELLERDLVCGSKSDSAVVVTGGDSGESQSPCYCHMFAPSDYRTMIISTIGEIALNPLNILGINFLGRRLSLSITMGCTALFFLLLNICTSSAGLIGFLFMLRALVAANFNTVYIYTAEVYPTTMRALGMGTSGSLCRIGAMVAPFISQVLMSASILGALCLFSSVCVVCAISAFTLPIETKGRALQQIK

SEQ ID NO: 85338 - protein, 233 aa, Homo sapiens
  Payload ID: 16962
  Gene Symbol: SVOPL
  Gene Name: SVOP-like
  ENSP ID: ENSP00000393487
MNRSVMPEGKLVEPVLEKRGRFADLLDAKYLRTTLQIWVIWLGISFAYYGVILASAELLERDLVCGSKSDSAVVVTGGDSGESQSPCYCHMFAPSDYRTMIISTIGEIALNPLNILGINFLGRRLSLSITMGCTALFFLLLNICTSSAGLIGFLFMLRALVAANFNTVYIYTAEVYPTTMRALGMGTSGSLCRIGAMVAPFISQRALLLVNHFILYCRCEINGELSRTQTKRN

SEQ ID NO: 85339 - protein, 492 aa, Homo sapiens
  Payload ID: 16962
  Gene Symbol: SVOPL
  Gene Name: SVOP-like
  Uniprot ID: Q8N434
  ENSP ID: ENSP00000405482
MATKPTEPVTILSLRKLSLGTAEPQVKEPKTFTVEDAVETIGFGRFHIALFLIMGSTGVVEAMEIMLIAVVSPVIRCEWQLENWQVALVTTMVFFGYMVFSILFGLLADRYGRWKILLISFLWGAYFSLLTSFAPSYIWFVFLRTMVGCGVSGHSQGLIIKTEFLPTKYRGYMLPLSQVFWLAGSLLIIGLASVIIPTIGWRWLIRVASIPGIILIVAFKFIPESARFNVSTGNTRAALATLERVAKMNRSVMPEGKLVEPVLEKRGRFADLLDAKYLRTTLQIWVIWLGISFAYYGVILASAELLERDLVCGSKSDSAVVVTGGDSGESQSPCYCHMFAPSDYRTMIISTIGEIALNPLNILGINFLGRRLSLSITMGCTALFFLLLNICTSSAGLIGFLFMLRALVAANFNTVYIYTAEVYPTTMRALGMGTSGSLCRIGAMVAPFISQVLMSASILGALCLFSSVCVVCAISAFTLPIETKGRALQQIK

SEQ ID NO: 85340 - protein, 372 aa, Homo sapiens
  Payload ID: 16962
  Gene Symbol: SVOPL
  Gene Name: SVOP-like
  ENSP ID: ENSP00000412830
MATKPTEPVTILSLRKLSLGTAEPQVKEPKTFTVEDAVETIGFGRFHIALFLIMGSTGVFWLAGSLLIIGLASVIIPTIGWRWLIRVASIPGIILIVAFKFIPESARFNVSTGNTRAALATLERVAKMNRSVMPEGKLVEPVLEKRGRFADLLDAKYLRTTLQIWVIWLGISFAYYGVILASAELLERDLVCGSKSDSAVVVTGGDSGESQSPCYCHMFAPSDYRTMIISTIGEIALNPLNILGINFLGRRLSLSITMGCTALFFLLLNICTSSAGLIGFLFMLRALVAANFNTVYIYTAEVYPTTMRALGMGTSGSLCRIGAMVAPFISQVLMSASILGALCLFSSVCVVCAISAFTLPIETKGRALQQIK

SEQ ID NO: 85341 - protein, 340 aa, Homo sapiens; identical to SEQ ID NO: 85337
  Payload ID: 16962
  Gene Symbol: SVOPL
  Gene Name: SVOP-like
  Uniprot ID: Q8N434
  ENSP ID: ENSP00000417018

SEQ ID NO: 85342 - protein, 585 aa, Homo sapiens
  Payload ID: 16963
  Gene Symbol: SWAP70
  Gene Name: SWAP switching B-cell complex 70kDa subunit
  Uniprot ID: Q9UH65
  ENSP ID: ENSP00000315630
MGSLKEELLKAIWHAFTALDQDHSGKVSKSQLKVLSHNLCTVLKVPHDPVALEEHFRDDDEGPVSNQGYMPYLNRFILEKVQDNFDKIEFNRMCWTLCVKKNLTKNPLLITEEDAFKIWVIFNFLSEDKYPLIIVSEEIEYLLKKLTEAMGGGWQQEQFEHYKINFDDSKNGLSAWELIELIGNGQFSKGMDRQTVSMAINEVFNELILDVLKQGYMMKKGHRRKNWTERWFVLKPNIISYYVSEDLKDKKGDILLDENCCVESLPDKDGKKCLFLVKCFDKTFEISASDKKKKQEWIQAIHSTIHLLKLGSPPPHKEARQRRKELRKKQLAEQEELERQMKELQAANESKQQELEAVRKKLEEAASRAAEEEKKRLQTQVELQARFSTELEREKLIRQQMEEQVAQKSSELEQYLQRVRELEDMYLKLQEALEDERQARQDEETVRKLQARLLEEESSKRAELEKWHLEQQQAIQTTEAEKQELENQRVLKEQALQEAMEQLEQLELERKQALEQYEEVKKKLEMATNKTKSWKDKVAHHEGLIRLIEPGSKNPHLITNWGPAAFTEAELEEREKNWKEKKTTE

SEQ ID NO: 85343 - protein, 527 aa, Homo sapiens
  Payload ID: 16963
  Gene Symbol: SWAP70
  Gene Name: SWAP switching B-cell complex 70kDa subunit
  ENSP ID: ENSP00000399056
MGSLKEELLKAIWHAFTALDQDHSGKVSKSQLKVLSHNLCTVLKVPHDPVALEEHFRDDDEGPVSNQGYMPYLNRFILEKIEYLLKKLTEAMGGGWQQEQFEHYKINFDDSKNGLSAWELIELIGNGQFSKGMDRQTVSMAINEVFNELILDVLKQGYMMKKGHRRKNWTERWFVLKPNIISYYVSEDLKDKKGDILLDENCCVESLPDKDGKKCLFLVKCFDKTFEISASDKKKKQEWIQAIHSTIHLLKLGSPPPHKEARQRRKELRKKQLAEQEELERQMKELQAANESKQQELEAVRKKLEEAASRAAEEEKKRLQTQVELQARFSTELEREKLIRQQMEEQVAQKSSELEQYLQRVRELEDMYLKLQEALEDERQARQDEETVRKLQARLLEEESSKRAELEKWHLEQQQAIQTTEAEKQELENQRVLKEQALQEAMEQLEQLELERKQALEQYEEVKKKLEMATNKTKSWKDKVAHHEGLIRLIEPGSKNPHLITNWGPAAFTEAELEEREKNWKEKKTTE

SEQ ID NO: 85344 - protein, 149 aa, Homo sapiens
  Payload ID: 16963
  Gene Symbol: SWAP70
  Gene Name: SWAP switching B-cell complex 70kDa subunit
  ENSP ID: ENSP00000431768
MGSLKEELLKAIWHAFTALDQDHSGKVSKSQLKVLSHNLCTVLKVPHDPVALEEHFRDDDEGPVSNQGYMPYLNRFILEKITKTLPASEPSDMLLPVLSKTTLTRLNSIGCVGPSVSKKTSQRIPCSLQKKMHLKYGLFSTFYLRTSIH

SEQ ID NO: 85345 - protein, 23 aa, Homo sapiens
  Payload ID: 16963
  Gene Symbol: SWAP70
  Gene Name: SWAP switching B-cell complex 70kDa subunit
  ENSP ID: ENSP00000433824
  MOD_RES (1)..(1): Any amino acid
XFPVGLGQSSSFRILRGQAERVT

SEQ ID NO: 85346 - protein, 226 aa, Homo sapiens
  Payload ID: 16963
  Gene Symbol: SWAP70
  Gene Name: SWAP switching B-cell complex 70kDa subunit
  ENSP ID: ENSP00000435587
MGGGWQQEQFEHYKINFDDSKNGLSAWELIELIGNGQFSKGMDRQTVSMAINEVFNELILDVLKQGYMMKKGHRRKNWTERWFVLKPNIISYYVSEDLKDKKGDILLDENCCVESLPDKDGKKCLFLVKCFDKTFEISASDKKKKQEWIQAIHSTIHLLKLGSPPPHKEARQRRKELRKKQLAEQEELERQMKELQAANESKQQELEAVRKKLEEAASRAAEEEKK

SEQ ID NO: 85347 - protein, 1070 aa, Homo sapiens
  Payload ID: 16964
  Gene Symbol: SMARCA1
  Gene Name: SWI/SNF related, matrix associated, actin dependent regulator of chromatin, subfamily a, member 1
  ENSP ID: ENSP00000360162
MEQDTAAVAATVAAADATATIVVIEDEQPGPSTSQEEGAAAAATEATAATEKGEKKKEKNVSSFQLKLAAKAPKSEKEMDPEYEEKMKADRAKRFEFLLKQTELFAHFIQPSAQKSPTSPLNMKLGRPRIKKDEKQSLISAGDYRHRRTEQEEDEELLSESRKTSNVCIRFEVSPSYVKGGPLRDYQIRGLNWLISLYENGVNGILADEMGLGKTLQTIALLGYLKHYRNIPGPHMVLVPKSTLHNWMNEFKRWVPSLRVICFVGDKDARAAFIRDEMMPGEWDVCVTSYEMVIKEKSVFKKFHWRYLVIDEAHRIKNEKSKLSEIVREFKSTNRLLLTGTPLQNNLHELWALLNFLLPDVFNSADDFDSWFDTKNCLGDQKLVERLHAVLKPFLLRRIKTDVEKSLPPKKEIKIYLGLSKMQREWYTKILMKDIDVLNSSGKMDKMRLLNILMQLRKCCNHPYLFDGAEPGPPYTTDEHIVSNSGKMVVLDKLLAKLKEQGSRVLIFSQMTRLLDILEDYCMWRGYEYCRLDGQTPHEEREDKFLEVEFLGQREAIEAFNAPNSSKFIFMLSTRAGGLGINLASADVVILYDSDWNPQVDLQAMDRAHRIGQKKPVRVFRLITDNTVEERIVERAEIKLRLDSIVIQQGRLIDQQSNKLAKEEMLQMIRHGATHVFASKESELTDEDITTILERGEKKTAEMNERLQKMGESSLRNFRMDIEQSLYKFEGEDYREKQKLGMVEWIEPPKRERKANYAVDAYFREALRVSEPKIPKAPRPPKQPNVQDFQFFPPRLFELLEKEILYYRKTIGYKVPRNPDIPNPALAQREEQKKIDGAEPLTPEETEEKEKLLTQGFTNWTKRDFNQFIKANEKYGRDDIDNIAREVEGKSPEEVMEYSAVFWERCNELQDIEKIMAQIERGEARIQRRISIKKALDAKIARYKAPFHQLRIQYGTSKGKNYTEEEDRFLICMLHKMGFDRENVYEELRQCVRNAPQFRFDWFIKSRTAMEFQRRCNTLISLIEKENMEIEERERAEKKKRATKTPMSQKRKAESATESSGKKDVKKVKS

SEQ ID NO: 85348 - protein, 1054 aa, Homo sapiens
  Payload ID: 16964
  Gene Symbol: SMARCA1
  Gene Name: SWI/SNF related, matrix associated, actin dependent regulator of chromatin, subfamily a, member 1
  Uniprot ID: P28370
  ENSP ID: ENSP00000360163
MEQDTAAVAATVAAADATATIVVIEDEQPGPSTSQEEGAAAAATEATAATEKGEKKKEKNVSSFQLKLAAKAPKSEKEMDPEYEEKMKADRAKRFEFLLKQTELFAHFIQPSAQKSPTSPLNMKLGRPRIKKDEKQSLISAGDYRHRRTEQEEDEELLSESRKTSNVCIRFEVSPSYVKGGPLRDYQIRGLNWLISLYENGVNGILADEMGLGKTLQTIALLGYLKHYRNIPGPHMVLVPKSTLHNWMNEFKRWVPSLRVICFVGDKDARAAFIRDEMMPGEWDVCVTSYEMVIKEKSVFKKFHWRYLVIDEAHRIKNEKSKLSEIVREFKSTNRLLLTGTPLQNNLHELWALLNFLLPDVFNSADDFDSWFDTKNCLGDQKLVERLHAVLKPFLLRRIKTDVEKSLPPKKEIKIYLGLSKMQREWYTKILMKDIDVLNSSGKMDKMRLLNILMQLRKCCNHPYLFDGAEPGPPYTTDEHIVSNSGKMVVLDKLLAKLKEQGSRVLIFSQMTRLLDILEDYCMWRGYEYCRLDGQTPHEEREDKFLEVEFLGQREAIEAFNAPNSSKFIFMLSTRAGGLGINLASADVVILYDSDWNPQVDLQAMDRAHRIGQKKPVRVFRLITDNTVEERIVERAEIKLRLDSIVIQQGRLIDQQSNKLAKEEMLQMIRHGATHVFASKESELTDEDITTILERGEKKTAEMNERLQKMGESSLRNFRMDIEQSLYKFEGEDYREKQKLGMVEWIEPPKRERKANYAVDAYFREALRVSEPKIPKAPRPPKQPNVQDFQFFPPRLFELLEKEILYYRKTIGYKVPRNPDIPNPALAQREEQKKIDGAEPLTPEETEEKEKLLTQGFTNWTKRDFNQFIKANEKYGRDDIDNIAREVEGKSPEEVMEYSAVFWERCNELQDIEKIMAQIERGEARIQRRISIKKALDAKIARYKAPFHQLRIQYGTSKGKNYTEEEDRFLICMLHKMGFDRENVYEELRQCVRNAPQFRFDWFIKSRTAMEFQRRCNTLISLIEKENMEIEERERAEKKKRATKTPMVKFSAFS

SEQ ID NO: 85349 - protein, 1058 aa, Homo sapiens
  Payload ID: 16964
  Gene Symbol: SMARCA1
  Gene Name: SWI/SNF related, matrix associated, actin dependent regulator of chromatin, subfamily a, member 1
  ENSP ID: ENSP00000360164
MEQDTAAVAATVAAADATATIVVIEDEQPGPSTSQEEGAAAAATEATAATEKGEKKKEKNVSSFQLKLAAKAPKSEKEMDPEYEEKMKADRAKRFEFLLKQTELFAHFIQPSAQKSPTSPLNMKLGRPRIKKDEKQSLISAGDYRHRRTEQEEDEELLSESRKTSNVCIRFEVSPSYVKGGPLRDYQIRGLNWLISLYENGVNGILADEMGLGKTLQTIALLGYLKHYRNIPGPHMVLVPKSTLHNWMNEFKRWVPSLRVICFVGDKDARAAFIRDEMMPGEWDVCVTSYEMVIKEKSVFKKFHWRYLVIDEAHRIKNEKSKLSEIVREFKSTNRLLLTGTPLQNNLHELWALLNFLLPDVFNSADDFDSWFDTKNCLGDQKLVERLHAVLKPFLLRRIKTDVEKSLPPKKEIKIYLGLSKMQREWYTKILMKDIDVLNSSGKMDKMRLLNILMQLRKCCNHPYLFDGAEPGPPYTTDEHIVSNSGKMVVLDKLLAKLKEQGSRVLIFSQMTRLLDILEDYCMWRGYEYCRLDGQTPHEEREEAIEAFNAPNSSKFIFMLSTRAGGLGINLASADVVILYDSDWNPQVDLQAMDRAHRIGQKKPVRVFRLITDNTVEERIVERAEIKLRLDSIVIQQGRLIDQQSNKLAKEEMLQMIRHGATHVFASKESELTDEDITTILERGEKKTAEMNERLQKMGESSLRNFRMDIEQSLYKFEGEDYREKQKLGMVEWIEPPKRERKANYAVDAYFREALRVSEPKIPKAPRPPKQPNVQDFQFFPPRLFELLEKEILYYRKTIGYKVPRNPDIPNPALAQREEQKKIDGAEPLTPEETEEKEKLLTQGFTNWTKRDFNQFIKANEKYGRDDIDNIAREVEGKSPEEVMEYSAVFWERCNELQDIEKIMAQIERGEARIQRRISIKKALDAKIARYKAPFHQLRIQYGTSKGKNYTEEEDRFLICMLHKMGFDRENVYEELRQCVRNAPQFRFDWFIKSRTAMEFQRRCNTLISLIEKENMEIEERERAEKKKRATKTPMSQKRKAESATESSGKKDVKKVKS

SEQ ID NO: 85350 - protein, 1590 aa, Homo sapiens
  Payload ID: 16965
  Gene Symbol: SMARCA2
  Gene Name: SWI/SNF related, matrix associated, actin dependent regulator of chromatin, subfamily a, member 2
  Uniprot ID: P51531
  ENSP ID: ENSP00000265773
MSTPTDPGAMPHPGPSPGPGPSPGPILGPSPGPGPSPGSVHSMMGPSPGPPSVSHPMPTMGSTDFPQEGMHQMHKPIDGIHDKGIVEDIHCGSMKGTGMRPPHPGMGPPQSPMDQHSQGYMSPHPSPLGAPEHVSSPMSGGGPTPPQMPPSQPGALIPGDPQAMSQPNRGPSPFSPVQLHQLRAQILAYKMLARGQPLPETLQLAVQGKRTLPGLQQQQQQQQQQQQQQQQQQQQQQQPQQQPPQPQTQQQQQPALVNYNRPSGPGPELSGPSTPQKLPVPAPGGRPSPAPPAAAQPPAAAVPGPSVPQPAPGQPSPVLQLQQKQSRISPIQKPQGLDPVEILQEREYRLQARIAHRIQELENLPGSLPPDLRTKATVELKALRLLNFQRQLRQEVVACMRRDTTLETALNSKAYKRSKRQTLREARMTEKLEKQQKIEQERKRRQKHQEYLNSILQHAKDFKEYHRSVAGKIQKLSKAVATWHANTEREQKKETERIEKERMRRLMAEDEEGYRKLIDQKKDRRLAYLLQQTDEYVANLTNLVWEHKQAQAAKEKKKRRRRKKKAEENAEGGESALGPDGEPIDESSQMSDLPVKVTHTETGKVLFGPEAPKASQLDAWLEMNPGYEVAPRSDSEESDSDYEEEDEEEESSRQETEEKILLDPNSEEVSEKDAKQIIETAKQDVDDEYSMQYSARGSQSYYTVAHAISERVEKQSALLINGTLKHYQLQGLEWMVSLYNNNLNGILADEMGLGKTIQTIALITYLMEHKRLNGPYLIIVPLSTLSNWTYEFDKWAPSVVKISYKGTPAMRRSLVPQLRSGKFNVLLTTYEYIIKDKHILAKIRWKYMIVDEGHRMKNHHCKLTQVLNTHYVAPRRILLTGTPLQNKLPELWALLNFLLPTIFKSCSTFEQWFNAPFAMTGERVDLNEEETILIIRRLHKVLRPFLLRRLKKEVESQLPEKVEYVIKCDMSALQKILYRHMQAKGILLTDGSEKDKKGKGGAKTLMNTIMQLRKICNHPYMFQHIEESFAEHLGYSNGVINGAELYRASGKFELLDRILPKLRATNHRVLLFCQMTSLMTIMEDYFAFRNFLYLRLDGTTKSEDRAALLKKFNEPGSQYFIFLLSTRAGGLGLNLQAADTVVIFDSDWNPHQDLQAQDRAHRIGQQNEVRVLRLCTVNSVEEKILAAAKYKLNVDQKVIQAGMFDQKSSSHERRAFLQAILEHEEENEEEDEVPDDETLNQMIARREEEFDLFMRMDMDRRREDARNPKRKPRLMEEDELPSWIIKDDAEVERLTCEEEEEKIFGRGSRQRRDVDYSDALTEKQWLRAIEDGNLEEMEEEVRLKKRKRRRNVDKDPAKEDVEKAKKRRGRPPAEKLSPNPPKLTKQMNAIIDTVINYKDRCNVEKVPSNSQLEIEGNSSGRQLSEVFIQLPSRKELPEYYELIRKPVDFKKIKERIRNHKYRSLGDLEKDVMLLCHNAQTFNLEGSQIYEDSIVLQSVFKSARQKIAKEEESEDESNEEEEEEDEEESESEAKSVKVKIKLNKKDDKGRDKGKGKKRPNRGKAKPVVSDFDSDEEQDEREQSEGSGTDDE

SEQ ID NO: 85351 - protein, 278 aa, Homo sapiens
  Payload ID: 16965
  Gene Symbol: SMARCA2
  Gene Name: SWI/SNF related, matrix associated, actin dependent regulator of chromatin, subfamily a, member 2
  ENSP ID: ENSP00000305411
MLMKRLAARCFAGLLILSPLTVISDSRPADSGKAIEDGNLEEMEEEVRLKKRKRRRNVDKDPAKEDVEKAKKRRGRPPAEKLSPNPPKLTKQMNAIIDTVINYKDSSGRQLSEVFIQLPSRKELPEYYELIRKPVDFKKIKERIRNHKYRSLGDLEKDVMLLCHNAQTFNLEGSQIYEDSIVLQSVFKSARQKIAKEEESEDESNEEEEEEDEEESESEAKSVKVKIKLNKKDDKGRDKGKGKKRPNRGKAKPVVSDFDSDEEQDEREQSEGSGTDDE

SEQ ID NO: 85352 - protein, 248 aa, Homo sapiens
  Payload ID: 16965
  Gene Symbol: SMARCA2
  Gene Name: SWI/SNF related, matrix associated, actin dependent regulator of chromatin, subfamily a, member 2
  ENSP ID: ENSP00000324770
MWLAIEDGNLEEMEEEVRLKKRKRRRNVDKDPAKEDVEKAKKRRGRPPAEKLSPNPPKLTKQMNAIIDTVINYKDSSGRQLSEVFIQLPSRKELPEYYELIRKPVDFKKIKERIRNHKYRSLGDLEKDVMLLCHNAQTFNLEGSQIYEDSIVLQSVFKSARQKIAKEEESEDESNEEEEEEDEEESESEAKSVKVKIKLNKKDDKGRDKGKGKKRPNRGKAKPVVSDFDSDEEQDEREQSEGSGTDDE

SEQ ID NO: 85353 - protein, 1572 aa, Homo sapiens
  Payload ID: 16965
  Gene Symbol: SMARCA2
  Gene Name: SWI/SNF related, matrix associated, actin dependent regulator of chromatin, subfamily a, member 2
  Uniprot ID: P51531
  ENSP ID: ENSP00000349788
MSTPTDPGAMPHPGPSPGPGPSPGPILGPSPGPGPSPGSVHSMMGPSPGPPSVSHPMPTMGSTDFPQEGMHQMHKPIDGIHDKGIVEDIHCGSMKGTGMRPPHPGMGPPQSPMDQHSQGYMSPHPSPLGAPEHVSSPMSGGGPTPPQMPPSQPGALIPGDPQAMSQPNRGPSPFSPVQLHQLRAQILAYKMLARGQPLPETLQLAVQGKRTLPGLQQQQQQQQQQQQQQQQQQQQQQQPQQQPPQPQTQQQQQPALVNYNRPSGPGPELSGPSTPQKLPVPAPGGRPSPAPPAAAQPPAAAVPGPSVPQPAPGQPSPVLQLQQKQSRISPIQKPQGLDPVEILQEREYRLQARIAHRIQELENLPGSLPPDLRTKATVELKALRLLNFQRQLRQEVVACMRRDTTLETALNSKAYKRSKRQTLREARMTEKLEKQQKIEQERKRRQKHQEYLNSILQHAKDFKEYHRSVAGKIQKLSKAVATWHANTEREQKKETERIEKERMRRLMAEDEEGYRKLIDQKKDRRLAYLLQQTDEYVANLTNLVWEHKQAQAAKEKKKRRRRKKKAEENAEGGESALGPDGEPIDESSQMSDLPVKVTHTETGKVLFGPEAPKASQLDAWLEMNPGYEVAPRSDSEESDSDYEEEDEEEESSRQETEEKILLDPNSEEVSEKDAKQIIETAKQDVDDEYSMQYSARGSQSYYTVAHAISERVEKQSALLINGTLKHYQLQGLEWMVSLYNNNLNGILADEMGLGKTIQTIALITYLMEHKRLNGPYLIIVPLSTLSNWTYEFDKWAPSVVKISYKGTPAMRRSLVPQLRSGKFNVLLTTYEYIIKDKHILAKIRWKYMIVDEGHRMKNHHCKLTQVLNTHYVAPRRILLTGTPLQNKLPELWALLNFLLPTIFKSCSTFEQWFNAPFAMTGERVDLNEEETILIIRRLHKVLRPFLLRRLKKEVESQLPEKVEYVIKCDMSALQKILYRHMQAKGILLTDGSEKDKKGKGGAKTLMNTIMQLRKICNHPYMFQHIEESFAEHLGYSNGVINGAELYRASGKFELLDRILPKLRATNHRVLLFCQMTSLMTIMEDYFAFRNFLYLRLDGTTKSEDRAALLKKFNEPGSQYFIFLLSTRAGGLGLNLQAADTVVIFDSDWNPHQDLQAQDRAHRIGQQNEVRVLRLCTVNSVEEKILAAAKYKLNVDQKVIQAGMFDQKSSSHERRAFLQAILEHEEENEEEDEVPDDETLNQMIARREEEFDLFMRMDMDRRREDARNPKRKPRLMEEDELPSWIIKDDAEVERLTCEEEEEKIFGRGSRQRRDVDYSDALTEKQWLRAIEDGNLEEMEEEVRLKKRKRRRNVDKDPAKEDVEKAKKRRGRPPAEKLSPNPPKLTKQMNAIIDTVINYKDSSGRQLSEVFIQLPSRKELPEYYELIRKPVDFKKIKERIRNHKYRSLGDLEKDVMLLCHNAQTFNLEGSQIYEDSIVLQSVFKSARQKIAKEEESEDESNEEEEEEDEEESESEAKSVKVKIKLNKKDDKGRDKGKGKKRPNRGKAKPVVSDFDSDEEQDEREQSEGSGTDDE

SEQ ID NO: 85354 - protein, 236 aa, Homo sapiens
  Payload ID: 16965
  Gene Symbol: SMARCA2
  Gene Name: SWI/SNF related, matrix associated, actin dependent regulator of chromatin, subfamily a, member 2
  ENSP ID: ENSP00000371618
MEEEVRLKKRKRRRNVDKDPAKEDVEKAKKRRGRPPAEKLSPNPPKLTKQMNAIIDTVINYKDSSGRQLSEVFIQLPSRKELPEYYELIRKPVDFKKIKERIRNHKYRSLGDLEKDVMLLCHNAQTFNLEGSQIYEDSIVLQSVFKSARQKIAKEEESEDESNEEEEEEDEEESESEAKSVKVKIKLNKKDDKGRDKGKGKKRPNRGKAKPVVSDFDSDEEQDEREQSEGSGTDDE

SEQ ID NO: 85355 - protein, 276 aa, Homo sapiens
  Payload ID: 16965
  Gene Symbol: SMARCA2
  Gene Name: SWI/SNF related, matrix associated, actin dependent regulator of chromatin, subfamily a, member 2
  ENSP ID: ENSP00000371620
MKRLAARCFAGLLILSPLTVISDSRPADSGKAIEDGNLEEMEEEVRLKKRKRRRNVDKDPAKEDVEKAKKRRGRPPAEKLSPNPPKLTKQMNAIIDTVINYKDSSGRQLSEVFIQLPSRKELPEYYELIRKPVDFKKIKERIRNHKYRSLGDLEKDVMLLCHNAQTFNLEGSQIYEDSIVLQSVFKSARQKIAKEEESEDESNEEEEEEDEEESESEAKSVKVKIKLNKKDDKGRDKGKGKKRPNRGKAKPVVSDFDSDEEQDEREQSEGSGTDDE

SEQ ID NO: 85356 - protein, 254 aa, Homo sapiens
  Payload ID: 16965
  Gene Symbol: SMARCA2
  Gene Name: SWI/SNF related, matrix associated, actin dependent regulator of chromatin, subfamily a, member 2
  ENSP ID: ENSP00000371621
MEEEVRLKKRKRRRNVDKDPAKEDVEKAKKRRGRPPAEKLSPNPPKLTKQMNAIIDTVINYKDRCNVEKVPSNSQLEIEGNSSGRQLSEVFIQLPSRKELPEYYELIRKPVDFKKIKERIRNHKYRSLGDLEKDVMLLCHNAQTFNLEGSQIYEDSIVLQSVFKSARQKIAKEEESEDESNEEEEEEDEEESESEAKSVKVKIKLNKKDDKGRDKGKGKKRPNRGKAKPVVSDFDSDEEQDEREQSEGSGTDDE

SEQ ID NO: 85357 - protein, 1572 aa, Homo sapiens; identical to SEQ ID NO: 85353
  Payload ID: 16965
  Gene Symbol: SMARCA2
  Gene Name: SWI/SNF related, matrix associated, actin dependent regulator of chromatin, subfamily a, member 2
  Uniprot ID: P51531
  ENSP ID: ENSP00000371629

SEQ ID NO: 85358 - protein, 1590 aa, Homo sapiens; identical to SEQ ID NO: 85350
  Payload ID: 16965
  Gene Symbol: SMARCA2
  Gene Name: SWI/SNF related, matrix associated, actin dependent regulator of chromatin, subfamily a, member 2
  Uniprot ID: P51531
  ENSP ID: ENSP00000371638

SEQ ID NO: 85359 - protein, 276 aa, Homo sapiens; identical to SEQ ID NO: 85355
  Payload ID: 16965
  Gene Symbol: SMARCA2
  Gene Name: SWI/SNF related, matrix associated, actin dependent regulator of chromatin, subfamily a, member 2
  ENSP ID: ENSP00000387486

SEQ ID NO: 85360 - protein, 1514 aa, Homo sapiens
  Payload ID: 16965
  Gene Symbol: SMARCA2
  Gene Name: SWI/SNF related, matrix associated, actin dependent regulator of chromatin, subfamily a, member 2
  ENSP ID: ENSP00000392081
MSTPTDPGAMPHPGPSPGPGPSPGPILGPSPGPGPSPGSVHSMMGPSPGPPSVSHPMPTMGSTDFPQEGMHQMHKPIDGIHDKGIVEDIHCGSMKGTGMRPPHPGMGPPQSPMDQHSQGYMSPHPSPLGAPEHVSSPMSGGGPTPPQMPPSQPGALIPGDPQAMSQPNRGPSPFSPVQLHQLRAQILAYKMLARGQPLPETLQLAVQGKRTLPGLQQQQQQQQQQQQQQQQQQQQQQQPQQQPPQPQTQQQQQPALVNYNRPSGPGPELSGPSTPQKLPVPAPGGRPSPAPPAAAQPPAAAVPGPSVPQPAPGQPSPVLQLQQKQSRISPIQKPQGLDPVEILQEREYRLQARIAHRIQELENLPGSLPPDLRTKATVELKALRLLNFQRQLRQEVVACMRRDTTLETALNSKAYKRSKRQTLREARMTEKLEKQQKIEQERKRRQKHQEYLNSILQHAKDFKEYHRSVAGKIQKLSKAVATWHANTEREQKKETERIEKERMRRLMAEDEEGYRKLIDQKKDRRLAYLLQQTDEYVANLTNLVWEHKQAQAAKEKKKRRRRKKKAEENAEGGESALGPDGEPIDESSQMSDLPVKVTHTETGKVLFGPEAPKASQLDAWLEMNPGYEVAPRSDSEESDSDYEEEDEEEESSRQETEEKILLDPNSEEVSEKDAKQIIETAKQDVDDEYSMQYSARGSQSYYTVAHAISERVEKQSALLINGTLKHYQLQGLEWMVSLYNNNLNGILADEMGLGKTIQTIALITYLMEHKRLNGPYLIIVPLSTLSNWTYEFDKWAPSVVKISYKGTPAMRRSLVPQLRSGKFNVLLTTYEYIIKDKHILAKIRWKYMIVDEGHRMKNHHCKLTQVDLNEEETILIIRRLHKVLRPFLLRRLKKEVESQLPEKVEYVIKCDMSALQKILYRHMQAKGILLTDGSEKDKKGKGGAKTLMNTIMQLRKICNHPYMFQHIEESFAEHLGYSNGVINGAELYRASGKFELLDRILPKLRATNHRVLLFCQMTSLMTIMEDYFAFRNFLYLRLDGTTKSEDRAALLKKFNEPGSQYFIFLLSTRAGGLGLNLQAADTVVIFDSDWNPHQDLQAQDRAHRIGQQNEVRVLRLCTVNSVEEKILAAAKYKLNVDQKVIQAGMFDQKSSSHERRAFLQAILEHEEENEEEDEVPDDETLNQMIARREEEFDLFMRMDMDRRREDARNPKRKPRLMEEDELPSWIIKDDAEVERLTCEEEEEKIFGRGSRQRRDVDYSDALTEKQWLRAIEDGNLEEMEEEVRLKKRKRRRNVDKDPAKEDVEKAKKRRGRPPAEKLSPNPPKLTKQMNAIIDTVINYKDSSGRQLSEVFIQLPSRKELPEYYELIRKPVDFKKIKERIRNHKYRSLGDLEKDVMLLCHNAQTFNLEGSQIYEDSIVLQSVFKSARQKIAKEEESEDESNEEEEEEDEEESESEAKSVKVKIKLNKKDDKGRDKGKGKKRPNRGKAKPVVSDFDSDEEQDEREQSEGSGTDDE

SEQ ID NO: 85361 - protein, 182 aa, Homo sapiens
  Payload ID: 16965
  Gene Symbol: SMARCA2
  Gene Name: SWI/SNF related, matrix associated, actin dependent regulator of chromatin, subfamily a, member 2
  ENSP ID: ENSP00000401096
MWLAIEDGNLEEMEEEVRLKKRKRRRNVDKDPAKEDVEKAKKRRGRPPAEKLSPNPPKLTKQMNAIIDTVINYKDRCNVEKVPSNSQLEIEGNSSGRQLSEVFIQLPSRKELPEYYELIRKPVDFKKIKERIRNHKYRSLGDLEKDVMLLCHNAQTFNLEGSQIYEDSIVLQSVFKSARQKI

SEQ ID NO: 85362 - protein, 215 aa, Homo sapiens
  Payload ID: 16965
  Gene Symbol: SMARCA2
  Gene Name: SWI/SNF related, matrix associated, actin dependent regulator of chromatin, subfamily a, member 2
  ENSP ID: ENSP00000409398
MSTPTDPGAMPHPGPSPGPGPSPGPILGPSPGPGPSPGSVHSMMGPSPGPPSVSHPMPTMGSTDFPQEGMHQMHKPIDGIHDKGIVEDIHCGSMKGTGMRPPHPGMGPPQSPMDQHSQGYMSPHPSPLGAPEHVSSPMSGGGPTPPQMPPSQPGALIPGDPQAMSQPNRGPSPFSPVQLHQLRAQILAYKMLARGQPLPETLQLAVQGKRTLPGL

SEQ ID NO: 85363 - protein, 192 aa, Homo sapiens
  Payload ID: 16965
  Gene Symbol: SMARCA2
  Gene Name: SWI/SNF related, matrix associated, actin dependent regulator of chromatin, subfamily a, member 2
  ENSP ID: ENSP00000412242
MEEEVRLKKRKRRRNVDKDPAKEDVEKAKKRRGRPPAEKLSPNPPKLTKQMNAIIDTVINYKDSSGRQLSEVFIQLPSRKELPEYYELIRKPVDFKKIKERIRNHKYRSLGDLEKDVMLLCHNAQTFNLEGSQIYEDSIVLQSVFKSARQKIAKEEESEDESNEEEEEEDEEESESEAKSVKVKIKLNKKDD

SEQ ID NO: 85364 - protein, 228 aa, Homo sapiens
  Payload ID: 16965
  Gene Symbol: SMARCA2
  Gene Name: SWI/SNF related, matrix associated, actin dependent regulator of chromatin, subfamily a, member 2
  ENSP ID: ENSP00000413057
MKRLAARCFAGLLILSPLTVISDSRPADSGKAIEDGNLEEMEEEVRLKKRKRRRNVDKDPAKEDVEKAKKRRGRPPAEKLSPNPPKLTKQMNAIIDTVINYKDSSGRQLSEVFIQLPSRKELPEYYELIRKPVDFKKIKERIRNHKYRSLGDLEKDVMLLCHNAQTFNLEGSQIYEDSIVLQSVFKSARQKIAKEEESEDESNEEEEEEDEEESESEAKSVKVKIKLN

SEQ ID NO: 85365 - protein, 193 aa, Homo sapiens
  Payload ID: 16965
  Gene Symbol: SMARCA2
  Gene Name: SWI/SNF related, matrix associated, actin dependent regulator of chromatin, subfamily a, member 2
  ENSP ID: ENSP00000415218
MSTPTDPGAMPHPGPSPGPGPSPGPILGPSPGPGPSPGSVHSMMGPSPGPPSVSHPMPTMGSTDFPQEGMHQMHKPIDGIHDKGIVEDIHCGSMKGTGMRPPHPGMGPPQSPMDQHSQGYMSPHPSPLGAPEHVSSPMSGGGPTPPQMPPSQPGALIPGDPQAMSQPNRGPSPFSPVQLHQLRAQILAYKMLA

SEQ ID NO: 85366 - protein, 228 aa, Homo sapiens
  Payload ID: 16965
  Gene Symbol: SMARCA2
  Gene Name: SWI/SNF related, matrix associated, actin dependent regulator of chromatin, subfamily a, member 2
  ENSP ID: ENSP00000488947
  MOD_RES (1)..(1): Any amino acid
XNSEEVSEKDAKQIIETAKQDVDDEYSMQYSARGSQSYYTVAHAISERVEKQSALLINGTLKHYQLQGLEWMVSLYNNNLNGILADEMGLGKTIQTIALITYLMEHKRLNGPYLIIVPLSTLSNWTYEFDKWAPSVVKISYKGTPAMRRSLVPQLRSGKFNVLLTTYEYIIKDKHILAKVDLNEEETILIIRRLHKVLRPFLLRRLKKEVESQLPEKVEYVIKCDMSA

SEQ ID NO: 85367 - protein, 98 aa, Homo sapiens
  Payload ID: 16965
  Gene Symbol: SMARCA2
  Gene Name: SWI/SNF related, matrix associated, actin dependent regulator of chromatin, subfamily a, member 2
  ENSP ID: ENSP00000489100
MKRLAARCFAGLLILSPLTVISDSRPADSGKCCWLWFKASVCRPSKTAIWRKWKRKYGLRSEKDEEMWIKILQKKMWKKLRREEAALPLRNCHQIPPN

SEQ ID NO: 85368 - protein, 62 aa, Homo sapiens
  Payload ID: 16965
  Gene Symbol: SMARCA2
  Gene Name: SWI/SNF related, matrix associated, actin dependent regulator of chromatin, subfamily a, member 2
  ENSP ID: ENSP00000489142
MKGTGMRPPHPGMGPPQSPMDQHSQGYMSPHPSPLGAPEHVSSPMSGGGPTPPQMPPSQPGA

SEQ ID NO: 85369 - protein, 200 aa, Homo sapiens
  Payload ID: 16965
  Gene Symbol: SMARCA2
  Gene Name: SWI/SNF related, matrix associated, actin dependent regulator of chromatin, subfamily a, member 2
  ENSP ID: ENSP00000489168
MKRLAARCFAGLLILSPLTVISDSRPADSGKAIEDGNLEEMEEEVRLKKRKRRRNVDKDPAKEDVEKAKKRRGRPPAEKLSPNPPKLTKQMNAIIDTVINYKDSSGRQLSEVFIQLPSRKELPEYYELIRKPVDFKKIKERIRNHKYRSLGDLEKDVMLLCHNAQTFNLEGSQIYEDSIVLQSVFKSARQKIAKEEESED

SEQ ID NO: 85370 - protein, 229 aa, Homo sapiens
  Payload ID: 16965
  Gene Symbol: SMARCA2
  Gene Name: SWI/SNF related, matrix associated, actin dependent regulator of chromatin, subfamily a, member 2
  ENSP ID: ENSP00000489204
MKRLAARCFAGLLILSPLTVISDSRPADSGKAIEDGNLEEMEEEVRLKKRKRRRNVDKDPAKEDVEKAKKRRGRPPAEKLSPNPPKLTKQMNAIIDTVINYKDSSGRQLSEVFIQLPSRKELPEYYELIRKPVDFKKIKERIRNHKYRSLGDLEKDVMLLCHNAQTFNLEGSQIYEDSIVLQSVFKSARQKIAKEEESEDESNEEEEEEDEEESESEAKSVKVKIKLNK

SEQ ID NO: 85371 - protein, 245 aa, Homo sapiens
  Payload ID: 16965
  Gene Symbol: SMARCA2
  Gene Name: SWI/SNF related, matrix associated, actin dependent regulator of chromatin, subfamily a, member 2
  ENSP ID: ENSP00000489212
MKRLAARCFAGLLILSPLTVISDSRPADSGKAIEDGNLEEMEEEVRLKKRKRRRNVDKDPAKEDVEKAKKRRGRPPAEKLSPNPPKLTKQMNAIIDTVINYKDRCNVEKVPSNSQLEIEGNSSGRQLSEVFIQLPSRKELPEYYELIRKPVDFKKIKERIRNHKYRSLGDLEKDVMLLCHNAQTFNLEGSQIYEDSIVLQSVFKSARQKIAKEEESEDESNEEEEEEDEEESESEAKSVKVKIKL

SEQ ID NO: 85372 - protein, 1428 aa, Homo sapiens
  Payload ID: 16965
  Gene Symbol: SMARCA2
  Gene Name: SWI/SNF related, matrix associated, actin dependent regulator of chromatin, subfamily a, member 2
  ENSP ID: ENSP00000489256
MSTPTDPGAMPHPGPSPGPGPSPGPILGPSPGPGPSPGSVHSMMGPSPGPPSVSHPMPTMGSTDFPQEGMHQMHKPIDGIHDKGIVEDIHCGSMKGTGMRPPHPGMGPPQSPMDQHSQGYMSPHPSPLGAPEHVSSPMSGGGPTPPQMPPSQPGALIPGDPQAMSQPNRGPSPFSPVQLHQLRAQILAYKMLARGQPLPETLQLAVQGKRTLPGLQQQQQQQQQQQQQQQQQQQQQQQPQQQPPQPQTQQQQQPALVNYNRPSGPGPELSGPSTPQKLPVPAPGGRPSPAPPAAAQPPAAAVPGPSVPQPAPGQPSPVLQLQQKQSRISPIQKPQGLDPVEILQEREYRLQARIAHRIQELENLPGSLPPDLRTKATVELKALRLLNFQRQLRQEVVACMRRDTTLETALNSKAYKRSKRQTLREARMTEKLEKQQKIEQERKRRQKHQEYLNSILQHAKDFKEYHRSVAGKIQKLSKAVATWHANTEREQKKETERIEKERMRRLMAEDEEGYRKLIDQKKDRRLAYLLQQTDEYVANLTNLVWEHKQAQAAKEKKKRRRRKKKAEENAEGGESALGPDGEPIDESSQMSDLPVKVTHTETGKVLFGPEAPKASQLDAWLEMNPGYEVAPRSDSEESDSDYEEEDEEEESSRQETEEKILLDPNSEEVSEKDAKQIIETAKQDVDDEYSMQYSARGSQSYYTVAHAISERVEKQSALLINGTLKHYQLQGLEWMVSLYNNNLNGILADEMGLGKTIQTIALITYLMEHKRLNGPYLIIVPLSTLSNWTYEFDKWAPSVVKISYKGTPAMRRSLVPQLRSGKFNVLLTTYEYIIKDKHILAKIRWKYMIVDEGHRMKNHHCKLTQVLNTHYVAPRRILLTGTPLQNKLPELWALLNFLLPTIFKSCSTFEQWFNAPFAMTGERVDLNEEETILIIRRLHKVLRPFLLRRLKKEVESQLPEKVEYVIKCDMSALQKILYRHMQAKGILLTDGSEKDKKGKGGAKTLMNTIMQLRKICNHPYMFQHIEESFAEHLGYSNGVINGAELYRASGKFELLDRILPKLRATNHRVLLFCQMTSLMTIMEDYFAFRNFLYLRLDGTTKSEDRAALLKKFNEPGSQYFIFLLSTRAGGLGLNLQAADTVVIFDSDWNPHQDLQAQDRAHRIGQQNEVRVLRLCTVNSVEEKILAAAKYKLNVDQKVIQAGMFDQKSSSHERRAFLQAILEHEEENEEEDEVPDDETLNQMIARREEEFDLFMRMDMDRRREDARNPKRKPRLMEEDELPSWIIKDDAEVERLTCEEEEEKIFGRGSRQRRDVDYSDALTEKQWLRAIEDGNLEEMEEEVRLKKRKRRRNVDKDPAKEDVEKAKKRRGRPPAEKLSPNPPKLTKQMNAIIDTVINYKDRCNVEKVPSNSQLEIEGNRKGFVIISTGA

SEQ ID NO: 85373 - protein, 202 aa, Homo sapiens
  Payload ID: 16965
  Gene Symbol: SMARCA2
  Gene Name: SWI/SNF related, matrix associated, actin dependent regulator of chromatin, subfamily a, member 2
  ENSP ID: ENSP00000489271
MEEEVRLKKRKRRRNVDKDPAKEDVEKAKKRRGRPPAEKLSPNPPKLTKQMNAIIDTVINYKDSSGRQLSEVFIQLPSRKELPEYYELIRKPVDFKKIKERIRNHKYRSLGDLEKDVMLLCHNAQTFNLEGSQIYEDSIVLQSVFKSARQKIAKEEESEDESNEEEEEEDEEESESEAKSVKVKIKLNKKDDKGRDKGKGKK

SEQ ID NO: 85374 - protein, 260 aa, Homo sapiens
  Payload ID: 16965
  Gene Symbol: SMARCA2
  Gene Name: SWI/SNF related, matrix associated, actin dependent regulator of chromatin, subfamily a, member 2
  ENSP ID: ENSP00000489302
MIINISHVWCCGEMKAIEDGNLEEMEEEVRLKKRKRRRNVDKDPAKEDVEKAKKRRGRPPAEKLSPNPPKLTKQMNAIIDTVINYKDSSGRQLSEVFIQLPSRKELPEYYELIRKPVDFKKIKERIRNHKYRSLGDLEKDVMLLCHNAQTFNLEGSQIYEDSIVLQSVFKSARQKIAKEEESEDESNEEEEEEDEEESESEAKSVKVKIKLNKKDDKGRDKGKGKKRPNRGKAKPVVSDFDSDEEQDEREQSEGSGTDDE

SEQ ID NO: 85375 - protein, 58 aa, Homo sapiens
  Payload ID: 16965
  Gene Symbol: SMARCA2
  Gene Name: SWI/SNF related, matrix associated, actin dependent regulator of chromatin, subfamily a, member 2
  ENSP ID: ENSP00000489334
  MOD_RES (1)..(1): Any amino acid
XPFPSSLFFPDQLMKRLAARCFAGLLILSPLTVISDSRPADSGHRRRQFGGNGRGSTA

SEQ ID NO: 85376 - protein, 244 aa, Homo sapiens
  Payload ID: 16965
  Gene Symbol: SMARCA2
  Gene Name: SWI/SNF related, matrix associated, actin dependent regulator of chromatin, subfamily a, member 2
  ENSP ID: ENSP00000489388
MKRLAARCFAGLLILSPLTVISDSRPADSGKAIEDGNLEEMEEEVRLKKRKRRRNVDKDPAKEDVEKAKKRRGRPPAEKLSPNPPKLTKQMNAIIDTVINYKDRCNVEKVPSNSQLEIEGNSSGRQLSEVFIQLPSRKELPEYYELIRKPVDFKKIKERIRNHKYRSLGDLEKDVMLLCHNAQTFNLEGSQIYEDSIVLQSVFKSARQKIAKEEESEDESNEEEEEEDEEESESEAKSVKVKIK

SEQ ID NO: 85377 - protein, 254 aa, Homo sapiens; identical to SEQ ID NO: 85356
  Payload ID: 16965
  Gene Symbol: SMARCA2
  Gene Name: SWI/SNF related, matrix associated, actin dependent regulator of chromatin, subfamily a, member 2
  ENSP ID: ENSP00000489433

SEQ ID NO: 85378 - protein, 149 aa, Homo sapiens
  Payload ID: 16965
  Gene Symbol: SMARCA2
  Gene Name: SWI/SNF related, matrix associated, actin dependent regulator of chromatin, subfamily a, member 2
  ENSP ID: ENSP00000489473
MEEEVRLKKRKRRRNVDKDPAKEDVEKAKKRRGRPPAEKLSPNPPKLTKQMNAIIDTVINYKDSSGRQLSEVFIQLPSRKELPEYYELIRKPVDFKKIKERIRNHKYRSLGDLEKDVMLLCHNAQTFNLEGSQIYEDSIVLQSVFKSAR

SEQ ID NO: 85379 - protein, 38 aa, Homo sapiens
  Payload ID: 16965
  Gene Symbol: SMARCA2
  Gene Name: SWI/SNF related, matrix associated, actin dependent regulator of chromatin, subfamily a, member 2
  ENSP ID: ENSP00000489501
  MOD_RES (1)..(1): Any amino acid
XSGRQLSEVFIQLPSRKELPEYYELIRKPVDFKKIKDS

SEQ ID NO: 85380 - protein, 169 aa, Homo sapiens
  Payload ID: 16965
  Gene Symbol: SMARCA2
  Gene Name: SWI/SNF related, matrix associated, actin dependent regulator of chromatin, subfamily a, member 2
  ENSP ID: ENSP00000489504
MEEEVRLKKRKRRRNVDKDPAKEDVEKAKKRRGRPPAEKLSPNPPKLTKQMNAIIDTVINYKDSSGRQLSEVFIQLPSRKELPEYYELIRKPVDFKKIKERIRNHKYRSLGDLEKDVMLLCHNAQTFNLEGSQIYEDSIVLQSVFKSARQKIAKEEESEDESNEEEEEE

SEQ ID NO: 85381 - protein, 270 aa, Homo sapiens
  Payload ID: 16965
  Gene Symbol: SMARCA2
  Gene Name: SWI/SNF related, matrix associated, actin dependent regulator of chromatin, subfamily a, member 2
  ENSP ID: ENSP00000489518
  MOD_RES (1)..(1): Any amino acid
XLNLQAADTVVIFDSDWNPHQEEDEVPDDETLNQMIARREEEFDLFMRMDMDRRREDARNPKRKPRLMEEDELPSWIIKDDAEVERLTCEEEEEKIFGRGSRQRRDVDYSDALTEKQWLRAIEDGNLEEMEEEVRLKKRKRRRNVDKDPAKEDVEKAKKRRGRPPAEKLSPNPPKLTKQMNAIIDTVINYKDSSGRQLSEVFIQLPSRKELPEYYELIRKPVDFKKIKERIRNHKYRSLGDLEKDVMLLCHNAQTFNLEGSQIYEDSIVL

SEQ ID NO: 85382 - protein, 68 aa, Homo sapiens
  Payload ID: 16965
  Gene Symbol: SMARCA2
  Gene Name: SWI/SNF related, matrix associated, actin dependent regulator of chromatin, subfamily a, member 2
  ENSP ID: ENSP00000489555
MAIEDGNLEEMEEEVRLKKRKRRRNVDKDPAKEDVEKAKKRRGRPPAEKLSPNPPKLTKQMNAIIDTV

SEQ ID NO: 85383 - protein, 57 aa, Homo sapiens
  Payload ID: 16965
  Gene Symbol: SMARCA2
  Gene Name: SWI/SNF related, matrix associated, actin dependent regulator of chromatin, subfamily a, member 2
  ENSP ID: ENSP00000489560
AAAQPPAAAVPGPSVPQPAPGQPSPVLQLQQKQSRISPIQKPQGLDPVEILQEREYR

SEQ ID NO: 85384 - protein, 98 aa, Homo sapiens; identical to SEQ ID NO: 85367
  Payload ID: 16965
  Gene Symbol: SMARCA2
  Gene Name: SWI/SNF related, matrix associated, actin dependent regulator of chromatin, subfamily a, member 2
  ENSP ID: ENSP00000489587

SEQ ID NO: 85385 - protein, 231 aa, Homo sapiens
  Payload ID: 16965
  Gene Symbol: SMARCA2
  Gene Name: SWI/SNF related, matrix associated, actin dependent regulator of chromatin, subfamily a, member 2
  ENSP ID: ENSP00000489615
MKTQPFPSSLFFPDQLMKRLAARCFAGLLILSPLTVISDSRPADSGKAIEDGNLEEMEEEVRLKKRKRRRNVDKDPAKEDVEKAKKRRGRPPAEKLSPNPPKLTKQMNAIIDTVINYKDSSGRQLSEVFIQLPSRKELPEYYELIRKPVDFKKIKERIRNHKYRSLGDLEKDVMLLCHNAQTFNLEGSQIYEDSIVLQSVFKSARQKIAKEEESEDESNEEEEEEDEEESE

SEQ ID NO: 85386 - protein, 1647 aa, Homo sapiens
  Payload ID: 16966
  Gene Symbol: SMARCA4
  Gene Name: SWI/SNF related, matrix associated, actin dependent regulator of chromatin, subfamily a, member 4
  Uniprot ID: P51532
  ENSP ID: ENSP00000343896
MSTPDPPLGGTPRPGPSPGPGPSPGAMLGPSPGPSPGSAHSMMGPSPGPPSAGHPIPTQGPGGYPQDNMHQMHKPMESMHEKGMSDDPRYNQMKGMGMRSGGHAGMGPPPSPMDQHSQGYPSPLGGSEHASSPVPASGPSSGPQMSSGPGGAPLDGADPQALGQQNRGPTPFNQNQLHQLRAQIMAYKMLARGQPLPDHLQMAVQGKRPMPGMQQQMPTLPPPSVSATGPGPGPGPGPGPGPGPAPPNYSRPHGMGGPNMPPPGPSGVPPGMPGQPPGGPPKPWPEGPMANAAAPTSTPQKLIPPQPTGRPSPAPPAVPPAASPVMPPQTQSPGQPAQPAPMVPLHQKQSRITPIQKPRGLDPVEILQEREYRLQARIAHRIQELENLPGSLAGDLRTKATIELKALRLLNFQRQLRQEVVVCMRRDTALETALNAKAYKRSKRQSLREARITEKLEKQQKIEQERKRRQKHQEYLNSILQHAKDFKEYHRSVTGKIQKLTKAVATYHANTEREQKKENERIEKERMRRLMAEDEEGYRKLIDQKKDKRLAYLLQQTDEYVANLTELVRQHKAAQVAKEKKKKKKKKKAENAEGQTPAIGPDGEPLDETSQMSDLPVKVIHVESGKILTGTDAPKAGQLEAWLEMNPGYEVAPRSDSEESGSEEEEEEEEEEQPQAAQPPTLPVEEKKKIPDPDSDDVSEVDARHIIENAKQDVDDEYGVSQALARGLQSYYAVAHAVTERVDKQSALMVNGVLKQYQIKGLEWLVSLYNNNLNGILADEMGLGKTIQTIALITYLMEHKRINGPFLIIVPLSTLSNWAYEFDKWAPSVVKVSYKGSPAARRAFVPQLRSGKFNVLLTTYEYIIKDKHILAKIRWKYMIVDEGHRMKNHHCKLTQVLNTHYVAPRRLLLTGTPLQNKLPELWALLNFLLPTIFKSCSTFEQWFNAPFAMTGEKVDLNEEETILIIRRLHKVLRPFLLRRLKKEVEAQLPEKVEYVIKCDMSALQRVLYRHMQAKGVLLTDGSEKDKKGKGGTKTLMNTIMQLRKICNHPYMFQHIEESFSEHLGFTGGIVQGLDLYRASGKFELLDRILPKLRATNHKVLLFCQMTSLMTIMEDYFAYRGFKYLRLDGTTKAEDRGMLLKTFNEPGSEYFIFLLSTRAGGLGLNLQSADTVIIFDSDWNPHQDLQAQDRAHRIGQQNEVRVLRLCTVNSVEEKILAAAKYKLNVDQKVIQAGMFDQKSSSHERRAFLQAILEHEEQDESRHCSTGSGSASFAHTAPPPAGVNPDLEEPPLKEEDEVPDDETVNQMIARHEEEFDLFMRMDLDRRREEARNPKRKPRLMEEDELPSWIIKDDAEVERLTCEEEEEKMFGRGSRHRKEVDYSDSLTEKQWLKAIEEGTLEEIEEEVRQKKSSRKRKRDSDAGSSTPTTSTRSRDKDDESKKQKKRGRPPAEKLSPNPPNLTKKMKKIVDAVIKYKDSSSGRQLSEVFIQLPSRKELPEYYELIRKPVDFKKIKERIRNHKYRSLNDLEKDVMLLCQNAQTFNLEGSLIYEDSIVLQSVFTSVRQKIEKEDDSEGEESEEEEEGEEEGSESESRSVKVKIKLGRKEKAQDRLKGGRRRPSRGSRAKPVVSDDDSEEEQEEDRSGSGSEED

SEQ ID NO: 85387 - protein, 1613 aa, Homo sapiens
  Payload ID: 16966
  Gene Symbol: SMARCA4
  Gene Name: SWI/SNF related, matrix associated, actin dependent regulator of chromatin, subfamily a, member 4
  Uniprot ID: P51532
  ENSP ID: ENSP00000392837
MSTPDPPLGGTPRPGPSPGPGPSPGAMLGPSPGPSPGSAHSMMGPSPGPPSAGHPIPTQGPGGYPQDNMHQMHKPMESMHEKGMSDDPRYNQMKGMGMRSGGHAGMGPPPSPMDQHSQGYPSPLGGSEHASSPVPASGPSSGPQMSSGPGGAPLDGADPQALGQQNRGPTPFNQNQLHQLRAQIMAYKMLARGQPLPDHLQMAVQGKRPMPGMQQQMPTLPPPSVSATGPGPGPGPGPGPGPGPAPPNYSRPHGMGGPNMPPPGPSGVPPGMPGQPPGGPPKPWPEGPMANAAAPTSTPQKLIPPQPTGRPSPAPPAVPPAASPVMPPQTQSPGQPAQPAPMVPLHQKQSRITPIQKPRGLDPVEILQEREYRLQARIAHRIQELENLPGSLAGDLRTKATIELKALRLLNFQRQLRQEVVVCMRRDTALETALNAKAYKRSKRQSLREARITEKLEKQQKIEQERKRRQKHQEYLNSILQHAKDFKEYHRSVTGKIQKLTKAVATYHANTEREQKKENERIEKERMRRLMAEDEEGYRKLIDQKKDKRLAYLLQQTDEYVANLTELVRQHKAAQVAKEKKKKKKKKKAENAEGQTPAIGPDGEPLDETSQMSDLPVKVIHVESGKILTGTDAPKAGQLEAWLEMNPGYEVAPRSDSEESGSEEEEEEEEEEQPQAAQPPTLPVEEKKKIPDPDSDDVSEVDARHIIENAKQDVDDEYGVSQALARGLQSYYAVAHAVTERVDKQSALMVNGVLKQYQIKGLEWLVSLYNNNLNGILADEMGLGKTIQTIALITYLMEHKRINGPFLIIVPLSTLSNWAYEFDKWAPSVVKVSYKGSPAARRAFVPQLRSGKFNVLLTTYEYIIKDKHILAKIRWKYMIVDEGHRMKNHHCKLTQVLNTHYVAPRRLLLTGTPLQNKLPELWALLNFLLPTIFKSCSTFEQWFNAPFAMTGEKVDLNEEETILIIRRLHKVLRPFLLRRLKKEVEAQLPEKVEYVIKCDMSALQRVLYRHMQAKGVLLTDGSEKDKKGKGGTKTLMNTIMQLRKICNHPYMFQHIEESFSEHLGFTGGIVQGLDLYRASGKFELLDRILPKLRATNHKVLLFCQMTSLMTIMEDYFAYRGFKYLRLDGTTKAEDRGMLLKTFNEPGSEYFIFLLSTRAGGLGLNLQSADTVIIFDSDWNPHQDLQAQDRAHRIGQQNEVRVLRLCTVNSVEEKILAAAKYKLNVDQKVIQAGMFDQKSSSHERRAFLQAILEHEEQDEEEDEVPDDETVNQMIARHEEEFDLFMRMDLDRRREEARNPKRKPRLMEEDELPSWIIKDDAEVERLTCEEEEEKMFGRGSRHRKEVDYSDSLTEKQWLKAIEEGTLEEIEEEVRQKKSSRKRKRDSDAGSSTPTTSTRSRDKDDESKKQKKRGRPPAEKLSPNPPNLTKKMKKIVDAVIKYKDSSGRQLSEVFIQLPSRKELPEYYELIRKPVDFKKIKERIRNHKYRSLNDLEKDVMLLCQNAQTFNLEGSLIYEDSIVLQSVFTSVRQKIEKEDDSEGEESEEEEEGEEEGSESESRSVKVKIKLGRKEKAQDRLKGGRRRPSRGSRAKPVVSDDDSEEEQEEDRSGSGSEED

SEQ ID NO: 85388 - protein, 1647 aa, Homo sapiens; identical to SEQ ID NO: 85386
  Payload ID: 16966
  Gene Symbol: SMARCA4
  Gene Name: SWI/SNF related, matrix associated, actin dependent regulator of chromatin, subfamily a, member 4
  Uniprot ID: P51532
  ENSP ID: ENSP00000395654

SEQ ID NO: 85389 - protein, 1679 aa, Homo sapiens
  Payload ID: 16966
  Gene Symbol: SMARCA4
  Gene Name: SWI/SNF related, matrix associated, actin dependent regulator of chromatin, subfamily a, member 4
  ENSP ID: ENSP00000397783
MSTPDPPLGGTPRPGPSPGPGPSPGAMLGPSPGPSPGSAHSMMGPSPGPPSAGHPIPTQGPGGYPQDNMHQMHKPMESMHEKGMSDDPRYNQMKGMGMRSGGHAGMGPPPSPMDQHSQGYPSPLGGSEHASSPVPASGPSSGPQMSSGPGGAPLDGADPQALGQQNRGPTPFNQNQLHQLRAQIMAYKMLARGQPLPDHLQMAVQGKRPMPGMQQQMPTLPPPSVSATGPGPGPGPGPGPGPGPAPPNYSRPHGMGGPNMPPPGPSGVPPGMPGQPPGGPPKPWPEGPMANAAAPTSTPQKLIPPQPTGRPSPAPPAVPPAASPVMPPQTQSPGQPAQPAPMVPLHQKQSRITPIQKPRGLDPVEILQEREYRLQARIAHRIQELENLPGSLAGDLRTKATIELKALRLLNFQRQLRQEVVVCMRRDTALETALNAKAYKRSKRQSLREARITEKLEKQQKIEQERKRRQKHQEYLNSILQHAKDFKEYHRSVTGKIQKLTKAVATYHANTEREQKKENERIEKERMRRLMAEDEEGYRKLIDQKKDKRLAYLLQQTDEYVANLTELVRQHKAAQVAKEKKKKKKKKKAENAEGQTPAIGPDGEPLDETSQMSDLPVKVIHVESGKILTGTDAPKAGQLEAWLEMNPGYEVAPRSDSEESGSEEEEEEEEEEQPQAAQPPTLPVEEKKKIPDPDSDDVSEVDARHIIENAKQDVDDEYGVSQALARGLQSYYAVAHAVTERVDKQSALMVNGVLKQYQIKGLEWLVSLYNNNLNGILADEMGLGKTIQTIALITYLMEHKRINGPFLIIVPLSTLSNWAYEFDKWAPSVVKVSYKGSPAARRAFVPQLRSGKFNVLLTTYEYIIKDKHILAKIRWKYMIVDEGHRMKNHHCKLTQVLNTHYVAPRRLLLTGTPLQNKLPELWALLNFLLPTIFKSCSTFEQWFNAPFAMTGEKVDLNEEETILIIRRLHKVLRPFLLRRLKKEVEAQLPEKVEYVIKCDMSALQRVLYRHMQAKGVLLTDGSEKDKKGKGGTKTLMNTIMQLRKICNHPYMFQHIEESFSEHLGFTGGIVQGLDLYRASGKFELLDRILPKLRATNHKVLLFCQMTSLMTIMEDYFAYRGFKYLRLDGTTKAEDRGMLLKTFNEPGSEYFIFLLSTRAGGLGLNLQSADTVIIFDSDWNPHQDLQAQDRAHRIGQQNEVRVLRLCTVNSVEEKILAAAKYKLNVDQKVIQAGMFDQKSSSHERRAFLQAILEHEEQDESRHCSTGSGSASFAHTAPPPAGVNPDLEEPPLKEEDEVPDDETVNQMIARHEEEFDLFMRMDLDRRREEARNPKRKPRLMEEDELPSWIIKDDAEVERLTCEEEEEKMFGRGSRHRKEVDYSDSLTEKQWLKKITGKDIHDTASSVARGLQFQRGLQFCTRASKAIEEGTLEEIEEEVRQKKSSRKRKRDSDAGSSTPTTSTRSRDKDDESKKQKKRGRPPAEKLSPNPPNLTKKMKKIVDAVIKYKDSSSGRQLSEVFIQLPSRKELPEYYELIRKPVDFKKIKERIRNHKYRSLNDLEKDVMLLCQNAQTFNLEGSLIYEDSIVLQSVFTSVRQKIEKEDDSEGEESEEEEEGEEEGSESESRSVKVKIKLGRKEKAQDRLKGGRRRPSRGSRAKPVVSDDDSEEEQEEDRSGSGSEED

SEQ ID NO: 85390 - protein, 1681 aa, Homo sapiens [sequence omitted]

SEQ ID NO: 85391 - protein, 1617 aa, Homo sapiens
  Payload ID: 16966
  Gene Symbol: SMARCA4
  Gene Name: SWI/SNF related, matrix associated, actin dependent regulator of chromatin, subfamily a, member 4
  Uniprot ID: P51532
  ENSP ID: ENSP00000445036
MSTPDPPLGGTPRPGPSPGPGPSPGAMLGPSPGPSPGSAHSMMGPSPGPPSAGHPIPTQGPGGYPQDNMHQMHKPMESMHEKGMSDDPRYNQMKGMGMRSGGHAGMGPPPSPMDQHSQGYPSPLGGSEHASSPVPASGPSSGPQMSSGPGGAPLDGADPQALGQQNRGPTPFNQNQLHQLRAQIMAYKMLARGQPLPDHLQMAVQGKRPMPGMQQQMPTLPPPSVSATGPGPGPGPGPGPGPGPAPPNYSRPHGMGGPNMPPPGPSGVPPGMPGQPPGGPPKPWPEGPMANAAAPTSTPQKLIPPQPTGRPSPAPPAVPPAASPVMPPQTQSPGQPAQPAPMVPLHQKQSRITPIQKPRGLDPVEILQEREYRLQARIAHRIQELENLPGSLAGDLRTKATIELKALRLLNFQRQLRQEVVVCMRRDTALETALNAKAYKRSKRQSLREARITEKLEKQQKIEQERKRRQKHQEYLNSILQHAKDFKEYHRSVTGKIQKLTKAVATYHANTEREQKKENERIEKERMRRLMAEDEEGYRKLIDQKKDKRLAYLLQQTDEYVANLTELVRQHKAAQVAKEKKKKKKKKKAENAEGQTPAIGPDGEPLDETSQMSDLPVKVIHVESGKILTGTDAPKAGQLEAWLEMNPGYEVAPRSDSEESGSEEEEEEEEEEQPQAAQPPTLPVEEKKKIPDPDSDDVSEVDARHIIENAKQDVDDEYGVSQALARGLQSYYAVAHAVTERVDKQSALMVNGVLKQYQIKGLEWLVSLYNNNLNGILADEMGLGKTIQTIALITYLMEHKRINGPFLIIVPLSTLSNWAYEFDKWAPSVVKVSYKGSPAARRAFVPQLRSGKFNVLLTTYEYIIKDKHILAKIRWKYMIVDEGHRMKNHHCKLTQVLNTHYVAPRRLLLTGTPLQNKLPELWALLNFLLPTIFKSCSTFEQWFNAPFAMTGEKVDLNEEETILIIRRLHKVLRPFLLRRLKKEVEAQLPEKVEYVIKCDMSALQRVLYRHMQAKGVLLTDGSEKDKKGKGGTKTLMNTIMQLRKICNHPYMFQHIEESFSEHLGFTGGIVQGLDLYRASGKFELLDRILPKLRATNHKVLLFCQMTSLMTIMEDYFAYRGFKYLRLDGTTKAEDRGMLLKTFNEPGSEYFIFLLSTRAGGLGLNLQSADTVIIFDSDWNPHQDLQAQDRAHRIGQQNEVRVLRLCTVNSVEEKILAAAKYKLNVDQKVIQAGMFDQKSSSHERRAFLQAILEHEEQDEEEDEVPDDETVNQMIARHEEEFDLFMRMDLDRRREEARNPKRKPRLMEEDELPSWIIKDDAEVERLTCEEEEEKMFGRGSRHRKEVDYSDSLTEKQWLKTLKAIEEGTLEEIEEEVRQKKSSRKRKRDSDAGSSTPTTSTRSRDKDDESKKQKKRGRPPAEKLSPNPPNLTKKMKKIVDAVIKYKDSSSGRQLSEVFIQLPSRKELPEYYELIRKPVDFKKIKERIRNHKYRSLNDLEKDVMLLCQNAQTFNLEGSLIYEDSIVLQSVFTSVRQKIEKEDDSEGEESEEEEEGEEEGSESESRSVKVKIKLGRKEKAQDRLKGGRRRPSRGSRAKPVVSDDDSEEEQEEDRSGSGSEED

SEQ ID NO: 85392 - protein, 1616 aa, Homo sapiens
  Payload ID: 16966
  Gene Symbol: SMARCA4
  Gene Name: SWI/SNF related, matrix associated, actin dependent regulator of chromatin, subfamily a, member 4
  Uniprot ID: P51532
  ENSP ID: ENSP00000464778
MSTPDPPLGGTPRPGPSPGPGPSPGAMLGPSPGPSPGSAHSMMGPSPGPPSAGHPIPTQGPGGYPQDNMHQMHKPMESMHEKGMSDDPRYNQMKGMGMRSGGHAGMGPPPSPMDQHSQGYPSPLGGSEHASSPVPASGPSSGPQMSSGPGGAPLDGADPQALGQQNRGPTPFNQNQLHQLRAQIMAYKMLARGQPLPDHLQMAVQGKRPMPGMQQQMPTLPPPSVSATGPGPGPGPGPGPGPGPAPPNYSRPHGMGGPNMPPPGPSGVPPGMPGQPPGGPPKPWPEGPMANAAAPTSTPQKLIPPQPTGRPSPAPPAVPPAASPVMPPQTQSPGQPAQPAPMVPLHQKQSRITPIQKPRGLDPVEILQEREYRLQARIAHRIQELENLPGSLAGDLRTKATIELKALRLLNFQRQLRQEVVVCMRRDTALETALNAKAYKRSKRQSLREARITEKLEKQQKIEQERKRRQKHQEYLNSILQHAKDFKEYHRSVTGKIQKLTKAVATYHANTEREQKKENERIEKERMRRLMAEDEEGYRKLIDQKKDKRLAYLLQQTDEYVANLTELVRQHKAAQVAKEKKKKKKKKKAENAEGQTPAIGPDGEPLDETSQMSDLPVKVIHVESGKILTGTDAPKAGQLEAWLEMNPGYEVAPRSDSEESGSEEEEEEEEEEQPQAAQPPTLPVEEKKKIPDPDSDDVSEVDARHIIENAKQDVDDEYGVSQALARGLQSYYAVAHAVTERVDKQSALMVNGVLKQYQIKGLEWLVSLYNNNLNGILADEMGLGKTIQTIALITYLMEHKRINGPFLIIVPLSTLSNWAYEFDKWAPSVVKVSYKGSPAARRAFVPQLRSGKFNVLLTTYEYIIKDKHILAKIRWKYMIVDEGHRMKNHHCKLTQVLNTHYVAPRRLLLTGTPLQNKLPELWALLNFLLPTIFKSCSTFEQWFNAPFAMTGEKVDLNEEETILIIRRLHKVLRPFLLRRLKKEVEAQLPEKVEYVIKCDMSALQRVLYRHMQAKGVLLTDGSEKDKKGKGGTKTLMNTIMQLRKICNHPYMFQHIEESFSEHLGFTGGIVQGLDLYRASGKFELLDRILPKLRATNHKVLLFCQMTSLMTIMEDYFAYRGFKYLRLDGTTKAEDRGMLLKTFNEPGSEYFIFLLSTRAGGLGLNLQSADTVIIFDSDWNPHQDLQAQDRAHRIGQQNEVRVLRLCTVNSVEEKILAAAKYKLNVDQKVIQAGMFDQKSSSHERRAFLQAILEHEEQDEEEDEVPDDETVNQMIARHEEEFDLFMRMDLDRRREEARNPKRKPRLMEEDELPSWIIKDDAEVERLTCEEEEEKMFGRGSRHRKEVDYSDSLTEKQWLKTLKAIEEGTLEEIEEEVRQKKSSRKRKRDSDAGSSTPTTSTRSRDKDDESKKQKKRGRPPAEKLSPNPPNLTKKMKKIVDAVIKYKDSSGRQLSEVFIQLPSRKELPEYYELIRKPVDFKKIKERIRNHKYRSLNDLEKDVMLLCQNAQTFNLEGSLIYEDSIVLQSVFTSVRQKIEKEDDSEGEESEEEEEGEEEGSESESRSVKVKIKLGRKEKAQDRLKGGRRRPSRGSRAKPVVSDDDSEEEQEEDRSGSGSEED

SEQ ID NO: 85393 - protein, 1614 aa, Homo sapiens
  Payload ID: 16966
  Gene Symbol: SMARCA4
  Gene Name: SWI/SNF related, matrix associated, actin dependent regulator of chromatin, subfamily a, member 4
  Uniprot ID: P51532
  ENSP ID: ENSP00000466963
MSTPDPPLGGTPRPGPSPGPGPSPGAMLGPSPGPSPGSAHSMMGPSPGPPSAGHPIPTQGPGGYPQDNMHQMHKPMESMHEKGMSDDPRYNQMKGMGMRSGGHAGMGPPPSPMDQHSQGYPSPLGGSEHASSPVPASGPSSGPQMSSGPGGAPLDGADPQALGQQNRGPTPFNQNQLHQLRAQIMAYKMLARGQPLPDHLQMAVQGKRPMPGMQQQMPTLPPPSVSATGPGPGPGPGPGPGPGPAPPNYSRPHGMGGPNMPPPGPSGVPPGMPGQPPGGPPKPWPEGPMANAAAPTSTPQKLIPPQPTGRPSPAPPAVPPAASPVMPPQTQSPGQPAQPAPMVPLHQKQSRITPIQKPRGLDPVEILQEREYRLQARIAHRIQELENLPGSLAGDLRTKATIELKALRLLNFQRQLRQEVVVCMRRDTALETALNAKAYKRSKRQSLREARITEKLEKQQKIEQERKRRQKHQEYLNSILQHAKDFKEYHRSVTGKIQKLTKAVATYHANTEREQKKENERIEKERMRRLMAEDEEGYRKLIDQKKDKRLAYLLQQTDEYVANLTELVRQHKAAQVAKEKKKKKKKKKAENAEGQTPAIGPDGEPLDETSQMSDLPVKVIHVESGKILTGTDAPKAGQLEAWLEMNPGYEVAPRSDSEESGSEEEEEEEEEEQPQAAQPPTLPVEEKKKIPDPDSDDVSEVDARHIIENAKQDVDDEYGVSQALARGLQSYYAVAHAVTERVDKQSALMVNGVLKQYQIKGLEWLVSLYNNNLNGILADEMGLGKTIQTIALITYLMEHKRINGPFLIIVPLSTLSNWAYEFDKWAPSVVKVSYKGSPAARRAFVPQLRSGKFNVLLTTYEYIIKDKHILAKIRWKYMIVDEGHRMKNHHCKLTQVLNTHYVAPRRLLLTGTPLQNKLPELWALLNFLLPTIFKSCSTFEQWFNAPFAMTGEKVDLNEEETILIIRRLHKVLRPFLLRRLKKEVEAQLPEKVEYVIKCDMSALQRVLYRHMQAKGVLLTDGSEKDKKGKGGTKTLMNTIMQLRKICNHPYMFQHIEESFSEHLGFTGGIVQGLDLYRASGKFELLDRILPKLRATNHKVLLFCQMTSLMTIMEDYFAYRGFKYLRLDGTTKAEDRGMLLKTFNEPGSEYFIFLLSTRAGGLGLNLQSADTVIIFDSDWNPHQDLQAQDRAHRIGQQNEVRVLRLCTVNSVEEKILAAAKYKLNVDQKVIQAGMFDQKSSSHERRAFLQAILEHEEQDEEEDEVPDDETVNQMIARHEEEFDLFMRMDLDRRREEARNPKRKPRLMEEDELPSWIIKDDAEVERLTCEEEEEKMFGRGSRHRKEVDYSDSLTEKQWLKAIEEGTLEEIEEEVRQKKSSRKRKRDSDAGSSTPTTSTRSRDKDDESKKQKKRGRPPAEKLSPNPPNLTKKMKKIVDAVIKYKDSSSGRQLSEVFIQLPSRKELPEYYELIRKPVDFKKIKERIRNHKYRSLNDLEKDVMLLCQNAQTFNLEGSLIYEDSIVLQSVFTSVRQKIEKEDDSEGEESEEEEEGEEEGSESESRSVKVKIKLGRKEKAQDRLKGGRRRPSRGSRAKPVVSDDDSEEEQEEDRSGSGSEED

SEQ ID NO: 85394 - protein, 136 aa, Homo sapiens
  Payload ID: 16966
  Gene Symbol: SMARCA4
  Gene Name: SWI/SNF related, matrix associated, actin dependent regulator of chromatin, subfamily a, member 4
  ENSP ID: ENSP00000467200
TRAGGLGLNLQSADTVIIFDSDWNPHQDLQAQDRAHRIGQQNEVERLTCEEEEEKMFGRGSRHRKEVDYSDSLTEKQWLKTLKAIEEGTLEEIEEEVRQKKSSRKRKRDSDAGSSTPTTSTRSRDKDDESKKQKKR

SEQ ID NO: 85395 - protein, 113 aa, Homo sapiens
  Payload ID: 16966
  Gene Symbol: SMARCA4
  Gene Name: SWI/SNF related, matrix associated, actin dependent regulator of chromatin, subfamily a, member 4
  ENSP ID: ENSP00000467796
  MOD_RES (1)..(1): Any amino acid
XDVMLLCQNAQTFNLEGSLIYEDSIVLQSVFTSVRQKIEKEDDSEGEESEEEEEGEEEGSESESRSVKVKIKLGRKEKAQDRLKGGRRRPSRGSRAKPVVSDDDSEEEQEEAS

SEQ ID NO: 85396 - protein, 1052 aa, Homo sapiens
  Payload ID: 16967
  Gene Symbol: SMARCA5
  Gene Name: SWI/SNF related, matrix associated, actin dependent regulator of chromatin, subfamily a, member 5
  Uniprot ID: O60264
  ENSP ID: ENSP00000283131
MSSAAEPPPPPPPESAPSKPAASIASGGSNSSNKGGPEGVAAQAVASAASAGPADAEMEEIFDDASPGKQKEIQEPDPTYEEKMQTDRANRFEYLLKQTELFAHFIQPAAQKTPTSPLKMKPGRPRIKKDEKQNLLSVGDYRHRRTEQEEDEELLTESSKATNVCTRFEDSPSYVKWGKLRDYQVRGLNWLISLYENGINGILADEMGLGKTLQTISLLGYMKHYRNIPGPHMVLVPKSTLHNWMSEFKRWVPTLRSVCLIGDKEQRAAFVRDVLLPGEWDVCVTSYEMLIKEKSVFKKFNWRYLVIDEAHRIKNEKSKLSEIVREFKTTNRLLLTGTPLQNNLHELWSLLNFLLPDVFNSADDFDSWFDTNNCLGDQKLVERLHMVLRPFLLRRIKADVEKSLPPKKEVKIYVGLSKMQREWYTRILMKDIDILNSAGKMDKMRLLNILMQLRKCCNHPYLFDGAEPGPPYTTDMHLVTNSGKMVVLDKLLPKLKEQGSRVLIFSQMTRVLDILEDYCMWRNYEYCRLDGQTPHDERQDSINAYNEPNSTKFVFMLSTRAGGLGINLATADVVILYDSDWNPQVDLQAMDRAHRIGQTKTVRVFRFITDNTVEERIVERAEMKLRLDSIVIQQGRLVDQNLNKIGKDEMLQMIRHGATHVFASKESEITDEDIDGILERGAKKTAEMNEKLSKMGESSLRNFTMDTESSVYNFEGEDYREKQKIAFTEWIEPPKRERKANYAVDAYFREALRVSEPKAPKAPRPPKQPNVQDFQFFPPRLFELLEKEILFYRKTIGYKVPRNPELPNAAQAQKEEQLKIDEAESLNDEELEEKEKLLTQGFTNWNKRDFNQFIKANEKWGRDDIENIAREVEGKTPEEVIEYSAVFWERCNELQDIEKIMAQIERGEARIQRRISIKKALDTKIGRYKAPFHQLRISYGTNKGKNYTEEEDRFLICMLHKLGFDKENVYDELRQCIRNSPQFRFDWFLKSRTAMELQRRCNTLITLIERENMELEEKEKAEKKKRGPKPSTQKRKMDGAPDGRGRKKKLKL

SEQ ID NO: 85397 - protein, 954 aa, Homo sapiens
  Payload ID: 16968
  Gene Symbol: SMARCAL1
  Gene Name: SWI/SNF related, matrix associated, actin dependent regulator of chromatin, subfamily a-like 1
  Uniprot ID: Q9NZC9
  ENSP ID: ENSP00000349823
MSLPLTEEQRKKIEENRQKALARRAEKLLAEQHQRTSSGTSIAGNPFQAKQGPSQNFPRESCKPVSHGVIFKQQNLSSSSNADQRPHDSHSFQAKGIWKKPEEMPTACPGHSPRSQMALTGISPPLAQSPPEVPKQQLLSYELGQGHAQASPEIRFTPFANPTHKPLAKPKSSQETPAHSSGQPPRDAKLEAKTAKASPSGQNISYIHSSSESVTPRTEGRLQQKSGSSVQKGVNSQKGKCVRNGDRFQVLIGYNAELIAVFKTLPSKNYDPDTKTWNFSMNDYSALMKAAQSLPTVNLQPLEWAYGSSESPSTSSEGQAGLPSAPSLSFVKGRCMLISRAYFEADISYSQDLIALFKQMDSRRYDVKTRKWSFLLEEHSKLIAKVRCLPQVQLDPLPTTLTLAFASQLKKTSLSLTPDVPEADLSEVDPKLVSNLMPFQRAGVNFAIAKGGRLLLADDMGLGKTIQAICIAAFYRKEWPLLVVVPSSVRFTWEQAFLRWLPSLSPDCINVVVTGKDRLTAGLINIVSFDLLSKLEKQLKTPFKVVIIDESHFLKNSRTARCRAAMPVLKVAKRVILLSGTPAMSRPAELYTQIIAVKPTFFPQFHAFGLRYCDAKRMPWGWDYSGSSNLGELKLLLEEAVMLRRLKSDVLSQLPAKQRKIVVIAPGRINARTRAALDAAAKEMTTKDKTKQQQKDALILFFNRTAEAKIPSVIEYILDLLESGREKFLVFAHHKVVLDAITQELERKHVQHIRIDGSTSSAEREDLCQQFQLSERHAVAVLSITAANMGLTFSSADLVVFAELFWNPGVLIQAEDRVHRIGQTSSVGIHYLVAKGTADDYLWPLIQEKIKVLAEAGLSETNFSEMTESTDYLYKDPKQQKIYDLFQKSFEKEGSDMELLEAAESFDPGSASGTSGSSSQNMGDTLDESSLTASPQKKRRFEFFDNWDSFTSPL

SEQ ID NO: 85398 - protein, 954 aa, Homo sapiens; identical to SEQ ID NO: 85397
  Payload ID: 16968
  Gene Symbol: SMARCAL1
  Gene Name: SWI/SNF related, matrix associated, actin dependent regulator of chromatin, subfamily a-like 1
  Uniprot ID: Q9NZC9
  ENSP ID: ENSP00000350940

SEQ ID NO: 85399 - protein, 796 aa, Homo sapiens
  Payload ID: 16968
  Gene Symbol: SMARCAL1
  Gene Name: SWI/SNF related, matrix associated, actin dependent regulator of chromatin, subfamily a-like 1
  ENSP ID: ENSP00000375974
QLLSYELGQGHAQASPEIRFTPFANPTHKPLAKPKSSQETPAHSSGQPPRDAKLEAKTAKASPSGQNISYIHSSSESVTPRTEGRLQQKSGSSVQKGVNSQKGKCVRNGDRFQVLIGYNAELIAVFKTLPSKNYDPDTKTWNFSMNDYSALMKAAQSLPTVNLQPLEWAYGSSESPSTSSEGQAGLPSAPSLSFVKGRCMLISRAYFEADISYSQDLIALFKQMDSRRYDVKTRKWSFLLEEHSKLIAKVRCLPQVQLDPLPTTLTLAFASQLKKTSLSLTPDVPEADLSEVDPKLVSNLMPFQRAGVNFAIAKGGRLLLADDMGLGKTIQAICIAAFYRKEWPLLVVVPSSVRFTWEQAFLRWLPSLSPDCINVVVTGKDRLTAGLINIVSFDLLSKLEKQLKTPFKVVIIVAKRVILLSGTPAMSRPAELYTQIIAVKPTFFPQFHAFGLRYCDAKRMPWGWDYSGSSNLGELKLLLEEAVMLRRLKSDVLSQLPAKQRKIVVIAPGRINARTRAALDAAAKEMTTKDKTKQQQKDALILFFNRTAEAKIPSVIEYILDLLESGREKFLVFAHHKVVLDAITQELERKHVQHIRIDGSTSSAEREDLCQQFQLSERHAVAVLSITAANMGLTFSSADLVVFAELFWNPGVLIQAEDRVHRIGQTSSVGIHYLVAKGTADDYLWPLIQEKIKVLAEAGLSETNFSEMTESTDYLYKDPKQQKIYDLFQKSFEKEGSDMELLEAAESFDPGSASGTSGSSSQNMGDTLDESSLTASPQKKRRFEFFDNWDSFTSPL

SEQ ID NO: 85400 - protein, 141 aa, Homo sapiens
  Payload ID: 16968
  Gene Symbol: SMARCAL1
  Gene Name: SWI/SNF related, matrix associated, actin dependent regulator of chromatin, subfamily a-like 1
  ENSP ID: ENSP00000390248
MNDYSALMKAAQSLPTVNLQPLEWAYGSSESPSTSSEGQAGLPSAPSLSFVKGRCMLISRAYFEADISYSQDLIALFKQMDSRRYDVKTRKWSFLLEEHSKLIAKVRCLPQVQLDPLPTTLTLAFASQLKKTSLSLTPDVP

SEQ ID NO: 85401 - protein, 325 aa, Homo sapiens
  Payload ID: 16968
  Gene Symbol: SMARCAL1
  Gene Name: SWI/SNF related, matrix associated, actin dependent regulator of chromatin, subfamily a-like 1
  ENSP ID: ENSP00000392997
EEMPTACPGHSPRSQMALTGISPPLAQSPPEVPKQQLLSYELGQGHAQASPEIRFTPFANPTHKPLAKPKSSQETPAHSSGQPPRDAKLEAKTAKASPSGQNISYIHSSSESVTPRTEGRLQQKSGSSVQKGVNSQKGKCVRNGDRFQVLIGYNAELIAVFKTLPSKNYDPDTKTWNFSMNDYSALMKAAQSLPTVNLQPLEWAYGSSESPSTSSEGQAGLPSAPSLSFVKGRCMLISRAYFEADISYSQDLIALFKQMDSRRYVAKVRCLPQVQLDPLPTTLTLAFASQLKKTSLSLTPDVPEADLSEVDPKLVSNLMPFQRAG

SEQ ID NO: 85402 - protein, 19 aa, Homo sapiens
  Payload ID: 16968
  Gene Symbol: SMARCAL1
  Gene Name: SWI/SNF related, matrix associated, actin dependent regulator of chromatin, subfamily a-like 1
  ENSP ID: ENSP00000394410
MSLPLTEEQRKKIEENRQK

SEQ ID NO: 85403 - protein, 130 aa, Homo sapiens
  Payload ID: 16968
  Gene Symbol: SMARCAL1
  Gene Name: SWI/SNF related, matrix associated, actin dependent regulator of chromatin, subfamily a-like 1
  ENSP ID: ENSP00000398969
MSLPLTEEQRKKIEENRQKALARRAEKLLAEQHQRTSSGTSIAGNPFQAKQGPSQNFPRESCKPVSHGVIFKQQNLSSSSNADQRPHDSHSFQAKGIWKKPEEMPTACPGHSPRSQMALTGISPPLAQSP

SEQ ID NO: 85404 - protein, 161 aa, Homo sapiens
  Payload ID: 16968
  Gene Symbol: SMARCAL1
  Gene Name: SWI/SNF related, matrix associated, actin dependent regulator of chromatin, subfamily a-like 1
  ENSP ID: ENSP00000400473
  MOD_RES (1)..(1): Any amino acid
XVNFAIAKGGRLLLADDMGLGKTIQAICIAAFYRKEWPLLVVVPSSVRFTWEQAFLRWLPSLSPDCINVVVTGKDRLTAGLINIVSFDLLSKLEKQLKTPFKVVIIDESHFLKNSRTARCRAAMPVLKHTVNIYWLLGVRHMLQKIKVAKRVILLSGTPAM

SEQ ID NO: 85405 - protein, 92 aa, Homo sapiens
  Payload ID: 16968
  Gene Symbol: SMARCAL1
  Gene Name: SWI/SNF related, matrix associated, actin dependent regulator of chromatin, subfamily a-like 1
  ENSP ID: ENSP00000402967
MSLPLTEEQRKKIEENRQKALARRAEKLLAEQHQRTSSGTSIAGNPFQAKQGPSQNFPRESCKPVSHGVIFKQQNLSSSSNADQRPHDSHSF

SEQ ID NO: 85406 - protein, 145 aa, Homo sapiens
  Payload ID: 16968
  Gene Symbol: SMARCAL1
  Gene Name: SWI/SNF related, matrix associated, actin dependent regulator of chromatin, subfamily a-like 1
  ENSP ID: ENSP00000405077
MSLPLTEEQRKKIEENRQKALARRAEKLLAEQHQRTSSGTSIAGNPFQAKQGPSQNFPRESCKPVSHGVIFKQQNLSSSSNADQRPHDSHSFQAKGIWKKPEEMPTACPGHSPRSQMALTGISPPLAQSPPEVPKQQLLSYELGQ

SEQ ID NO: 85407 - protein, 385 aa, Homo sapiens
  Payload ID: 16969
  Gene Symbol: SMARCB1
  Gene Name: SWI/SNF related, matrix associated, actin dependent regulator of chromatin, subfamily b, member 1
  Uniprot ID: Q12824
  ENSP ID: ENSP00000263121
MMMMALSKTFGQKPVKFQLEDDGEFYMIGSEVGNYLRMFRGSLYKRYPSLWRRLATVEERKKIVASSHGKKTKPNTKDHGYTTLATSVTLLKASEVEEILDGNDEKYKAVSISTEPPTYLREQKAKRNSQWVPTLPNSSHHLDAVPCSTTINRNRMGRDKKRTFPLCFDDHDPAVIHENASQPEVLVPIRLDMEIDGQKLRDAFTWNMNEKLMTPEMFSEILCDDLDLNPLTFVPAIASAIRQQIESYPTDSILEDQSDQRVIIKLNIHVGNISLVDQFEWDMSEKENSPEKFALKLCSELGLGGEFVTTIAYSIRGQLSWHQKTYAFSENPLPTVEIAIRNTGDADQWCPLLETLTDAEMEKKIRDQDRNTRRMRRLANTAPAW

SEQ ID NO: 85408 - protein, 394 aa, Homo sapiens
  Payload ID: 16969
  Gene Symbol: SMARCB1
  Gene Name: SWI/SNF related, matrix associated, actin dependent regulator of chromatin, subfamily b, member 1
  ENSP ID: ENSP00000340883
MMMMALSKTFGQKPVKFQLEDDGEFYMIGSEVGNYLRMFRGSLYKRYPSLWRRLATVEERKKIVASSHDHGYTTLATSVTLLKASEVEEILDGNDEKYKAVSISTEPPTYLREQKAKRNSQWVPTLPNSSHHLDAVPCSTTINRNRMGRDKKRTFPLWCGCIAALTLRADSALVLHFDDHDPAVIHENASQPEVLVPIRLDMEIDGQKLRDAFTWNMNEKLMTPEMFSEILCDDLDLNPLTFVPAIASAIRQQIESYPTDSILEDQSDQRVIIKLNIHVGNISLVDQFEWDMSEKENSPEKFALKLCSELGLGGEFVTTIAYSIRGQLSWHQKTYAFSENPLPTVEIAIRNTGDADQWCPLLETLTDAEMEKKIRDQDRNTRRMRRLANTAPAW

SEQ ID NO: 85409 - protein, 376 aa, Homo sapiens
  Payload ID: 16969
  Gene Symbol: SMARCB1
  Gene Name: SWI/SNF related, matrix associated, actin dependent regulator of chromatin, subfamily b, member 1
  Uniprot ID: Q12824
  ENSP ID: ENSP00000383984
MMMMALSKTFGQKPVKFQLEDDGEFYMIGSEVGNYLRMFRGSLYKRYPSLWRRLATVEERKKIVASSHDHGYTTLATSVTLLKASEVEEILDGNDEKYKAVSISTEPPTYLREQKAKRNSQWVPTLPNSSHHLDAVPCSTTINRNRMGRDKKRTFPLCFDDHDPAVIHENASQPEVLVPIRLDMEIDGQKLRDAFTWNMNEKLMTPEMFSEILCDDLDLNPLTFVPAIASAIRQQIESYPTDSILEDQSDQRVIIKLNIHVGNISLVDQFEWDMSEKENSPEKFALKLCSELGLGGEFVTTIAYSIRGQLSWHQKTYAFSENPLPTVEIAIRNTGDADQWCPLLETLTDAEMEKKIRDQDRNTRRMRRLANTAPAW

SEQ ID NO: 85410 - protein, 339 aa, Homo sapiens
  Payload ID: 16969
  Gene Symbol: SMARCB1
  Gene Name: SWI/SNF related, matrix associated, actin dependent regulator of chromatin, subfamily b, member 1
  ENSP ID: ENSP00000385226
MMMMALSKTFGQKPVKFQLEDDGEFYMIGSEVGNYLRMFRGSLYKRYPSLWRRLATVEERKKIVASSHGKKTKPNTKDHGYTTLATSVTLLKASEVEEILDGNDEKYKAVSISTEPPTYLSFDDHDPAVIHENASQPEVLVPIRLDMEIDGQKLRDAFTWNMNEKLMTPEMFSEILCDDLDLNPLTFVPAIASAIRQQIESYPTDSILEDQSDQRVIIKLNIHVGNISLVDQFEWDMSEKENSPEKFALKLCSELGLGGEFVTTIAYSIRGQLSWHQKTYAFSENPLPTVEIAIRNTGDADQWCPLLETLTDAEMEKKIRDQDRNTRRMRRLANTAPAW

SEQ ID NO: 85411 - protein, 227 aa, Homo sapiens
  Payload ID: 16969
  Gene Symbol: SMARCB1
  Gene Name: SWI/SNF related, matrix associated, actin dependent regulator of chromatin, subfamily b, member 1
  ENSP ID: ENSP00000388489
MMMMALSKTFGQKPVKFQLEDDGEFYMIGSEVGNYLRMFRGSLYKRYPSLWRRLATVEERKKIVASSHGKKTKPNTKDHGYTTLATSVTLLKASEVEEILDGNDEKYKAVSISTEPPTYLREQKAKRNSQWVPTLPNSSHHLDAVPCSTTINRNRMGRDKKRTFPLWCGCIAALTLRADSALVLHFDDHDPAVIHENASQPEVLVPIRLDMEIDGQKLRDAFTWNMN

SEQ ID NO: 85412 - protein, 385 aa, Homo sapiens; identical to SEQ ID NO: 85407
  Payload ID: 16969
  Gene Symbol: SMARCB1
  Gene Name: SWI/SNF related, matrix associated, actin dependent regulator of chromatin, subfamily b, member 1
  Uniprot ID: Q12824
  ENSP ID: ENSP00000479330

SEQ ID NO: 85413 - protein, 394 aa, Homo sapiens; identical to SEQ ID NO: 85408
  Payload ID: 16969
  Gene Symbol: SMARCB1
  Gene Name: SWI/SNF related, matrix associated, actin dependent regulator of chromatin, subfamily b, member 1
  ENSP ID: ENSP00000486780

SEQ ID NO: 85414 - protein, 376 aa, Homo sapiens; identical to SEQ ID NO: 85409
  Payload ID: 16969
  Gene Symbol: SMARCB1
  Gene Name: SWI/SNF related, matrix associated, actin dependent regulator of chromatin, subfamily b, member 1
  Uniprot ID: Q12824
  ENSP ID: ENSP00000486870

SEQ ID NO: 85415 - protein, 339 aa, Homo sapiens; identical to SEQ ID NO: 85410
  Payload ID: 16969
  Gene Symbol: SMARCB1
  Gene Name: SWI/SNF related, matrix associated, actin dependent regulator of chromatin, subfamily b, member 1
  ENSP ID: ENSP00000487092

SEQ ID NO: 85416 - protein, 227 aa, Homo sapiens; identical to SEQ ID NO: 85411
  Payload ID: 16969
  Gene Symbol: SMARCB1
  Gene Name: SWI/SNF related, matrix associated, actin dependent regulator of chromatin, subfamily b, member 1
  ENSP ID: ENSP00000487582

SEQ ID NO: 85417 - protein, 81 aa, Homo sapiens
  Payload ID: 16969
  Gene Symbol: SMARCB1
  Gene Name: SWI/SNF related, matrix associated, actin dependent regulator of chromatin, subfamily b, member 1
  ENSP ID: ENSP00000489115
  MOD_RES (1)..(1): Any amino acid
XWRRLATVEERKKIVASSHDHGYTTLATSVTLLKASEVEEILDGNDEKYKAVSISTEPPTYLREQKAKRNSHFDDHDPAVI

SEQ ID NO: 85418 - protein, 90 aa, Homo sapiens
  Payload ID: 16969
  Gene Symbol: SMARCB1
  Gene Name: SWI/SNF related, matrix associated, actin dependent regulator of chromatin, subfamily b, member 1
  ENSP ID: ENSP00000489445
  MOD_RES (1)..(1): Any amino acid
XWRRLATVEERKKIVASSHGKKTKPNTKDHGYTTLATSVTLLKASEVEEILDGNDEKYKAVSISTEPPTYLREQKAKRNSHFDDHDPAVI

SEQ ID NO: 85419 - protein, 1105 aa, Homo sapiens
  Payload ID: 16970
  Gene Symbol: SMARCC1
  Gene Name: SWI/SNF related, matrix associated, actin dependent regulator of chromatin, subfamily c, member 1
  Uniprot ID: Q92922
  ENSP ID: ENSP00000254480
MAAAAGGGGPGTAVGATGSGIAAAAAGLAVYRRKDGGPATKFWESPETVSQLDSVRVWLGKHYKKYVHADAPTNKTLAGLVVQLLQFQEDAFGKHVTNPAFTKLPAKCFMDFKAGGALCHILGAAYKYKNEQGWRRFDLQNPSRMDRNVEMFMNIEKTLVQNNCLTRPNIYLIPDIDLKLANKLKDIIKRHQGTFTDEKSKASHHIYPYSSSQDDEEWLRPVMRKEKQVLVHWGFYPDSYDTWVHSNDVDAEIEDPPIPEKPWKVHVKWILDTDIFNEWMNEEDYEVDENRKPVSFRQRISTKNEEPVRSPERRDRKASANARKRKHSPSPPPPTPTESRKKSGKKGQASLYGKRRSQKEEDEQEDLTKDMEDPTPVPNIEEVVLPKNVNLKKDSENTPVKGGTVADLDEQDEETVTAGGKEDEDPAKGDQSRSVDLGEDNVTEQTNHIIIPSYASWFDYNCIHVIERRALPEFFNGKNKSKTPEIYLAYRNFMIDTYRLNPQEYLTSTACRRNLTGDVCAVMRVHAFLEQWGLVNYQVDPESRPMAMGPPPTPHFNVLADTPSGLVPLHLRSPQVPAAQQMLNFPEKNKEKPVDLQNFGLRTDIYSKKTLAKSKGASAGREWTEQETLLLLEALEMYKDDWNKVSEHVGSRTQDECILHFLRLPIEDPYLENSDASLGPLAYQPVPFSQSGNPVMSTVAFLASVVDPRVASAAAKAALEEFSRVREEVPLELVEAHVKKVQEAARASGKVDPTYGLESSCIAGTGPDEPEKLEGAEEEKMEADPDGQQPEKAENKVENETDEGDKAQDGENEKNSEKEQDSEVSEDTKSEEKETEENKELTDTCKERESDTGKKKVEHEISEGNVATAAAAALASAATKAKHLAAVEERKIKSLVALLVETQMKKLEIKLRHFEELETIMDREKEALEQQRQQLLTERQNFHMEQLKYAELRARQQMEQQQHGQNPQQAHQHSGGPGLAPLGAAGHPGMMPHQQPPPYPLMHHQMPPPHPPQPGQIPGPGSMMPGQHMPGRMIPTVAANIHPSGSGPTPPGMPPMPGNILGPRVPLTAPNGMYPPPPQQQPPPPPPADGVPPPPAPGPPASAAP

SEQ ID NO: 85420 - protein, 133 aa, Homo sapiens
  Payload ID: 16970
  Gene Symbol: SMARCC1
  Gene Name: SWI/SNF related, matrix associated, actin dependent regulator of chromatin, subfamily c, member 1
  ENSP ID: ENSP00000414266
MAAAAGGGGPGTAVGATGSGIAAAAAGLAVYRRKDGGPATKFWESPETVSQLDSVRVWLGKHYKKYVHADAPTNKTLAGLVVQLLQFQEDAFGKHVTNPAFTKLPAKCFMDFKAGGALCHILGAAYKYKNEQG

SEQ ID NO: 85421 - protein, 1214 aa, Homo sapiens
  Payload ID: 16971
  Gene Symbol: SMARCC2
  Gene Name: SWI/SNF related, matrix associated, actin dependent regulator of chromatin, subfamily c, member 2
  Uniprot ID: Q8TAQ2
  ENSP ID: ENSP00000267064
MAVRKKDGGPNVKYYEAADTVTQFDNVRLWLGKNYKKYIQAEPPTNKSLSSLVVQLLQFQEEVFGKHVSNAPLTKLPIKCFLDFKAGGSLCHILAAAYKFKSDQGWRRYDFQNPSRMDRNVEMFMTIEKSLVQNNCLSRPNIFLCPEIEPKLLGKLKDIIKRHQGTVTEDKNNASHVVYPVPGNLEEEEWVRPVMKRDKQVLLHWGYYPDSYDTWIPASEIEASVEDAPTPEKPRKVHAKWILDTDTFNEWMNEEDYEVNDDKNPVSRRKKISAKTLTDEVNSPDSDRRDKKGGNYKKRKRSPSPSPTPEAKKKNAKKGPSTPYTKSKRGHREEEQEDLTKDMDEPSPVPNVEEVTLPKTVNTKKDSESAPVKGGTMTDLDEQEDESMETTGKDEDENSTGNKGEQTKNPDLHEDNVTEQTHHIIIPSYAAWFDYNSVHAIERRALPEFFNGKNKSKTPEIYLAYRNFMIDTYRLNPQEYLTSTACRRNLAGDVCAIMRVHAFLEQWGLINYQVDAESRPTPMGPPPTSHFHVLADTPSGLVPLQPKTPQQTSASQQMLNFPDKGKEKPTDMQNFGLRTDMYTKKNVPSKSKAAASATREWTEQETLLLLEALEMYKDDWNKVSEHVGSRTQDECILHFLRLPIEDPYLEDSEASLGPLAYQPIPFSQSGNPVMSTVAFLASVVDPRVASAAAKSALEEFSKMKEEVPTALVEAHVRKVEEAAKVTGKADPAFGLESSGIAGTTSDEPERIEESGNDEARVEGQATDEKKEPKEPREGGGAIEEEAKEKTSEAPKKDEEKGKEGDSEKESEKSDGDPIVDPEKEKEPKEGQEEVLKEVVESEGERKTKVERDIGEGNLSTAAAAALAAAAVKAKHLAAVEERKIKSLVALLVETQMKKLEIKLRHFEELETIMDREREALEYQRQQLLADRQAFHMEQLKYAEMRARQQHFQQMHQQQQQPPPALPPGSQPIPPTGAAGPPAVHGLAVAPASVVPAPAGSGAPPGSLGPSEQIGQAGSTAGPQQQQPAGAPQPGAVPPGVPPPGPHGPSPFPNQQTPPSMMPGAVPGSGHPGVAGNAPLGLPFGMPPPPPPPAPSIIPFGSLADSISINLPAPPNLHGHHHHLPFAPGTLPPPNLPVSMANPLHPNLPATTTMPSSLPLGPGLGSAAAQSPAIVAAVQGNLLPSASPLPDPGTPLPPDPTAPSPGTVTPVPPPQ

SEQ ID NO: 85422 - protein, 1130 aa, Homo sapiens
  Payload ID: 16971
  Gene Symbol: SMARCC2
  Gene Name: SWI/SNF related, matrix associated, actin dependent regulator of chromatin, subfamily c, member 2
  Uniprot ID: Q8TAQ2
  ENSP ID: ENSP00000302919
MAVRKKDGGPNVKYYEAADTVTQFDNVRLWLGKNYKKYIQAEPPTNKSLSSLVVQLLQFQEEVFGKHVSNAPLTKLPIKCFLDFKAGGSLCHILAAAYKFKSDQGWRRYDFQNPSRMDRNVEMFMTIEKSLVQNNCLSRPNIFLCPEIEPKLLGKLKDIIKRHQGTVTEDKNNASHVVYPVPGNLEEEEWVRPVMKRDKQVLLHWGYYPDSYDTWIPASEIEASVEDAPTPEKPRKVHAKWILDTDTFNEWMNEEDYEVNDDKNPVSRRKKISAKTLTDEVNSPDSDRRDKKGGNYKKRKRSPSPSPTPEAKKKNAKKGPSTPYTKSKRGHREEEQEDLTKDMDEPSPVPNVEEVTLPKTVNTKKDSESAPVKGGTMTDLDEQEDESMETTGKDEDENSTGNKGEQTKNPDLHEDNVTEQTHHIIIPSYAAWFDYNSVHAIERRALPEFFNGKNKSKTPEIYLAYRNFMIDTYRLNPQEYLTSTACRRNLAGDVCAIMRVHAFLEQWGLINYQVDAESRPTPMGPPPTSHFHVLADTPSGLVPLQPKTPQGRQVDADTKAGRKGKELDDLVPETAKGKPELQTSASQQMLNFPDKGKEKPTDMQNFGLRTDMYTKKNVPSKSKAAASATREWTEQETLLLLEALEMYKDDWNKVSEHVGSRTQDECILHFLRLPIEDPYLEDSEASLGPLAYQPIPFSQSGNPVMSTVAFLASVVDPRVASAAAKSALEEFSKMKEEVPTALVEAHVRKVEEAAKVTGKADPAFGLESSGIAGTTSDEPERIEESGNDEARVEGQATDEKKEPKEPREGGGAIEEEAKEKTSEAPKKDEEKGKEGDSEKESEKSDGDPIVDPEKEKEPKEGQEEVLKEVVESEGERKTKVERDIGEGNLSTAAAAALAAAAVKAKHLAAVEERKIKSLVALLVETQMKKLEIKLRHFEELETIMDREREALEYQRQQLLADRQAFHMEQLKYAEMRARQQHFQQMHQQQQQPPPALPPGSQPIPPTGAAGPPAVHGLAVAPASVVPAPAGSGAPPGSLGPSEQIGQAGSTAGPQQQQPAGAPQPGAVPPGVPPPGPHGPSPFPNQQTPPSMMPGAVPGSGHPGVADPGTPLPPDPTAPSPGTVTPVPPPQ

SEQ ID NO: 85423 - protein, 1152 aa, Homo sapiens
  Payload ID: 16971
  Gene Symbol: SMARCC2
  Gene Name: SWI/SNF related, matrix associated, actin dependent regulator of chromatin, subfamily c, member 2
  Uniprot ID: Q8TAQ2
  ENSP ID: ENSP00000377591
MAVRKKDGGPNVKYYEAADTVTQFDNVRLWLGKNYKKYIQAEPPTNKSLSSLVVQLLQFQEEVFGKHVSNAPLTKLPIKCFLDFKAGGSLCHILAAAYKFKSDQGWRRYDFQNPSRMDRNVEMFMTIEKSLVQNNCLSRPNIFLCPEIEPKLLGKLKDIIKRHQGTVTEDKNNASHVVYPVPGNLEEEEWVRPVMKRDKQVLLHWGYYPDSYDTWIPASEIEASVEDAPTPEKPRKVHAKWILDTDTFNEWMNEEDYEVNDDKNPVSRRKKISAKTLTDEVNSPDSDRRDKKGGNYKKRKRSPSPSPTPEAKKKNAKKGPSTPYTKSKRGHREEEQEDLTKDMDEPSPVPNVEEVTLPKTVNTKKDSESAPVKGGTMTDLDEQEDESMETTGKDEDENSTGNKGEQTKNPDLHEDNVTEQTHHIIIPSYAAWFDYNSVHAIERRALPEFFNGKNKSKTPEIYLAYRNFMIDTYRLNPQEYLTSTACRRNLAGDVCAIMRVHAFLEQWGLINYQVDAESRPTPMGPPPTSHFHVLADTPSGLVPLQPKTPQGRQVDADTKAGRKGKELDDLVPETAKGKPELQTSASQQMLNFPDKGKEKPTDMQNFGLRTDMYTKKNVPSKSKAAASATREWTEQETLLLLEALEMYKDDWNKVSEHVGSRTQDECILHFLRLPIEDPYLEDSEASLGPLAYQPIPFSQSGNPVMSTVAFLASVVDPRVASAAAKSALEEFSKMKEEVPTALVEAHVRKVEEAAKVTGKADPAFGLESSGIAGTTSDEPERIEESGNDEARVEGQATDEKKEPKEPREGGGAIEEEAKEKTSEAPKKDEEKGKEGDSEKESEKSDGDPIVDPEKEKEPKEGQEEVLKEVVESEGERKTKVERDIGEGNLSTAAAAALAAAAVKAKHLAAVEERKIKSLVALLVETQMKKLEIKLRHFEELETIMDREREALEYQRQQLLADRQAFHMEQLKYAEMRARQQHFQQMHQQQQQPPPALPPGSQPIPPTGAAGPPAVHGLAVAPASVVPAPAGSGAPPGSLGPSEQIGQAGSTAGPQQQQPAGAPQPGAVPPGVPPPGPHGPSPFPNQQTPPSMMPGAVPGSGHPGVAAQSPAIVAAVQGNLLPSASPLPDPGTPLPPDPTAPSPGTVTPVPPPQ

SEQ ID NO: 85424 - protein, 105 aa, Homo sapiens
  Payload ID: 16971
  Gene Symbol: SMARCC2
  Gene Name: SWI/SNF related, matrix associated, actin dependent regulator of chromatin, subfamily c, member 2
  ENSP ID: ENSP00000447680
MAVRKKDGGPNVKYYEAADTVTQFDNVRLWLGKNYKKYIQAEPPTNKSLSSLVVQLLQFQEEVFGKHVSNAPLTKLPIKCFLDFKAGGSLCHILAAAYKFKSDQG

SEQ ID NO: 85425 - protein, 1245 aa, Homo sapiens
  Payload ID: 16971
  Gene Symbol: SMARCC2
  Gene Name: SWI/SNF related, matrix associated, actin dependent regulator of chromatin, subfamily c, member 2
  ENSP ID: ENSP00000449396
MAVRKKDGGPNVKYYEAADTVTQFDNVRLWLGKNYKKYIQAEPPTNKSLSSLVVQLLQFQEEVFGKHVSNAPLTKLPIKCFLDFKAGGSLCHILAAAYKFKSDQGWRRYDFQNPSRMDRNVEMFMTIEKSLVQNNCLSRPNIFLCPEIEPKLLGKLKDIIKRHQGTVTEDKNNASHVVYPVPGNLEEEEWVRPVMKRDKQVLLHWGYYPDSYDTWIPASEIEASVEDAPTPEKPRKVHAKWILDTDTFNEWMNEEDYEVNDDKNPVSRRKKISAKTLTDEVNSPDSDRRDKKGGNYKKRKRSPSPSPTPEAKKKNAKKGPSTPYTKSKRGHREEEQEDLTKDMDEPSPVPNVEEVTLPKTVNTKKDSESAPVKGGTMTDLDEQEDESMETTGKDEDENSTGNKGEQTKNPDLHEDNVTEQTHHIIIPSYAAWFDYNSVHAIERRALPEFFNGKNKSKTPEIYLAYRNFMIDTYRLNPQEYLTSTACRRNLAGDVCAIMRVHAFLEQWGLINYQVDAESRPTPMGPPPTSHFHVLADTPSGLVPLQPKTPQGRQVDADTKAGRKGKELDDLVPETAKGKPELQTSASQQMLNFPDKGKEKPTDMQNFGLRTDMYTKKNVPSKSKAAASATREWTEQETLLLLEALEMYKDDWNKVSEHVGSRTQDECILHFLRLPIEDPYLEDSEASLGPLAYQPIPFSQSGNPVMSTVAFLASVVDPRVASAAAKSALEEFSKMKEEVPTALVEAHVRKVEEAAKVTGKADPAFGLESSGIAGTTSDEPERIEESGNDEARVEGQATDEKKEPKEPREGGGAIEEEAKEKTSEAPKKDEEKGKEGDSEKESEKSDGDPIVDPEKEKEPKEGQEEVLKEVVESEGERKTKVERDIGEGNLSTAAAAALAAAAVKAKHLAAVEERKIKSLVALLVETQMKKLEIKLRHFEELETIMDREREALEYQRQQLLADRQAFHMEQLKYAEMRARQQHFQQMHQQQQQPPPALPPGSQPIPPTGAAGPPAVHGLAVAPASVVPAPAGSGAPPGSLGPSEQIGQAGSTAGPQQQQPAGAPQPGAVPPGVPPPGPHGPSPFPNQQTPPSMMPGAVPGSGHPGVAGNAPLGLPFGMPPPPPPPAPSIIPFGSLADSISINLPAPPNLHGHHHHLPFAPGTLPPPNLPVSMANPLHPNLPATTTMPSSLPLGPGLGSAAAQSPAIVAAVQGNLLPSASPLPDPGTPLPPDPTAPSPGTVTPVPPPQ

SEQ ID NO: 85426 - protein, 105 aa, Homo sapiens; identical to SEQ ID NO: 85424
  Payload ID: 16971
  Gene Symbol: SMARCC2
  Gene Name: SWI/SNF related, matrix associated, actin dependent regulator of chromatin, subfamily c, member 2
  ENSP ID: ENSP00000449429

SEQ ID NO: 85427 - protein, 474 aa, Homo sapiens
  Payload ID: 16972
  Gene Symbol: SMARCD1
  Gene Name: SWI/SNF related, matrix associated, actin dependent regulator of chromatin, subfamily d, member 1
  Uniprot ID: Q96GM5
  ENSP ID: ENSP00000370924
MAARAGFQSVAPSGGAGASGGAGAAAALGPGGTPGPPVRMGPAPGQGLYRSPMPGAAYPRPGMLPGSRMTPQGPSMGPPGYGGNPSVRPGLAQSGMDQSRKRPAPQQIQQVQQQAVQNRNHNAKKKKMADKILPQRIRELVPESQAYMDLLAFERKLDQTIMRKRLDIQEALKRPIKQKRKLRIFISNTFNPAKSDAEDGEGTVASWELRVEGRLLEDSALSKYDATKQKRKFSSFFKSLVIELDKDLYGPDNHLVEWHRTATTQETDGFQVKRPGDVNVRCTVLLMLDYQPPQFKLDPRLARLLGIHTQTRPVIIQALWQYIKTHKLQDPHEREFVICDKYLQQIFESQRMKFSEIPQRLHALLMPPEPIIINHVISVDPNDQKKTACYDIDVEVDDTLKTQMNSFLLSTASQQEIATLDNKTMTDVVGNPEEERRAEFYFQPWAQEAVCRYFYSKVQQRRQELEQALGIRNT

SEQ ID NO: 85428 - protein, 515 aa, Homo sapiens
  Payload ID: 16972
  Gene Symbol: SMARCD1
  Gene Name: SWI/SNF related, matrix associated, actin dependent regulator of chromatin, subfamily d, member 1
  Uniprot ID: Q96GM5
  ENSP ID: ENSP00000378414
MAARAGFQSVAPSGGAGASGGAGAAAALGPGGTPGPPVRMGPAPGQGLYRSPMPGAAYPRPGMLPGSRMTPQGPSMGPPGYGGNPSVRPGLAQSGMDQSRKRPAPQQIQQVQQQAVQNRNHNAKKKKMADKILPQRIRELVPESQAYMDLLAFERKLDQTIMRKRLDIQEALKRPIKQKRKLRIFISNTFNPAKSDAEDGEGTVASWELRVEGRLLEDSALSKYDATKQKRKFSSFFKSLVIELDKDLYGPDNHLVEWHRTATTQETDGFQVKRPGDVNVRCTVLLMLDYQPPQFKLDPRLARLLGIHTQTRPVIIQALWQYIKTHKLQDPHEREFVICDKYLQQIFESQRMKFSEIPQRLHALLMPPEPIIINHVISVDPNDQKKTACYDIDVEVDDTLKTQMNSFLLSTASQQEIATLDNKIHETIETINQLKTQREFMLSFARDPQGFINDWLQSQCRDLKTMTDVVGNPEEERRAEFYFQPWAQEAVCRYFYSKVQQRRQELEQALGIRNT

SEQ ID NO: 85429 - protein, 278 aa, Homo sapiens
  Payload ID: 16972
  Gene Symbol: SMARCD1
  Gene Name: SWI/SNF related, matrix associated, actin dependent regulator of chromatin, subfamily d, member 1
  ENSP ID: ENSP00000447386
MAARAGFQSVAPSGGAGASGGAGAAAALGPGGTPGPPVRMGPAPGQGLYRSPMPGAAYPRPGMLPGSRMTPQGPSMGPPGYGGNPSVRPGLAQSGMDQSRKRPAPQQIQQVQQQAVQNRNHNAKKKKMADKILPQRIRELVPESQAYMDLLAFERKLDQTIMRKRLDIQEALKRPIKSALSKYDATKQKRKFSSFFKSLVIELDKDLYGPDNHLVEWHRTATTQETDGFQVKRPGDVNVRCTVLLMLDYQPPQFKLDPRLARLLGIHTQTRPVIIQAL

SEQ ID NO: 85430 - protein, 115 aa, Homo sapiens
  Payload ID: 16972
  Gene Symbol: SMARCD1
  Gene Name: SWI/SNF related, matrix associated, actin dependent regulator of chromatin, subfamily d, member 1
  ENSP ID: ENSP00000447909
  MOD_RES (1)..(1): Any amino acid
XTQMNSFLLSTASQQEIATLDNKIHETIETINQLKTQREFMLSFARDPQGFINDWLQSQCRDLKTMTDVVGNPEEERRAEFYFQPWAQEAVCRYFYSKVQQRRQELEQALGIRNT

SEQ ID NO: 85431 - protein, 289 aa, Homo sapiens
  Payload ID: 16972
  Gene Symbol: SMARCD1
  Gene Name: SWI/SNF related, matrix associated, actin dependent regulator of chromatin, subfamily d, member 1
  ENSP ID: ENSP00000448030
MAARAGFQSVAPSGGAGASGGAGAAAALGPGGTPGPPVRMGPAPGQGLYRSPMPGAAYPRPGMLPGSRMTPQGPSMGPPGYGGNPSVRPGLAQSGMDQSRKRPAPQQIQQVQQQAVQNRNHNAKKKKMADKILPQRIRELVPESQAYMDLLAFERKLDQTIMRKRLDIQEALKRPIKWHRTATTQETDGFQVKRPGDVNVRCTVLLMLDYQPPQFKLDPRLARLLGIHTQTRPVIIQALWQYIKTHKLQDPHEREFVICDKYLQQIFESQRMKFSEIPQRLHALLMPPE

SEQ ID NO: 85432 - protein, 313 aa, Homo sapiens
  Payload ID: 16972
  Gene Symbol: SMARCD1
  Gene Name: SWI/SNF related, matrix associated, actin dependent regulator of chromatin, subfamily d, member 1
  ENSP ID: ENSP00000448627
MCNGLLNLPHFPWANEMALSKYDATKQKRKFSSFFKSLVIELDKDLYGPDNHLVEWHRTATTQETDGFQVKRPGDVNVRCTVLLMLDYQPPQFKLDPRLARLLGIHTQTRPVIIQALWQYIKTHKLQDPHEREFVICDKYLQQIFESQRMKFSEIPQRLHALLMPPEPIIINHVISVDPNDQKKTACYDIDVEVDDTLKTQMNSFLLSTASQQEIATLDNKIHETIETINQLKTQREFMLSFARDPQGFINDWLQSQCRDLKTMTDVVGNPEEERRAEFYFQPWAQEAVCRYFYSKVQQRRQELEQALGIRNT

SEQ ID NO: 85433 - protein, 113 aa, Homo sapiens
  Payload ID: 16972
  Gene Symbol: SMARCD1
  Gene Name: SWI/SNF related, matrix associated, actin dependent regulator of chromatin, subfamily d, member 1
  ENSP ID: ENSP00000449825
MLPGSRMTPQGPSMGPPGYGGNPSVRPGLAQSGMDQSRKRPAPQQIQQVQQQAVQNRNHNAKKKKMADKILPQRIRELVPESQAYMDLLAFERKLDQTIMRKRLDIQEALKRP

SEQ ID NO: 85434 - protein, 456 aa, Homo sapiens
  Payload ID: 16973
  Gene Symbol: SMARCD2
  Gene Name: SWI/SNF related, matrix associated, actin dependent regulator of chromatin, subfamily d, member 2
  ENSP ID: ENSP00000225742
MSPGNRMPMAGLQVGPPAGSPFGAAAPLRPGMPPTMMDPFRKRLLVPQAQPPMPAQRRGLKRRKMADKVLPQRIRELVPESQAYMDLLAFERKLDQTIARKRMEIQEAIKKPLTQKRKLRIYISNTFSPSKAEGDSAGTAGTPGGTPAGDKVASWELRVEGKLLDDPSKQKRKFSSFFKSLVIELDKELYGPDNHLVEWHRMPTTQETDGFQVKRPGDLNVKCTLLLMLDHQPPQYKLDPRLARLLGVHTQTRAAIMQALWLYIKHNQLQDGHEREYINCNRYFRQIFSCGRLRFSEIPMKLAGLLQHPDPIVINHVISVDPNDQKKTACYDIDVEVDDPLKAQMSNFLASTTNQQEIASLDVKIHETIESINQLKTQRDFMLSFSTDPQDFIQEWLRSQRRDLKIITDVIGNPEEERRAAFYHQPWAQEAVGRHIFAKVQQRRQELEQVLGIRLT

SEQ ID NO: 85435 - protein, 483 aa, Homo sapiens
  Payload ID: 16973
  Gene Symbol: SMARCD2
  Gene Name: SWI/SNF related, matrix associated, actin dependent regulator of chromatin, subfamily d, member 2
  Uniprot ID: Q92925
  ENSP ID: ENSP00000318451
MGRRVGVEVTPRWAPQKCQGARPQRPGMSPGNRMPMAGLQVGPPAGSPFGAAAPLRPGMPPTMMDPFRKRLLVPQAQPPMPAQRRGLKRRKMADKVLPQRIRELVPESQAYMDLLAFERKLDQTIARKRMEIQEAIKKPLTQKRKLRIYISNTFSPSKAEGDSAGTAGTPGGTPAGDKVASWELRVEGKLLDDPSKQKRKFSSFFKSLVIELDKELYGPDNHLVEWHRMPTTQETDGFQVKRPGDLNVKCTLLLMLDHQPPQYKLDPRLARLLGVHTQTRAAIMQALWLYIKHNQLQDGHEREYINCNRYFRQIFSCGRLRFSEIPMKLAGLLQHPDPIVINHVISVDPNDQKKTACYDIDVEVDDPLKAQMSNFLASTTNQQEIASLDVKIHETIESINQLKTQRDFMLSFSTDPQDFIQEWLRSQRRDLKIITDVIGNPEEERRAAFYHQPWAQEAVGRHIFAKVQQRRQELEQVLGIRLT

SEQ ID NO: 85436 - protein, 531 aa, Homo sapiens
  Payload ID: 16973
  Gene Symbol: SMARCD2
  Gene Name: SWI/SNF related, matrix associated, actin dependent regulator of chromatin, subfamily d, member 2
  Uniprot ID: Q92925
  ENSP ID: ENSP00000392617
MSGRGAGGFPLPPLSPGGGAVAAALGAPPPPAGPGMLPGPALRGPGPAGGVGGPGAAAFRPMGPAGPAAQYQRPGMSPGNRMPMAGLQVGPPAGSPFGAAAPLRPGMPPTMMDPFRKRLLVPQAQPPMPAQRRGLKRRKMADKVLPQRIRELVPESQAYMDLLAFERKLDQTIARKRMEIQEAIKKPLTQKRKLRIYISNTFSPSKAEGDSAGTAGTPGGTPAGDKVASWELRVEGKLLDDPSKQKRKFSSFFKSLVIELDKELYGPDNHLVEWHRMPTTQETDGFQVKRPGDLNVKCTLLLMLDHQPPQYKLDPRLARLLGVHTQTRAAIMQALWLYIKHNQLQDGHEREYINCNRYFRQIFSCGRLRFSEIPMKLAGLLQHPDPIVINHVISVDPNDQKKTACYDIDVEVDDPLKAQMSNFLASTTNQQEIASLDVKIHETIESINQLKTQRDFMLSFSTDPQDFIQEWLRSQRRDLKIITDVIGNPEEERRAAFYHQPWAQEAVGRHIFAKVQQRRQELEQVLGIRLT

SEQ ID NO: 85437 - protein, 231 aa, Homo sapiens
  Payload ID: 16973
  Gene Symbol: SMARCD2
  Gene Name: SWI/SNF related, matrix associated, actin dependent regulator of chromatin, subfamily d, member 2
  ENSP ID: ENSP00000398946
  MOD_RES (1)..(1): Any amino acid
XDKELYGPDNHLVEWHRMPTTQETDGFQVKRPGDLNVKCTLLLMLDHQPPQYKLDPRLARLLGVHTQTRAAIMQALWLYIKHNQLQDGHEREYINCNRYFRQIFSCGRLRFSEIPMKLAGLLQHPDPIVINHVISVDPNDQKKTACYDIDVEVDDPLKAQMSNFLASTTNQQEIASLDVKIITDVIGNPEEERRAAFYHQPWAQEAVGRHIFAKVQQRRQELEQVLGIRLT

SEQ ID NO: 85438 - protein, 69 aa, Homo sapiens
  Payload ID: 16973
  Gene Symbol: SMARCD2
  Gene Name: SWI/SNF related, matrix associated, actin dependent regulator of chromatin, subfamily d, member 2
  ENSP ID: ENSP00000462761
MSGRGAGGFPLPPLSPGGGAVAAALGAPPPPAGPGMLPGPALRGPGPAGGVGGPGAAAFRPMGPAGPAA

SEQ ID NO: 85439 - protein, 109 aa, Homo sapiens
  Payload ID: 16973
  Gene Symbol: SMARCD2
  Gene Name: SWI/SNF related, matrix associated, actin dependent regulator of chromatin, subfamily d, member 2
  ENSP ID: ENSP00000463793
RPGMSPGNRMPMAGLQVGPPAGSPFGAAAPLRPGMPPTMMDPFRKRLLVPQAQPPMPAQRRGLKRRKMADKVLPQRVSVKRTPGRPAQWPPWDPGACSRVSGVHGSLGF

SEQ ID NO: 85440 - protein, 80 aa, Homo sapiens
  Payload ID: 16973
  Gene Symbol: SMARCD2
  Gene Name: SWI/SNF related, matrix associated, actin dependent regulator of chromatin, subfamily d, member 2
  ENSP ID: ENSP00000464503
MSGRGAGGFPLPPLSPGGGAVAAALGAPPPPAGPGMLPGPALRGPGPAGGVGGPGAAAFRPMGPAGPAAQYQVKEEEDGR

SEQ ID NO: 85441 - protein, 494 aa, Homo sapiens
  Payload ID: 16973
  Gene Symbol: SMARCD2
  Gene Name: SWI/SNF related, matrix associated, actin dependent regulator of chromatin, subfamily d, member 2
  ENSP ID: ENSP00000483605
MSGRGAGGFPLPPLSPGGGAAFRPMGPAGPAAQYQRPGMSPGNRMPMAGLQVGPPAGSPFGAAAPLRPGMPPTMMDPFRKRLLVPQAQPPMPAQRRGLKRRKMADKVLPQRIRELVPESQAYMDLLAFERKLDQTIARKRMEIQEAIKKPLTQKRKLRIYISNTFSPSKAEGDSAGTAGTPGGTPAGDKVASWELRVEGKLLDDPSKQKRKFSSFFKSLVIELDKELYGPDNHLVEWHRMPTTQETDGFQVKRPGDLNVKCTLLLMLDHQPPQYKLDPRLARLLGVHTQTRAAIMQALWLYIKHNQLQDGHEREYINCNRYFRQIFSCGRLRFSEIPMKLAGLLQHPDPIVINHVISVDPNDQKKTACYDIDVEVDDPLKAQMSNFLASTTNQQEIASLDVKIHETIESINQLKTQRDFMLSFSTDPQDFIQEWLRSQRRDLKIITDVIGNPEEERRAAFYHQPWAQEAVGRHIFAKVQQRRQELEQVLGIRLT

SEQ ID NO: 85442 - protein, 483 aa, Homo sapiens
  Payload ID: 16974
  Gene Symbol: SMARCD3
  Gene Name: SWI/SNF related, matrix associated, actin dependent regulator of chromatin, subfamily d, member 3
  Uniprot ID: Q6STE5
  ENSP ID: ENSP00000262188
MAADEVAGGARKATKSKLFEFLVHGVRPGMPSGARMPHQGAPMGPPGSPYMGSPAVRPGLAPAGMEPARKRAAPPPGQSQAQSQGQPVPTAPARSRSAKRRKMADKILPQRIRELVPESQAYMDLLAFERKLDQTIMRKRVDIQEALKRPMKQKRKLRLYISNTFNPAKPDAEDSDGSIASWELRVEGKLLDDPSKQKRKFSSFFKSLVIELDKDLYGPDNHLVEWHRTPTTQETDGFQVKRPGDLSVRCTLLLMLDYQPPQFKLDPRLARLLGLHTQSRSAIVQALWQYVKTNRLQDSHDKEYINGDKYFQQIFDCPRLKFSEIPQRLTALLLPPDPIVINHVISVDPSDQKKTACYDIDVEVEEPLKGQMSSFLLSTANQQEISALDSKIHETIESINQLKIQRDFMLSFSRDPKGYVQDLLRSQSRDLKVMTDVAGNPEEERRAEFYHQPWSQEAVSRYFYCKIQQRRQELEQSLVVRNT

SEQ ID NO: 85443 - protein, 470 aa, Homo sapiens
  Payload ID: 16974
  Gene Symbol: SMARCD3
  Gene Name: SWI/SNF related, matrix associated, actin dependent regulator of chromatin, subfamily d, member 3
  Uniprot ID: Q6STE5
  ENSP ID: ENSP00000349254
MTPGLQHPPTVVQRPGMPSGARMPHQGAPMGPPGSPYMGSPAVRPGLAPAGMEPARKRAAPPPGQSQAQSQGQPVPTAPARSRSAKRRKMADKILPQRIRELVPESQAYMDLLAFERKLDQTIMRKRVDIQEALKRPMKQKRKLRLYISNTFNPAKPDAEDSDGSIASWELRVEGKLLDDPSKQKRKFSSFFKSLVIELDKDLYGPDNHLVEWHRTPTTQETDGFQVKRPGDLSVRCTLLLMLDYQPPQFKLDPRLARLLGLHTQSRSAIVQALWQYVKTNRLQDSHDKEYINGDKYFQQIFDCPRLKFSEIPQRLTALLLPPDPIVINHVISVDPSDQKKTACYDIDVEVEEPLKGQMSSFLLSTANQQEISALDSKIHETIESINQLKIQRDFMLSFSRDPKGYVQDLLRSQSRDLKVMTDVAGNPEEERRAEFYHQPWSQEAVSRYFYCKIQQRRQELEQSLVVRNT

SEQ ID NO: 85444 - protein, 470 aa, Homo sapiens; identical to SEQ ID NO: 85443
  Payload ID: 16974
  Gene Symbol: SMARCD3
  Gene Name: SWI/SNF related, matrix associated, actin dependent regulator of chromatin, subfamily d, member 3
  Uniprot ID: Q6STE5
  ENSP ID: ENSP00000376558

SEQ ID NO: 85445 - protein, 68 aa, Homo sapiens
  Payload ID: 16974
  Gene Symbol: SMARCD3
  Gene Name: SWI/SNF related, matrix associated, actin dependent regulator of chromatin, subfamily d, member 3
  ENSP ID: ENSP00000417145
  MOD_RES (1)..(1): Any amino acid
XRHRARASRCPPPPRGAAVPRGGRWLTKSSLKGFGSWSPSPRLTWTSWHLRGNWIKPSCGSGWTSRRL

SEQ ID NO: 85446 - protein, 73 aa, Homo sapiens
  Payload ID: 16974
  Gene Symbol: SMARCD3
  Gene Name: SWI/SNF related, matrix associated, actin dependent regulator of chromatin, subfamily d, member 3
  ENSP ID: ENSP00000417908
MTLQVQDPAIYDSRSSAPTHRGTVPRGGRWLTKSSLKGFGSWSPSPRLTWTSWHLRGNWIKPSCGSGWTSRRL

SEQ ID NO: 85447 - protein, 139 aa, Homo sapiens
  Payload ID: 16974
  Gene Symbol: SMARCD3
  Gene Name: SWI/SNF related, matrix associated, actin dependent regulator of chromatin, subfamily d, member 3
  ENSP ID: ENSP00000419886
MTPGLQHPPTVVQRPGMPSGARMPHQGAPMGPPGSPYMGSPAVRPGLAPAGMEPARKRAAPPPGQSQAQSQGQPVPTAPARSRSAKRRKMADKILPQRIRELVPESQAYMDLLAFERKLDQTIMRKRVDIQEALKRPMK

SEQ ID NO: 85448 - protein, 411 aa, Homo sapiens
  Payload ID: 16975
  Gene Symbol: SMARCE1
  Gene Name: SWI/SNF related, matrix associated, actin dependent regulator of chromatin, subfamily e, member 1
  Uniprot ID: Q969G3
  ENSP ID: ENSP00000323967
MSKRPSYAPPPTPAPATQMPSTPGFVGYNPYSHLAYNNYRLGGNPGTNSRVTASSGITIPKPPKPPDKPLMPYMRYSRKVWDQVKASNPDLKLWEIGKIIGGMWRDLTDEEKQEYLNEYEAEKIEYNESMKAYHNSPAYLAYINAKSRAEAALEEESRQRQSRMEKGEPYMSIQPAEDPDDYDDGFSMKHTATARFQRNHRLISEILSESVVPDVRSVVTTARMQVLKRQVQSLMVHQRKLEAELLQIEERHQEKKRKFLESTDSFNNELKRLCGLKVEVDMEKIAAEIAQAEEQARKRQEEREKEAAEQAERSQSSIVPEEEQAANKGEEKKDDENIPMETEETHLEETTESQQNGEEGTSTPEDKESGQEGVDSMAEEGTSDSNTGSESNSATVEEPPTDPIPEDEKKE

SEQ ID NO: 85449 - protein, 328 aa, Homo sapiens
  Payload ID: 16975
  Gene Symbol: SMARCE1
  Gene Name: SWI/SNF related, matrix associated, actin dependent regulator of chromatin, subfamily e, member 1
  Uniprot ID: Q969G3
  ENSP ID: ENSP00000367039
MSKRPSYAPPPTPAPATASSGITIPKPPKPPDKPLMPYMRYSRKVWDQVKASNPDLKLWEIGKIIGGMWRDLTDEEKQEYLNEYEAEKIEYNESMKAYHNSPAYLAYINAKSRAEAALEEESRQRQSRMEKGEPYMSIQPAEDPDDYDDGFSMKHTATARFQRNHRLISEILSESVVPDVRSVVTTARMQVLKRQVQSLMVHQRKLEAELLQIEERHQEKKRKFLESTDSFNNELKRLCGLKVEVDMEKIAAEIAQAEEQARKRQEEREKEAAEQAERSQSSIVPEEEQAANKGEEKKDDENIPMETEKNCQLCPRKTLTSRYTDFPD

SEQ ID NO: 85450 - protein, 157 aa, Homo sapiens
  Payload ID: 16975
  Gene Symbol: SMARCE1
  Gene Name: SWI/SNF related, matrix associated, actin dependent regulator of chromatin, subfamily e, member 1
  ENSP ID: ENSP00000392958
LSESVVPDVRSVVTTARMQVLKRQVQSLMVHQRKLEAELLQIEERHQEKKRKFLESTDSFNNELKRLCGLKVEVDMEKIAAEIAQAEEQARKRQEEREKEAAEQAERSQSSIVPEEEQAANKGEEKKDDENIPMETEKNCQLCPRKTLTSRYTDFPD

SEQ ID NO: 85451 - protein, 293 aa, Homo sapiens
  Payload ID: 16975
  Gene Symbol: SMARCE1
  Gene Name: SWI/SNF related, matrix associated, actin dependent regulator of chromatin, subfamily e, member 1
  Uniprot ID: Q969G3
  ENSP ID: ENSP00000411607
MPYMRYSRKVWDQVKASNPDLKLWEIGKIIGGMWRDLTDEEKQEYLNEYEAEKIEYNESMKAYHNSPAYLAYINAKSRAEAALEEESRQRQSRMEKGEPYMSIQPAEDPDDYDDGFSMKHTATARFQRNHRLISEILSESVVPDVRSVVTTARMQVLKRQVQSLMVHQRKLEAELLQIEERHQEKKRKFLESTDSFNNELKRLCGLKVEVDMEKIAAEIAQAEEQARKRQEEREKEAAEQAERSQSSIVPEEEQAANKGEEKKDDENIPMETEKNCQLCPRKTLTSRYTDFPD

SEQ ID NO: 85452 - protein, 393 aa, Homo sapiens
  Payload ID: 16975
  Gene Symbol: SMARCE1
  Gene Name: SWI/SNF related, matrix associated, actin dependent regulator of chromatin, subfamily e, member 1
  ENSP ID: ENSP00000445370
MPSTPGFVGYNPYSHLAYNNYRLGGNPGTNSRVTASSGITIPKPPKPPDKPLMPYMRYSRKVWDQVKASNPDLKLWEIGKIIGGMWRDLTDEEKQEYLNEYEAEKIEYNESMKAYHNSPAYLAYINAKSRAEAALEEESRQRQSRMEKGEPYMSIQPAEDPDDYDDGFSMKHTATARFQRNHRLISEILSESVVPDVRSVVTTARMQVLKRQVQSLMVHQRKLEAELLQIEERHQEKKRKFLESTDSFNNELKRLCGLKVEVDMEKIAAEIAQAEEQARKRQEEREKEAAEQAERSQSSIVPEEEQAANKGEEKKDDENIPMETEETHLEETTESQQNGEEGTSTPEDKESGQEGVDSMAEEGTSDSNTGSESNSATVEEPPTDPIPEDEKKE

SEQ ID NO: 85453 - protein, 55 aa, Homo sapiens
  Payload ID: 16975
  Gene Symbol: SMARCE1
  Gene Name: SWI/SNF related, matrix associated, actin dependent regulator of chromatin, subfamily e, member 1
  ENSP ID: ENSP00000462381
MSKRPSYAPPPTPAPATQMPSTPGFVGYNPYSHLAYNNYRLGGNPGTNSRVTEIS

SEQ ID NO: 85454 - protein, 376 aa, Homo sapiens
  Payload ID: 16975
  Gene Symbol: SMARCE1
  Gene Name: SWI/SNF related, matrix associated, actin dependent regulator of chromatin, subfamily e, member 1
  Uniprot ID: Q969G3
  ENSP ID: ENSP00000462475
MSKRPSYAPPPTPAPATASSGITIPKPPKPPDKPLMPYMRYSRKVWDQVKASNPDLKLWEIGKIIGGMWRDLTDEEKQEYLNEYEAEKIEYNESMKAYHNSPAYLAYINAKSRAEAALEEESRQRQSRMEKGEPYMSIQPAEDPDDYDDGFSMKHTATARFQRNHRLISEILSESVVPDVRSVVTTARMQVLKRQVQSLMVHQRKLEAELLQIEERHQEKKRKFLESTDSFNNELKRLCGLKVEVDMEKIAAEIAQAEEQARKRQEEREKEAAEQAERSQSSIVPEEEQAANKGEEKKDDENIPMETEETHLEETTESQQNGEEGTSTPEDKESGQEGVDSMAEEGTSDSNTGSESNSATVEEPPTDPIPEDEKKE

SEQ ID NO: 85455 - protein, 101 aa, Homo sapiens
  Payload ID: 16975
  Gene Symbol: SMARCE1
  Gene Name: SWI/SNF related, matrix associated, actin dependent regulator of chromatin, subfamily e, member 1
  ENSP ID: ENSP00000462857
MPYMRYSRKVWDQVKASNPDLKLWEIGKIIGGMWRDLTDEEKQEYLNEYEAEKIEYNESMKAYHNSPAYLAYINAKSRAEAALEEESRQRQSRMEKGEPYM

SEQ ID NO: 85456 - protein, 288 aa, Homo sapiens
  Payload ID: 16975
  Gene Symbol: SMARCE1
  Gene Name: SWI/SNF related, matrix associated, actin dependent regulator of chromatin, subfamily e, member 1
  ENSP ID: ENSP00000463216
MQMPSTPGFVGYNPYSHLAYNNYRLGGNPGTNSRVTASSGITIPKPPKPPDKPLMPYMRYSRKVWDQVKASNPDLKLWEIGKIIGGMWRDLTDEEKQEYLNEYEAEKIEYNESMKAYHNSPAYLAYINAKSRAEAALEEESRQRQSRMEKGEPYMSIQPAEDPDDYDDGFSMKHTATARFQRNHRLISEILSESVVPDVRSVVTTARMQVLKRQVQSLMVHQRKLEAELLQIEERHQEKKRKFLESTDSFNNELKRLCGLKVEVDMEKIAAEIAQAEEQARKRQEERE

SEQ ID NO: 85457 - protein, 129 aa, Homo sapiens
  Payload ID: 16975
  Gene Symbol: SMARCE1
  Gene Name: SWI/SNF related, matrix associated, actin dependent regulator of chromatin, subfamily e, member 1
  ENSP ID: ENSP00000463282
MSKRPSYAPPPTPAPATQMPSTPGFVGYNPYSHLAYNNYRLGGNPGTNSRVTASSGITIPKPPKPPDKPLMPYMRYSRKVWDQVKASNPDLKLWEIGKIIGGMWRDLTDEEKQEYLNEYEAEKIEYNES

SEQ ID NO: 85458 - protein, 77 aa, Homo sapiens
  Payload ID: 16975
  Gene Symbol: SMARCE1
  Gene Name: SWI/SNF related, matrix associated, actin dependent regulator of chromatin, subfamily e, member 1
  ENSP ID: ENSP00000463405
MSKRPSYAPPPTPAPATQMPSTPGFVGYNPYSHLAYNNYRLGGNPGTNSRVTVGESTITASGKQLELTRNAFRIRSF

SEQ ID NO: 85459 - protein, 153 aa, Homo sapiens
  Payload ID: 16975
  Gene Symbol: SMARCE1
  Gene Name: SWI/SNF related, matrix associated, actin dependent regulator of chromatin, subfamily e, member 1
  ENSP ID: ENSP00000464061
MPSTPGFVGYNPYSHLAYNNYRLGGNPGTNSRVTASSGITIPKPPKPPDKPLMPYMRYSRKVWDQVKASNPDLKLWEIGKIIGGMWRDLTDEEKQEYLNEYEAEKIEYNESMKAYHNSPAYLAYINAKSRAEAALEEESRQRQSRMEKGEPYM

SEQ ID NO: 85460 - protein, 52 aa, Homo sapiens
  Payload ID: 16975
  Gene Symbol: SMARCE1
  Gene Name: SWI/SNF related, matrix associated, actin dependent regulator of chromatin, subfamily e, member 1
  ENSP ID: ENSP00000464501
MSTNAQHTRVCGIQSIQSSRLQQLQAGREPGHQQPGHGILWYHDSKTPKATR

SEQ ID NO: 85461 - protein, 341 aa, Homo sapiens
  Payload ID: 16975
  Gene Symbol: SMARCE1
  Gene Name: SWI/SNF related, matrix associated, actin dependent regulator of chromatin, subfamily e, member 1
  Uniprot ID: Q969G3
  ENSP ID: ENSP00000464511
MPYMRYSRKVWDQVKASNPDLKLWEIGKIIGGMWRDLTDEEKQEYLNEYEAEKIEYNESMKAYHNSPAYLAYINAKSRAEAALEEESRQRQSRMEKGEPYMSIQPAEDPDDYDDGFSMKHTATARFQRNHRLISEILSESVVPDVRSVVTTARMQVLKRQVQSLMVHQRKLEAELLQIEERHQEKKRKFLESTDSFNNELKRLCGLKVEVDMEKIAAEIAQAEEQARKRQEEREKEAAEQAERSQSSIVPEEEQAANKGEEKKDDENIPMETEETHLEETTESQQNGEEGTSTPEDKESGQEGVDSMAEEGTSDSNTGSESNSATVEEPPTDPIPEDEKKE

SEQ ID NO: 85462 - protein, 177 aa, Homo sapiens
  Payload ID: 16975
  Gene Symbol: SMARCE1
  Gene Name: SWI/SNF related, matrix associated, actin dependent regulator of chromatin, subfamily e, member 1
  ENSP ID: ENSP00000466608
  MOD_RES (1)..(1): Any amino acid
XMKHTATARFQRNHRLISEILSESVVPDVRSVVTTARMQVLKRQVQSLMVHQRKLEAELLQIEERHQEKKRKFLESTDSFNNELKRLCGLKVEVDMEKIAAEIAQAEEQARKRQEEREKEAAEQAERSQSSIVPEEEQAANKGEEKKDDENIPMETEKNCQLCPRKTLTSRYTDFPD

SEQ ID NO: 85463 - protein, 1026 aa, Homo sapiens
  Payload ID: 16976
  Gene Symbol: SMARCAD1
  Gene Name: SWI/SNF-related, matrix-associated actin-dependent regulator of chromatin, subfamily a, containing DEAD/H box 1
  Uniprot ID: Q9H4L7
  ENSP ID: ENSP00000346217
MNLFNLDRFRFEKRNKIEEAPEATPQPSQPGPSSPISLSAEEENAEGEVSRANTPDSDITEKTEDSSVPETPDNERKASISYFKNQRGIQYIDLSSDSEDVVSPNCSNTVQEKTFNKDTVIIVSEPSEDEESQGLPTMARRNDDISELEDLSELEDLKDAKLQTLKELFPQRSDNDLLKLIESTSTMDGAIAAALLMFGDAGGGPRKRKLSSSSEPYEEDEFNDDQSIKKTRLDHGEESNESAESSSNWEKQESIVLKLQKEFPNFDKQELREVLKEHEWMYTEALESLKVFAEDQDMQYVSQSEVPNGKEVSSRSQNYPKNATKTKLKQKFSMKAQNGFNKKRKKNVFNPKRVVEDSEYDSGSDVGSSLDEDYSSGEEVMEDGYKGKILHFLQDASIGELTLIPQCSQKKAQKITELRPFNSWEALFTKMSKTNGLSEDLIWHCKTLIQERDVVIRLMNKCEDISNKLTKQVTMLTGNGGGWNIEQPSILNQSLSLKPYQKVGLNWLALVHKHGLNGILADEMGLGKTIQAIAFLAYLYQEGNNGPHLIVVPASTIDNWLREVNLWCPTLKVLCYYGSQEERKQIRFNIHSRYEDYNVIVTTYNCAISSSDDRSLFRRLKLNYAIFDEGHMLKNMGSIRYQHLMTINANNRLLLTGTPVQNNLLELMSLLNFVMPHMFSSSTSEIRRMFSSKTKSADEQSIYEKERIAHAKQIIKPFILRRVKEEVLKQLPPKKDRIELCAMSEKQEQLYLGLFNRLKKSINNLEKNTEMCNVMMQLRKMANHPLLHRQYYTAEKLKEMSQLMLKEPTHCEANPDLIFEDMEVMTDFELHVLCKQYRHINNFQLDMDLILDSGKFRVLGCILSELKQKGDRVVLFSQFTMMLDILEVLLKHHQHRYLRLDGKTQISERIHLIDEFNTDMDIFVFLLSTKAGGLGINLTSANVVILHDIDCNPYNDKQAEDRCHRVGQTKEVLVIKLISQGTIEESMLKINQQKLKLEQDMTTVDEGDEGSMPADIATLLKTSMGL

SEQ ID NO: 85464 - protein, 1028 aa, Homo sapiens
  Payload ID: 16976
  Gene Symbol: SMARCAD1
  Gene Name: SWI/SNF-related, matrix-associated actin-dependent regulator of chromatin, subfamily a, containing DEAD/H box 1
  Uniprot ID: Q9H4L7
  ENSP ID: ENSP00000351947
MNLFNLDRFRFEKRNKIEEAPEATPQPSQPGPSSPISLSAEEENAEGEVSRANTPDSDITEKTEDSSVPETPDNERKASISYFKNQRGIQYIDLSSDSEDVVSPNCSNTVQEKTFNKDTVIIVSEPSEDEESQGLPTMARRNDDISELEDLSELEDLKDAKLQTLKELFPQRSDNDLLKLIESTSTMDGAIAAALLMFGDAGGGPRKRKLSSSSEPYEEDEFNDDQSIKKTRLDHGEESNESAESSSNWEKQESIVLKLQKEFPNFDKQELREVLKEHEWMYTEALESLKVFAEDQDMQYVSQSEVPNGKEVSSRSQNYPKNATKTKLKQKFSMKAQNGFNKKRKKNVFNPKRVVEDSEYDSGSDVGSSLDEDYSSGEEVMEDGYKGKILHFLQDASIGELTLIPQCSQKKAQKITELRPFNSWEALFTKMSKTNGLSEDLIWHCKTLIQERDVVIRLMNKCEDISNKLTKQVTMLTGNGGGWNIEQPSILNQSLSLKPYQKVGLNWLALVHKHGLNGILADEMGLGKTIQAIAFLAYLYQEGNNGPHLIVVPASTIDNWLREVNLWCPTLKVLCYYGSQEERKQIRFNIHSRYEDYNVIVTTYNCAISSSDDRSLFRRLKLNYAIFDEGHMLKNMGSIRYQHLMTINANNRLLLTGTPVQNNLLELMSLLNFVMPHMFSSSTSEIRRMFSSKTKSADEQSIYEKERIAHAKQIIKPFILRRVKEEVLKQLPPKKDRIELCAMSEKQEQLYLGLFNRLKKSINNLVTEKNTEMCNVMMQLRKMANHPLLHRQYYTAEKLKEMSQLMLKEPTHCEANPDLIFEDMEVMTDFELHVLCKQYRHINNFQLDMDLILDSGKFRVLGCILSELKQKGDRVVLFSQFTMMLDILEVLLKHHQHRYLRLDGKTQISERIHLIDEFNTDMDIFVFLLSTKAGGLGINLTSANVVILHDIDCNPYNDKQAEDRCHRVGQTKEVLVIKLISQGTIEESMLKINQQKLKLEQDMTTVDEGDEGSMPADIATLLKTSMGL

SEQ ID NO: 85465 - protein, 70 aa, Homo sapiens
  Payload ID: 16976
  Gene Symbol: SMARCAD1
  Gene Name: SWI/SNF-related, matrix-associated actin-dependent regulator of chromatin, subfamily a, containing DEAD/H box 1
  ENSP ID: ENSP00000378413
MNLFNLDRFRFEKRNKIEEAPEATPQPSQPGPSSPISLSAEEENAEGEVSRANTPDSDITEKTVSLEGLK

SEQ ID NO: 85466 - protein, 1028 aa, Homo sapiens; identical to SEQ ID NO: 85464
  Payload ID: 16976
  Gene Symbol: SMARCAD1
  Gene Name: SWI/SNF-related, matrix-associated actin-dependent regulator of chromatin, subfamily a, containing DEAD/H box 1
  Uniprot ID: Q9H4L7
  ENSP ID: ENSP00000415576

SEQ ID NO: 85467 - protein, 596 aa, Homo sapiens
  Payload ID: 16976
  Gene Symbol: SMARCAD1
  Gene Name: SWI/SNF-related, matrix-associated actin-dependent regulator of chromatin, subfamily a, containing DEAD/H box 1
  Uniprot ID: Q9H4L7
  ENSP ID: ENSP00000423286
MSKTNGLSEDLIWHCKTLIQERDVVIRLMNKCEDISNKLTKQVTMLTGNGGGWNIEQPSILNQSLSLKPYQKVGLNWLALVHKHGLNGILADEMGLGKTIQAIAFLAYLYQEGNNGPHLIVVPASTIDNWLREVNLWCPTLKVLCYYGSQEERKQIRFNIHSRYEDYNVIVTTYNCAISSSDDRSLFRRLKLNYAIFDEGHMLKNMGSIRYQHLMTINANNRLLLTGTPVQNNLLELMSLLNFVMPHMFSSSTSEIRRMFSSKTKSADEQSIYEKERIAHAKQIIKPFILRRVKEEVLKQLPPKKDRIELCAMSEKQEQLYLGLFNRLKKSINNLEKNTEMCNVMMQLRKMANHPLLHRQYYTAEKLKEMSQLMLKEPTHCEANPDLIFEDMEVMTDFELHVLCKQYRHINNFQLDMDLILDSGKFRVLGCILSELKQKGDRVVLFSQFTMMLDILEVLLKHHQHRYLRLDGKTQISERIHLIDEFNTDMDIFVFLLSTKAGGLGINLTSANVVILHDIDCNPYNDKQAEDRCHRVGQTKEVLVIKLISQGTIEESMLKINQQKLKLEQDMTTVDEGDEGSMPADIATLLKTSMGL

SEQ ID NO: 85468 - protein, 244 aa, Homo sapiens
  Payload ID: 16976
  Gene Symbol: SMARCAD1
  Gene Name: SWI/SNF-related, matrix-associated actin-dependent regulator of chromatin, subfamily a, containing DEAD/H box 1
  ENSP ID: ENSP00000424624
MNLFNLDRFRFEKRNKIEEAPEATPQPSQPGPSSPISLSAEEENAEGEVSRANTPDSDITEKTEDSSVPETPDNERKASISYFKNQRGIQYIDLSSDSEDVVSPNCSNTVQEKTFNKDTVIIVSEPSEDEESQGLPTMARRNDDISELEDLSELEDLKDAKLQTLKELFPQRSDNDLLKLIESTSTMDGAIAAALLMFGDAGGGPRKRKLSSSSEPYEEDEFNDDQSIKKTRLDHCAWAVKVAV

SEQ ID NO: 85469 - protein, 235 aa, Homo sapiens
  Payload ID: 16977
  Gene Symbol: SWI5
  Gene Name: SWI5 homologous recombination repair protein
  Uniprot ID: Q1ZZU3
  ENSP ID: ENSP00000316609
MQRRGQRDLWRHNKSCARNRCPRPPRERGGAGFPWVRAQLSVRQFTLRVRVPGPVHLRGRSPTPALDPLAPLNPLIRGPRTPGLRRWIQSLALLLPNCSSSRIPTVPRPHSGLWVQSDFPLGFLSRTEPRLTRSCRGAFRSPRPLPKSGQADGTSEESLHLDIQKLKEKRDMLDKEISQFVSEGYSVDELEDHITQLHEYNDIKDVGQMLMGKLAVIRGVTTKELYPEFGLDMND

SEQ ID NO: 85470 - protein, 145 aa, Homo sapiens
  Payload ID: 16977
  Gene Symbol: SWI5
  Gene Name: SWI5 homologous recombination repair protein
  ENSP ID: ENSP00000361989
  MOD_RES (1)..(1): Any amino acid
XSLETRDQRTPGGPVWGGRRTEPRLTRSCRGAFRSPFLPATFEKTLYCPHVERPLPKSGQADGTSEESLHLDIQKLKEKRDMLDKEISQFVSEGYSVDELEDHITQLHEYNDIKDVGQMLMGKLAVIRGVTTKELYPEFGLDMND

SEQ ID NO: 85471 - protein, 130 aa, Homo sapiens
  Payload ID: 16977
  Gene Symbol: SWI5
  Gene Name: SWI5 homologous recombination repair protein
  ENSP ID: ENSP00000411469
LDPLAPLNPLIRGPRTPGLRRTEPRLTRSCRGAFRSPRPLPKSGQADGTSEESLHLDIQKLKEKRDMLDKEISQFVSEGYSVDELEDHITQLHEYNDIKDVGQMLMGKLAVIRGVTTKELYPEFGLDMND

SEQ ID NO: 85472 - protein, 139 aa, Homo sapiens
  Payload ID: 16977
  Gene Symbol: SWI5
  Gene Name: SWI5 homologous recombination repair protein
  ENSP ID: ENSP00000419719
MGEGTAGPGPRSLETRDQRTPGGPVWGGRRTEPRLTRSCRGAFRSPRPLPKSGQADGTSEESLHLDIQKLKEKRDMLDKEISQFVSEGYSVDELEDHITQLHEYNDIKDVGQMLMGKLAVIRGVTTKELYPEFGLDMND

SEQ ID NO: 85473 - protein, 170 aa, Homo sapiens
  Payload ID: 16977
  Gene Symbol: SWI5
  Gene Name: SWI5 homologous recombination repair protein
  ENSP ID: ENSP00000476650
LDPLAPLNPLIRGPRTPGLRRWIQSLALLLPNCSSSRIPTVPRPHSGLWVQSDFPLGFLSRTEPRLTRSCRGAFRSPRPLPKSGQADGTSEESLHLDIQKLKEKRDMLDKEISQFVSEGYSVDELEDHITQLHEYNDIKDVGQMLMGKLAVIRGVTTKELYPEFGLDMND

SEQ ID NO: 85474 - protein, 151 aa, Homo sapiens
  Payload ID: 16977
  Gene Symbol: SWI5
  Gene Name: SWI5 homologous recombination repair protein
  ENSP ID: ENSP00000477295
LDPLAPLNPLIRGPRTPGLRRWIQSLALLLPNCSSSRIPTVPRPHSGLWVQSDFPLGFLSRTEPRLTRSCRGAFRSPRPLPKSGQADGTSEESLHLDIQKLKEKRDMLDKEISQFVSEGYSVDELEDHITQLHEYNDIKDVGQMLMGKLGE

SEQ ID NO: 85475 - protein, 245 aa, Homo sapiens
  Payload ID: 16978
  Gene Symbol: SFR1
  Gene Name: SWI5-dependent homologous recombination repair protein 1
  Uniprot ID: Q86XK3
  ENSP ID: ENSP00000358742
MAEGEKNQDFTFKMESPSDSAVVLPSTPQASANPSSPYTNSSRKQPMSATLRERLRKTRFSFNSSYNVVKRLKVESEENDQTFSEKPASSTEENCLEFQESFKHIDSEFEENTNLKNTLKNLNVCESQSLDSGSCSALQNEFVSEKLPKQRLNAEKAKLVKQVQEKEDLLRRLKLVKMYRSKNDLSQLQLLIKKWRSCSQLLLYELQSAVSEENKKLSLTQLIDHYGLDDKLLHYNRSEEEFIDV

SEQ ID NO: 85476 - protein, 232 aa, Homo sapiens
  Payload ID: 16978
  Gene Symbol: SFR1
  Gene Name: SWI5-dependent homologous recombination repair protein 1
  Uniprot ID: Q86XK3
  ENSP ID: ENSP00000358744
MESPSDSAVVLPSTPQASANPSSPYTNSSRKQPMSATLRERLRKTRFSFNSSYNVVKRLKVESEENDQTFSEKPASSTEENCLEFQESFKHIDSEFEENTNLKNTLKNLNVCESQSLDSGSCSALQNEFVSEKLPKQRLNAEKAKLVKQVQEKEDLLRRLKLVKMYRSKNDLSQLQLLIKKWRSCSQLLLYELQSAVSEENKKLSLTQLIDHYGLDDKLLHYNRSEEEFIDV

SEQ ID NO: 85477 - protein, 229 aa, Homo sapiens
  Payload ID: 16979
  Gene Symbol: SWSAP1
  Gene Name: SWIM-type zinc finger 7 associated protein 1
  Uniprot ID: Q6NVH7
  ENSP ID: ENSP00000310008
MPAAGPPLLLLGTPGSGKTALLFAAALEAAGEGQGPVLFLTRRPLQSMPRGTGTTLDPMRLQKIRFQYPPSTRELFRLLCSAHEAPGPAPSLLLLDGLEEYLAEDPEPQEAAYLIALLLDTAAHFSHRLGPGRDCGLMVALQTQEEAGSGDVLHLALLQRYFPAQCWLQPDAPGPGEHGLRACLEPGGLGPRTEWWVTFRSDGEMMIAPWPTQAGDPSSGKGSSSGGQP

SEQ ID NO: 85478 - protein, 900 aa, Homo sapiens
  Payload ID: 16980
  Gene Symbol: SWT1
  Gene Name: SWT1 RNA endoribonuclease homolog
  Uniprot ID: Q5T5J6
  ENSP ID: ENSP00000356470
MSSKESCGKKETSQRKDTTTSSPNFGEKDKKERKTPASSTSSSSIRSVSSEKRKLKSDHTDVLYYNIKRRQGLKRLSVEIDTLRRRPKIGSSSQRPIKLKEASYSNDNQIILQSPSSNGTKKDIHKCVDFKPKDIKLTNAGSKLDHGIKSLSSPKIASDVKPKAEGQASENKWSHLLVQREKMKELKKGRNSKFRDNSEKCVLEKWKRNQFSQDYNSNKIIKEPLGSRRQKISFKIPIKSRDTLQKLVEENVFNIDSNNSKTKQEEREYLESSQVSLNVTRQKTEHLLSDFTYKRTVHEWKRKHHYDHQESNDSHSRENLTQSFEAPCCSVSSESIQDADQEMQIVEELHAARVGKSVDLPGELMSMEIDLEDDVHSSSANNTSDRKLLIVIDTNILMNHLKFVRILKTTEVPGFDKLVLIIPWVVMQELDRMKEGKLLKRAQHKAIPAVHFINDSLKNQDRKLWGQSIQLASQKHYGLSDENNDDRVLKCCLQHQELFPCSFVILCTDDRNLRNKGLISGVKSLSKEELSAELLHLSLNTDVCHQPCIPKQQLKAETTPLKESYKEESTNSGLSILLESIVSDLEKSLGTGLSSILETEMKIAFGNLWMEILYLKPPWTLLHLLQCFKKHWLAVFGLVMEKNLLLTIESLYKNLRKANKAVDFTTVKFLLQDSRSLLHAFSTRSNYDGILPQTFAQVNNLLQTFAEVKTKLKPNSSENTVTKKQEGTSLKNSHNQEITVFSSSHLPQPSRHQEIWSILESVWITIYQNSTDVFQRLGSNSALTTSNIASFEEAFICLQKLMAAVRDILEGIQRILAPNSNYQDVETLYNFLIKYEVNKNVKFTAQEIYDCVSQTEYREKLTIGCRQLVEMEYTMQQCNASVYMEAKNRGWCEDMLNYRI

SEQ ID NO: 85479 - protein, 900 aa, Homo sapiens; identical to SEQ ID NO: 85478
  Payload ID: 16980
  Gene Symbol: SWT1
  Gene Name: SWT1 RNA endoribonuclease homolog
  Uniprot ID: Q5T5J6
  ENSP ID: ENSP00000356471

SEQ ID NO: 85480 - protein, 159 aa, Homo sapiens
  Payload ID: 16980
  Gene Symbol: SWT1
  Gene Name: SWT1 RNA endoribonuclease homolog
  ENSP ID: ENSP00000401413
MSSKESCGKKETSQRKDTTTSSPNFGEKDKKERKTPASSTSSSSIRSVSSEKRKLKSDHTDVLYYNIKRRQGLKRLSVEIDTLRRRPKIGSSSQRPIKLKEASYSNDNQIILQSPSSNGTKKDIHKCVDFKPKDIKLTNAGSKLDHGIKSLSSPKIASD

SEQ ID NO: 85481 - protein, 243 aa, Homo sapiens
  Payload ID: 16981
  Gene Symbol: SYF2
  Gene Name: SYF2 pre-mRNA-splicing factor
  Uniprot ID: O95926
  ENSP ID: ENSP00000236273
MAAIAASEVLVDSAEEGSLAAAAELAAQKREQRLRKFRELHLMRNEARKLNHQEVVEEDKRLKLPANWEAKKARLEWELKEEEKKKECAARGEDYEKVKLLEISAEDAERWERKKKRKNPDLGFSDYAAAQLRQYHRLTKQIKPDMETYERLREKHGEEFFPTSNSLLHGTHVPSTEEIDRMVIDLEKQIEKRDKYSRRRPYNDDADIDYINERNAKFNKKAERFYGKYTAEIKQNLERGTAV

SEQ ID NO: 85482 - protein, 201 aa, Homo sapiens
  Payload ID: 16981
  Gene Symbol: SYF2
  Gene Name: SYF2 pre-mRNA-splicing factor
  Uniprot ID: O95926
  ENSP ID: ENSP00000346330
MAAIAASEVLVDSAEEGSLAAAAELAAQKREQRLRKFRELHLMRECAARGEDYEKVKLLEISAEDAERWERKKKRKNPDLGFSDYAAAQLRQYHRLTKQIKPDMETYERLREKHGEEFFPTSNSLLHGTHVPSTEEIDRMVIDLEKQIEKRDKYSRRRPYNDDADIDYINERNAKFNKKAERFYGKYTAEIKQNLERGTAV

SEQ ID NO: 85483 - protein, 1274 aa, Homo sapiens
  Payload ID: 16982
  Gene Symbol: SYMPK
  Gene Name: symplekin
  Uniprot ID: Q92797
  ENSP ID: ENSP00000245934
MASGSGDSVTRRSVASQFFTQEEGPGIDGMTTSERVVDLLNQAALITNDSKITVLKQVQELIINKDPTLLDNFLDEIIAFQADKSIEVRKFVIGFIEEACKRDIELLLKLIANLNMLLRDENVNVVKKAILTMTQLYKVALQWMVKSRVISELQEACWDMVSAMAGDIILLLDSDNDGIRTHAIKFVEGLIVTLSPRMADSEIPRRQEHDISLDRIPRDHPYIQYNVLWEEGKAALEQLLKFMVHPAISSINLTTALGSLANIARQRPMFMSEVIQAYETLHANLPPTLAKSQVSSVRKNLKLHLLSVLKHPASLEFQAQITTLLVDLGTPQAEIARNMPSSKDTRKRPRDDSDSTLKKMKLEPNLGEDDEDKDLEPGPSGTSKASAQISGQSDTDITAEFLQPLLTPDNVANLVLISMVYLPEAMPASFQAIYTPVESAGTEAQIKHLARLMATQMTAAGLGPGVEQTKQCKEEPKEEKVVKTESVLIKRRLSAQGQAISVVGSLSSMSPLEEEAPQAKRRPEPIIPVTQPRLAGAGGRKKIFRLSDVLKPLTDAQVEAMKLGAVKRILRAEKAVACSGAAQVRIKILASLVTQFNSGLKAEVLSFILEDVRARLDLAFAWLYQEYNAYLAAGASGSLDKYEDCLIRLLSGLQEKPDQKDGIFTKVVLEAPLITESALEVVRKYCEDESRTYLGMSTLRDLIFKRPSRQFQYLHVLLDLSSHEKDKVRSQALLFIKRMYEKEQLREYVEKFALNYLQLLVHPNPPSVLFGADKDTEVAAPWTEETVKQCLYLYLALLPQNHKLIHELAAVYTEAIADIKRTVLRVIEQPIRGMGMNSPELLLLVENCPKGAETLVTRCLHSLTDKVPPSPELVKRVRDLYHKRLPDVRFLIPVLNGLEKKEVIQALPKLIKLNPIVVKEVFNRLLGTQHGEGNSALSPLNPGELLIALHNIDSVKCDMKSIIKATNLCFAERNVYTSEVLAVVMQQLMEQSPLPMLLMRTVIQSLTMYPRLGGFVMNILSRLIMKQVWKYPKVWEGFIKCCQRTKPQSFQVILQLPPQQLGAVFDKCPELREPLLAHVRSFTPHQQAHIPNSIMTILEASGKQEPEAKEAPAGPLEEDDLEPLTLAPAPAPRPPQDLIGLRLAQEKALKRQLEEEQKLKPGGVGAPSSSSPSPSPSARPGPPPSEEAMDFREEGPECETPGIFISMDDDSGLTEAALLDSSLEGPLPKETAAGGLTLKEERSPQTLAPVGEDAMKTPSPAAEDAREPEAKGNS

SEQ ID NO: 85484 - protein, 142 aa, Homo sapiens
  Payload ID: 16982
  Gene Symbol: SYMPK
  Gene Name: symplekin
  ENSP ID: ENSP00000469296
MASGSGDSVTRRSVASQFFTQEEGPGIDGMTTSERVVDLLNQAALITNDSKITVLKQVQELIINKDPTLLDNFLDEIIAFQADKSIEVRKFVIGFIEEACKRDIELLLKLIANLNMLLRDENVNVVKKAILTMTQLYKVALQ

SEQ ID NO: 85485 - protein, 95 aa, Homo sapiens
  Payload ID: 16982
  Gene Symbol: SYMPK
  Gene Name: symplekin
  ENSP ID: ENSP00000470957
  MOD_RES (1)..(1): Any amino acid
XPRLGGFVMNILSRLIMKQVWKYPKVWEGFIKCCQRTKPQSFQVILQLPPQQLGAVFDKCPELREPLLAHVRSFTPHQSCPQRPLPALHPASSHP

SEQ ID NO: 85486 - protein, 50 aa, Homo sapiens
  Payload ID: 16982
  Gene Symbol: SYMPK
  Gene Name: symplekin
  ENSP ID: ENSP00000470977
MASGSGDSVTRRSVASQFFTQEEGPGIDGMTTSERVVDLLNQAALITNDS

SEQ ID NO: 85487 - protein, 137 aa, Homo sapiens
  Payload ID: 16982
  Gene Symbol: SYMPK
  Gene Name: symplekin
  ENSP ID: ENSP00000471694
MASGSGDSVTRRSVASQFFTQEEGPGIDGMTTSERVVDLLNQAALITNDSKITVLKQVQELIINKDPTLLDNFLDEIIAFQADKSIEVRKFVIGFIEEACKRDIELLLKLIANLNMLLRDENVNVVKKAILTMTQLY

SEQ ID NO: 85488 - protein, 115 aa, Homo sapiens
  Payload ID: 16982
  Gene Symbol: SYMPK
  Gene Name: symplekin
  ENSP ID: ENSP00000471770
MASGSGDSVTRRSVASQFFTQEEGPGIDGMTTSERVVDLLNQAALITNDSKITVLKQVQELIINKDPTLLDNFLDEIIAFQADKSIEVRKFVIGFIEEACKRDIELLLKLIANLN

SEQ ID NO: 85489 - protein, 673 aa, Homo sapiens
  Payload ID: 16982
  Gene Symbol: SYMPK
  Gene Name: symplekin
  ENSP ID: ENSP00000473136
MASGSGDSVTRRSVASQFFTQEEGPGIDGMTTSERVVDLLNQAALITNDSKITVLKQVQELIINKDPTLLDNFLDEIIAFQADKSIEVRKFVIGFIEEACKRDIELLLKLIANLNMLLRDENVNVVKKAILTMTQLYKVALQWMVKSRVISELQEACWDMVSAMAGDIILLLDSDNDGIRTHAIKFVEGLIVTLSPRMADSEIPRRQEHDISLDRIPRDHPYIQYNVLWEEGKAALEQLLKFMVHPAISSINLTTALGSLANIARQRPMFMSEVIQAYETLHANLPPTLAKSQVSSVRKNLKLHLLSVLKHPASLEFQAQITTLLVDLGTPQAEIARNMPSSKDTRKRPRDDSDSTLKKMKLEPNLGEDDEDKDLEPGPSGTSKASAQISGQSDTDITAEFLQPLLTPDNVANLVLISMVYLPEAMPASFQAIYTPVESAGTEAQIKHLARLMATQMTAAGLGPGVEQTKQCKEEPKEEKVVKTESVLIKRRLSAQGQAISVVGSLSSMSPLEEEAPQAKRRPEPIIPVTQPRLAGAGGRKKIFRLSDVLKPLTDAQVEAMKLGAVKRILRAEKAVACSGAAQVRIKILASLVTQFNSGLKAEVLSFILEDVRARLDLAFAWLYQEYNAYLAAGSSPRLCWRRHSSQRVPWRWSASTARMRVAPIWACPHFET

SEQ ID NO: 85490 - protein, 1058 aa, Homo sapiens
  Payload ID: 16982
  Gene Symbol: SYMPK
  Gene Name: symplekin
  ENSP ID: ENSP00000478599
MASGSGDSVTRRSVASQFFTQEEGPGIDGMTTSERVVDLLNQAALITNDSKITVLKQVQELIINKDPTLLDNFLDEIIAFQADKSIEVRKFVIGFIEEACKRDIELLLKLIANLNMLLRDENVNVVKKAILTMTQLYKVALQWMVKSRVISELQEACWDMVSAMAGDIILLLDSDNDGIRTHAIKFVEGLIVTLSPRMADSEIPRRQEHDISLDRIPRDHPYIQYNVLWEEGKAALEQLLKFMVHPAISSINLTTALGSLANIARQRPMFMSEVIQAYETLHANLPPTLAKSQVSSVRKNLKLHLLSVLKHPASLEFQAQITTLLVDLGTPQAEIARNMPSSKDTRKRPRDDSDSTLKKMKLEPNLGEDDEDKDLEPGPSGTSKASAQISGQSDTDITAEFLQPLLTPDNVANLVLISMVYLPEAMPASFQAIYTPVESAGTEAQIKHLARLMATQMTAAGLGPGVEQTKQCKEEPKEEKVVKTESVLIKRRLSAQGQAISVVGSLSSMSPLEEEAPQAKRRPEPIIPVTQPRLAGAGGRKKIFRLSDVLKPLTDAQVEAMKLGAVKRILRAEKAVACSGAAQVRIKILASLVTQFNSGLKAEVLSFILEDVRARLDLAFAWLYQEYNAYLAAGASGSLDKYEDCLIRLLSGLQEKPDQKDGIFTKVVLEAPLITESALEVVRKYCEDESRTYLGMSTLRDLIFKRPSRQFQYLHVLLDLSSHEKDKVRSQALLFIKRMYEKEQLREYVEKFALNYLQLLVHPNPPSVLFGADKDTEVAAPWTEETVKQCLYLYLALLPQNHKLIHELAAVYTEAIADIKRTVLRVIEQPIRGMGMNSPELLLLVENCPKGAETLVTRCLHSLTDKVPPSPELVKRVRDLYHKRLPDVRFLIPVLNGLEKKEVIQALPKLIKLNPIVVKEVFNRLLGTQHGEGNSALSPLNPGELLIALHNIDSVKCDMKSIIKGEALPPHSSGLAPATPGQDLSHPHAPTGICQVKDCHSQPHLRALESHLPPSLLFLPPLPSLPPSLLLPSSQVLPFTTHLFLPLMYLLCPGTEWA

SEQ ID NO: 85491 - protein, 1058 aa, Homo sapiens; identical to SEQ ID NO: 85490
  Payload ID: 16982
  Gene Symbol: SYMPK
  Gene Name: symplekin
  ENSP ID: ENSP00000479480

SEQ ID NO: 85492 - protein, 352 aa, Homo sapiens
  Payload ID: 16983
  Gene Symbol: SYAP1
  Gene Name: synapse associated protein 1
  Uniprot ID: Q96A49
  ENSP ID: ENSP00000369500
MFRGLSSWLGLQQPVAGGGQPNGDAPPEQPSETVAESAEEELQQAGDQELLHQAKDFGNYLFNFASAATKKITESVAETAQTIKKSVEEGKIDGIIDKTIIGDFQKEQKKFVEEQHTKKSEAAVPPWVDTNDEETIQQQILALSADKRNFLRDPPAGVQFNFDFDQMYPVALVMLQEDELLSKMRFALVPKLVKEEVFWRNYFYRVSLIKQSAQLTALAAQQQAAGKEEKSNGREQDLPLAEAVRPKTPPVVIKSQLKTQEDEEEISTSPGVSEFVSDAFDACNLNQEDLRKEMEQLVLDKKQEETAVLEEDSADWEKELQQELQEYEVVTESEKRDENWDKEIEKMLQEEN

SEQ ID NO: 85493 - protein, 735 aa, Homo sapiens
  Payload ID: 16984
  Gene Symbol: SYDE1
  Gene Name: synapse defective 1, Rho GTPase, homolog 1 (C. elegans)
  Uniprot ID: Q6ZW31
  ENSP ID: ENSP00000341489
MAEPLLRKTFSRLRGREKLPRKKSDAKERGHPAQRPEPSPPEPEPQAPEGSQAGAEGPSSPEASRSPARGAYLQSLEPSSRRWVLGGAKPAEDTSLGPGVPGTGEPAGEIWYNPIPEEDPRPPAPEPPGPQPGSAESEGLAPQGAAPASPPTKASRTKSPGPARRLSIKMKKLPELRRRLSLRGPRAGRERERAAPAGSVISRYHLDSSVGGPGPAAGPGGTRSPRAGYLSDGDSPERPAGPPSPTSFRPYEVGPAARAPPAALWGRLSLHLYGLGGLRPAPGATPRDLCCLLQVDGEARARTGPLRGGPDFLRLDHTFHLELEAARLLRALVLAWDPGVRRHRPCAQGTVLLPTVFRGCQAQQLAVRLEPQGLLYAKLTLSEQQEAPATAEPRVFGLPLPLLVERERPPGQVPLIIQKCVGQIERRGLRVVGLYRLCGSAAVKKELRDAFERDSAAVCLSEDLYPDINVITGILKDYLRELPTPLITQPLYKVVLEAMARDPPNRVPPTTEGTRGLLSCLPDVERATLTLLLDHLRLVSSFHAYNRMTPQNLAVCFGPVLLPARQAPTRPRARSSGPGLASAVDFKHHIEVLHYLLQSWPDPRLPRQSPDVAPYLRPKRQPPLHLPLADPEVVTRPRGRGGPESPPSNRYAGDWSVCGRDFLPCGRDFLSGPDYDHVTGSDSEDEDEEVGEPRVTGDFEDDFDAPFNPHLNLKDFDALILDLERELSKQINVCL

SEQ ID NO: 85494 - protein, 392 aa, Homo sapiens
  Payload ID: 16984
  Gene Symbol: SYDE1
  Gene Name: synapse defective 1, Rho GTPase, homolog 1 (C. elegans)
  ENSP ID: ENSP00000469489
MKLQSTPGSGPLVSSGCQAQQLAVRLEPQGLLYAKLTLSEQQEAPATAEPRVFGLPLPLLVERERPPGQVPLIIQKCVGQIERRGLRVVGLYRLCGSAAVKKELRDAFERDSAAVCLSEDLYPDINVITGILKDYLRELPTPLITQPLYKVVLEAMARDPPNRVPPTTEGTRGLLSCLPDVERATLTLLLDHLRLVSSFHAYNRMTPQNLAVCFGPVLLPARQAPTRPRARSSGPGLASAVDFKHHIEVLHYLLQSWPDPRLPRQSPDVAPYLRPKRQPPLHLPLADPEVVTRPRGRGGPESPPSNRYAGDWSVCGRDFLPCGRDFLSGPDYDHVTGSDSEDEDEEVGEPRVTGDFEDDFDAPFNPHLNLKDFDALILDLERELSKQINVCL

SEQ ID NO: 85495 - protein, 668 aa, Homo sapiens
  Payload ID: 16984
  Gene Symbol: SYDE1
  Gene Name: synapse defective 1, Rho GTPase, homolog 1 (C. elegans)
  Uniprot ID: Q6ZW31
  ENSP ID: ENSP00000470733
MAEPLLRKTFSRLRGREKLPRKKSDAKERGPGVPGTGEPAGEIWYNPIPEEDPRPPAPEPPGPQPGSAESEGLAPQGAAPASPPTKASRTKSPGPARRLSIKMKKLPELRRRLSLRGPRAGRERERAAPAGSVISRYHLDSSVGGPGPAAGPGGTRSPRAGYLSDGDSPERPAGPPSPTSFRPYEVGPAARAPPAALWGRLSLHLYGLGGLRPAPGATPRDLCCLLQVDGEARARTGPLRGGPDFLRLDHTFHLELEAARLLRALVLAWDPGVRRHRPCAQGTVLLPTVFRGCQAQQLAVRLEPQGLLYAKLTLSEQQEAPATAEPRVFGLPLPLLVERERPPGQVPLIIQKCVGQIERRGLRVVGLYRLCGSAAVKKELRDAFERDSAAVCLSEDLYPDINVITGILKDYLRELPTPLITQPLYKVVLEAMARDPPNRVPPTTEGTRGLLSCLPDVERATLTLLLDHLRLVSSFHAYNRMTPQNLAVCFGPVLLPARQAPTRPRARSSGPGLASAVDFKHHIEVLHYLLQSWPDPRLPRQSPDVAPYLRPKRQPPLHLPLADPEVVTRPRGRGGPESPPSNRYAGDWSVCGRDFLPCGRDFLSGPDYDHVTGSDSEDEDEEVGEPRVTGDFEDDFDAPFNPHLNLKDFDALILDLERELSKQINVCL

SEQ ID NO: 85496 - protein, 190 aa, Homo sapiens
  Payload ID: 16984
  Gene Symbol: SYDE1
  Gene Name: synapse defective 1, Rho GTPase, homolog 1 (C. elegans)
  ENSP ID: ENSP00000471553
  MOD_RES (1)..(1): Any amino acid
XTLSEQQEAPATAEPRVFGLPLPLLVERERPPGQVPLIIQKCVGQIERRGLRVVGLYRLCGSAAVKKELRDAFERDSAAVCLSEDLYPDINVITGHADASPGPPAPRLLLPCLQPHDPTELGRVLRACAAAGTPGAHKASCPQLRPRPCQCSGLQAPHRGAALPAAVLARSPPAPTISRCRALLATQTTA

SEQ ID NO: 85497 - protein, 170 aa, Homo sapiens
  Payload ID: 16984
  Gene Symbol: SYDE1
  Gene Name: synapse defective 1, Rho GTPase, homolog 1 (C. elegans)
  ENSP ID: ENSP00000473151
MAEPLLRKTFSRLRGREKLPRKKSDAKERGHPAQRPEPSPPEPEPQAPEGSQAGAEGPSSPEASRSPARGAYLQSLEPSSRRWVLGGAKPAEDTSLGPGVPGTGEPAGEIWYNPIPEEDPRPPAPEPPGPQPGSAESEGLAPQGKNKLPIPFPKVSTSSTSLPFRVAPAS

SEQ ID NO: 85498 - protein, 1194 aa, Homo sapiens
  Payload ID: 16985
  Gene Symbol: SYDE2
  Gene Name: synapse defective 1, Rho GTPase, homolog 2 (C. elegans)
  Uniprot ID: Q5VT97
  ENSP ID: ENSP00000340594
MHDLPPDSGARRGGRGLADHSFPAGARAPGQPPSRGAAYRRACPRDGERGGGGRPRQQVSPPRSPQREPRGGQLRTPRMRPSCSRSLESLRVGAKPPPFQRWPSDSWIRCGAHRDWDEPPPRGGRMDGWSGDRARAAAPTGLQPPGCKDHGCSSGSPFRDPAGSSVIRSGKGDRQEGPSFLRPPAVTVKKLQKWMYKGRLLSLGMKGRARGTAPKVTGTQAASPNVGALKVRENRVLSVPPDQRITLTDLFENAYGSSMKGRELEELKDNIEFRGHKPLNSITVSKKRNWLYQSTLRPLNLEEENKKCQDRSHLSISPVSLPKHQLSQSFLKSSKEYCTYVVCNATNSSLSKNCALDFNEENDADDEGEIWYNPIPEDDDLGISSALSFGEADSAVLKLPAVNLSMLSGSDLMKAERHTEDSLCSSEHAGDIQTTRSNGMNPIHPAHSTEFVQQYKQKLGHKTQEGIMVEDSPMLKSPFAGSGILAATNSTELGIMEPSSPNPSPVKKGSSINWSLPDKIKSPRTVRKLSMKMKKLPEFSRKLSVKGTLNYINSPDNTPSLSKYNCREVHHTDILPSGNTTTAAKRNVISRYHLDTSVSSQQSYQKKNSMSSKYSCKGGYLSDGDSPELTTKASKHGSENKFGKGKEIISNSCSKNEIDIDAFRHYSFSDQPKCSQYISGLMSVHFYGAEDLKPPRIDSKDVFCAIQVDSVNKARTALLTCRTTFLDMDHTFNIEIENAQHLKLVVFSWEPTPRKNRVCCHGTVVLPTLFRVTKTHQLAVKLEPRGLIYVKVTLMEQWENSLHGLDINQEPIIFGVDIQKVVEKENIGLMVPLLIQKCIMEIEKRGCQVVGLYRLCGSAAVKKELREAFERDSKAVGLCENQYPDINVITGVLKDYLRELPSPLITKQLYEAVLDAMAKSPLKMSSNGCENDPGDSKYTVDLLDCLPEIEKATLKMLLDHLKLVASYHEVNKMTCQNLAVCFGPVLLSQRQEPSTHNNRVFTDSEELASALDFKKHIEVLHYLLQLWPVQRLTVKKSTDNLFPEQKSSLNYLRQKKERPHMLNLSGTDSSGVLRPRQNRLDSPLSNRYAGDWSSCGENYFLNTKENLNDVDYDDVPSEDRKIGENYSKMDGPEVMIEQPIPMSKECTFQTYLTMQTVESTVDRKNNLKDLQESIDTLIGNLERELNKNKLNMSF

SEQ ID NO: 85499 - protein, 258 aa, Homo sapiens
  Payload ID: 16986
  Gene Symbol: SYNDIG1
  Gene Name: synapse differentiation inducing 1
  Uniprot ID: Q9H7V2
  ENSP ID: ENSP00000366058
MDGIIEQKSMLVHSKISDAGKRNGLINTRNLMAESRDGLVSVYPAPQYQSHRVGASTVPASLDSSRSEPMQQLLDPNTLQQSVESRYRPNIILYSEGVLRSWGDGVAADCCETTFIEDRSPTKDSLEYPDGKFIDLSADDIKIHTLSYDVEEEEEFQELESDYSSDTESEDNFLMMPPRDHLGLSVFSMLCCFWPLGIAAFYLSHETNKAVAKGDLHQASTSSRRALFLAVLSITIGTGVYVGVAVALIAYLSKNNHL

SEQ ID NO: 85500 - protein, 238 aa, Homo sapiens
  Payload ID: 16987
  Gene Symbol: SYNDIG1L
  Gene Name: synapse differentiation inducing 1-like
  Uniprot ID: A6NDD5
  ENSP ID: ENSP00000331474
MESLSELQNPLLPRSPAHLHGPYPYPETPPSWSCQEKLYSYLLGGAGPAGAHQLLDPGSLQLAVEAWYRPSCLLGRDKVKEPRAGSCETSFTEDREPQEGPPEQPTGPGQAAENVTIQTVSYGVQEELRDQEDDQEEEESDATSTESESEDNFLTLPPRDHLGLTLFSMLCCFWPLGIAAFYFSQGTSKAISKGDFRLASTTSRRALFLATLAIAVGAGLYVAVVVALAAYMSQNGHG

SEQ ID NO: 85501 - protein, 238 aa, Homo sapiens; identical to SEQ ID NO: 85500
  Payload ID: 16987
  Gene Symbol: SYNDIG1L
  Gene Name: synapse differentiation inducing 1-like
  Uniprot ID: A6NDD5
  ENSP ID: ENSP00000450439

SEQ ID NO: 85502 - protein, 80 aa, Homo sapiens
  Payload ID: 16987
  Gene Symbol: SYNDIG1L
  Gene Name: synapse differentiation inducing 1-like
  ENSP ID: ENSP00000451519
MESLSELQNPLLPRSPAHLHGPYPYPETPPSWSCQEKLYSYLLGGAGPAGAHQLLDPGSLQLAVEAWYRPSCLLGRDKVK

SEQ ID NO: 85503 - protein, 705 aa, Homo sapiens
  Payload ID: 16988
  Gene Symbol: SYN1
  Gene Name: synapsin I
  Uniprot ID: P17600
  ENSP ID: ENSP00000295987
MNYLRRRLSDSNFMANLPNGYMTDLQRPQPPPPPPGAHSPGATPGPGTATAERSSGVAPAASPAAPSPGSSGGGGFFSSLSNAVKQTTAAAAATFSEQVGGGSGGAGRGGAASRVLLVIDEPHTDWAKYFKGKKIHGEIDIKVEQAEFSDLNLVAHANGGFSVDMEVLRNGVKVVRSLKPDFVLIRQHAFSMARNGDYRSLVIGLQYAGIPSVNSLHSVYNFCDKPWVFAQMVRLHKKLGTEEFPLIDQTFYPNHKEMLSSTTYPVVVKMGHAHSGMGKVKVDNQHDFQDIASVVALTKTYATAEPFIDAKYDVRVQKIGQNYKAYMRTSVSGNWKTNTGSAMLEQIAMSDRYKLWVDTCSEIFGGLDICAVEALHGKDGRDHIIEVVGSSMPLIGDHQDEDKQLIVELVVNKMAQALPRQRQRDASPGRGSHGQTPSPGALPLGRQTSQQPAGPPAQQRPPPQGGPPQPGPGPQRQGPPLQQRPPPQGQQHLSGLGPPAGSPLPQRLPSPTSAPQQPASQAAPPTQGQGRQSRPVAGGPGAPPAARPPASPSPQRQAGPPQATRQTSVSGPAPPKASGAPPGGQQRQGPPQKPPGPAGPTRQASQAGPVPRTGPPTTQQPRPSGPGPAGRPKPQLAQKPSQDVPPPATAAAGGPPHPQLNKSQSLTNAFNLPEPAPPRPSLSQDEVKAETIRSLRKSFASLFSD

SEQ ID NO: 85504 - protein, 669 aa, Homo sapiens
  Payload ID: 16988
  Gene Symbol: SYN1
  Gene Name: synapsin I
  Uniprot ID: P17600
  ENSP ID: ENSP00000343206
MNYLRRRLSDSNFMANLPNGYMTDLQRPQPPPPPPGAHSPGATPGPGTATAERSSGVAPAASPAAPSPGSSGGGGFFSSLSNAVKQTTAAAAATFSEQVGGGSGGAGRGGAASRVLLVIDEPHTDWAKYFKGKKIHGEIDIKVEQAEFSDLNLVAHANGGFSVDMEVLRNGVKVVRSLKPDFVLIRQHAFSMARNGDYRSLVIGLQYAGIPSVNSLHSVYNFCDKPWVFAQMVRLHKKLGTEEFPLIDQTFYPNHKEMLSSTTYPVVVKMGHAHSGMGKVKVDNQHDFQDIASVVALTKTYATAEPFIDAKYDVRVQKIGQNYKAYMRTSVSGNWKTNTGSAMLEQIAMSDRYKLWVDTCSEIFGGLDICAVEALHGKDGRDHIIEVVGSSMPLIGDHQDEDKQLIVELVVNKMAQALPRQRQRDASPGRGSHGQTPSPGALPLGRQTSQQPAGPPAQQRPPPQGGPPQPGPGPQRQGPPLQQRPPPQGQQHLSGLGPPAGSPLPQRLPSPTSAPQQPASQAAPPTQGQGRQSRPVAGGPGAPPAARPPASPSPQRQAGPPQATRQTSVSGPAPPKASGAPPGGQQRQGPPQKPPGPAGPTRQASQAGPVPRTGPPTTQQPRPSGPGPAGRPKPQLAQKPSQDVPPPATAAAGGPPHPQLKASPAQAQP

SEQ ID NO: 85505 - protein, 221 aa, Homo sapiens
  Payload ID: 16989
  Gene Symbol: SYN2
  Gene Name: synapsin II
  ENSP ID: ENSP00000480038
  MOD_RES (1)..(1): Any amino acid
XLTLPTFPVVVKIGHAHSGMGKVKVENHYDFQDIASVVALTQTYATAEPFIDSKYDIRVQKIGNNYKAYMRTSISGNWKTNTGSAMLEQIAMSDRYKLWVDTCSEMFGGLDICAVKAVHGKDGKDYIFEVMDCSMPLIGEHQVEDRQLITELVISKMNQLLSRTPALSPQRPLTTQQPQSGTLKDPDSSKTPPQRPPPQGCLQYILDCNGIAVGPKQVQAS

SEQ ID NO: 85506 - protein, 582 aa, Homo sapiens
  Payload ID: 16989
  Gene Symbol: SYN2
  Gene Name: synapsin II
  ENSP ID: ENSP00000480050
MMNFLRRRLSDSSFIANLPNGYMTDLQRPEPQQPPPPPPPGPGAASASAAPPTASPGPERRPPPASAPAPQPAPTPSVGSSFFSSLSQAVKQTAASAGLVDAPAPAPAAARKAKVLLVVDEPHADWAKCFRGKKVLGDYDIKVEQAEFSELNLVAHADGTYAVDMQVLRNGTKVVRSFRPDFVLIRQHAFGMAENEDFRHLIIGMQYAGLPSINSLESIYNFCDKPWVFAQLVAIYKTLGGEKFPLIEQTYYPNHKEMLTLPTFPVVVKIGHAHSGMGKVKVENHYDFQDIASVVALTQTYATAEPFIDSKYDIRVQKIGNNYKAYMRTSISGNWKTNTGSAMLEQIAMSDRYKLWVDTCSEMFGGLDICAVKAVHGKDGKDYIFEVMDCSMPLIGEHQVEDRQLITELVISKMNQLLSRTPALSPQRPLTTQQPQSGTLKDPDSSKTPPQRPPPQGGPGQPQGMQPPGKVLPPRRLPPGPSLPPSSSSSSSSSSSAPQRPGGPTTHGDAPSSSSSLAEAQPPLAAPPQKPQPHPQLNKSQSLTNAFSFSESSFFRSSANEDEAKAETIRSLRKSFASLFSD

SEQ ID NO: 85507 - protein, 478 aa, Homo sapiens
  Payload ID: 16989
  Gene Symbol: SYN2
  Gene Name: synapsin II
  ENSP ID: ENSP00000484916
MMNFLRRRLSDSSFIANLPNGYMTDLQRPEPQQPPPPPPPGPGAASASAAPPTASPGPERRPPPASAPAPQPAPTPSVGSSFFSSLSQAVKQTAASAGLVDAPAPAPAAARKAKVLLVVDEPHADWAKCFRGKKVLGDYDIKVEQAEFSELNLVAHADGTYAVDMQVLRNGTKVVRSFRPDFVLIRQHAFGMAENEDFRHLIIGMQYAGLPSINSLESIYNFCDKPWVFAQLVAIYKTLGGEKFPLIEQTYYPNHKEMLTLPTFPVVVKIGHAHSGMGKVKVENHYDFQDIASVVALTQTYATAEPFIDSKYDIRVQKIGNNYKAYMRTSISGNWKTNTGSAMLEQIAMSDRYKLWVDTCSEMFGGLDICAVKAVHGKDGKDYIFEVMDCSMPLIGEHQVEDRQLITELVISKMNQLLSRTPALSPQRPLTTQQPQSGTLKDPDSSKTPPQRPPPQGCLQYILDCNGIAVGPKQVQAS

SEQ ID NO: 85508 - protein, 323 aa, Homo sapiens [sequence omitted]

SEQ ID NO: 85509 - protein, 580 aa, Homo sapiens
  Payload ID: 16990
  Gene Symbol: SYN3
  Gene Name: synapsin III
  Uniprot ID: O14994
  ENSP ID: ENSP00000351614
MNFLRRRLSDSSFMANLPNGYMTDLQRPDSSTSSPASPAMERRHPQPLAASFSSPGSSLFSSLSSAMKQAPQATSGLMEPPGPSTPIVQRPRILLVIDDAHTDWSKYFHGKKVNGEIEIRVEQAEFSELNLAAYVTGGCMVDMQVVRNGTKVVSRSFKPDFILVRQHAYSMALGEDYRSLVIGLQYGGLPAVNSLYSVYNFCSKPWVFSQLIKIFHSLGPEKFPLVEQTFFPNHKPMVTAPHFPVVVKLGHAHAGMGKIKVENQLDFQDITSVVAMAKTYATTEAFIDSKYDIRIQKIGSNYKAYMRTSISGNWKANTGSAMLEQVAMTERYRLWVDSCSEMFGGLDICAVKAVHSKDGRDYIIEVMDSSMPLIGEHVEEDRQLMADLVVSKMSQLPMPGGTAPSPLRPWAPQIKSAKSPGQAQLGPQLGQPQPRPPPQGGPRQAQSPQPQRSGSPSQQRLSPQGQQPLSPQSGSPQQQRSPGSPQLSRASSGSSPNQASKPGATLASQPRPPVQGRSTSQQGEESKKPAPPHPHLNKSQSLTNSLSTSDTSQRGTPSEDEAKAETIRNLRKSFASLFSD

SEQ ID NO: 85510 - protein, 113 aa, Homo sapiens
  Payload ID: 16990
  Gene Symbol: SYN3
  Gene Name: synapsin III
  ENSP ID: ENSP00000388582
MNFLRRRLSDSSFMANLPNGYMTDLQRPDSSTSSPASPAMERRHPQPLAASFSSPGSSLFSSLSSAMKQAPQATSGLMEPPGPSTPIVQRPRILLVIDDAHTDWSKYFHGKKV

SEQ ID NO: 85511 - protein, 123 aa, Homo sapiens
  Payload ID: 16990
  Gene Symbol: SYN3
  Gene Name: synapsin III
  ENSP ID: ENSP00000395794
MNFLRRRLSDSSFMANLPNGYMTDLQRPDSSTSSPASPAMERRHPQPLAASFSSPGSSLFSSLSSAMKQAPQATSGLMEPPGPSTPIVQRPRILLVIDDAHTDWSKYFHGKKVNGEIEIRVEQ

SEQ ID NO: 85512 - protein, 187 aa, Homo sapiens [sequence omitted]

SEQ ID NO: 85513 - protein, 1284 aa, Homo sapiens
  Payload ID: 16991
  Gene Symbol: SYNGAP1
  Gene Name: synaptic Ras GTPase activating protein 1
  ENSP ID: ENSP00000293748
MSYAPFRDVRGPSMHRTQYVHSPYDRPGWNPRFCIISGNQLLMLDEDEIHPLLIRDRRSESSRNKLLRRTVSVPVEGRPHGEHEYHLGRSRRKSVPGGKQYSMEGAPAAPFRPSQGFLSRRLKSSIKRTKSQPKLDRTSSFRQILPRFRSADHDRARLMQSFKESHSHESLLSPSSAAEALELNLDEDSIIKPVHSSILGQEFCFEVTTSSGTKCFACRSAAERDKWIENLQRAVKPNKDNSRRVDNVLKLWIIEARELPPKKRYYCELCLDDMLYARTTSKPRSASGDTVFWGEHFEFNNLPAVRALRLHLYRDSDKKRKKDKAGYVGLVTVPVATLAGRHFTEQWYPVTLPTGSGGSGGMGSGGGGGSGGGSGGKGKGGCPAVRLKARYQTMSILPMELYKEFAEYVTNHYRMLCAVLEPALNVKGKEEVASALVHILQSTGKAKDFLSDMAMSEVDRFMEREHLIFRENTLATKAIEEYMRLIGQKYLKDAIGEFIRALYESEENCEVDPIKCTASSLAEHQANLRMCCELALCKVVNSHCVFPRELKEVFASWRLRCAERGREDIADRLISASLFLRFLCPAIMSPSLFGLMQEYPDEQTSRTLTLIAKVIQNLANFSKFTSKEDFLGFMNEFLELEWGSMQQFLYEISNLDTLTNSSSFEGYIDLGRELSTLHALLWEVLPQLSKEALLKLGPLPRLLNDISTALRNPNIQRQPSRQSERPRPQPVVLRGPSAEMQGYMMRDLNSSIDLQSFMARGLNSSMDMARLPSPTKEKPPPPPPGGGKDLFYVSRPPLARSSPAYCTSSSDITEPEQKMLSVNKSVSMLDLQGDGPGGRLNSSSVSNLAAVGDLLHSSQASLTAALGLRPAPAGRLSQGSGSSITAAGMRLSQMGVTTDGVPAQQLRIPLSFQNPLFHMAADGPGPPGGHGGGGGHGPPSSHHHHHHHHHHRGGEPPGDTFAPFHGYSKSEDLSSGVPKPPAASILHSHSYSDEFGPSGTDFTRRQLSLQDNLQHMLSPPQITIGPQRPAPSGPGGGSGGGSGGGGGGQPPPLQRGKSQQLTVSAAQKPRPSSGNLLQSPEPSYGPARPRQQSLSKEGSIGGSGGSGGGGGGGLKPSITKQHSQTPSTLNPTMPASERTVAWVSNMPHLSADIESAHIEREEYKLKEYSKSMDESRLDRVKEYEEEIHSLKERLHMSNRKLEEYERRLLSQEEQTSKILMQYQARLEQSEKRLRQQQAEKDSQIKSIIGRLMLVEEELRRDHPAMAEPLPEPKKRLLDAQLLIR

SEQ ID NO: 85514 - protein, 487 aa, Homo sapiens
  Payload ID: 16991
  Gene Symbol: SYNGAP1
  Gene Name: synaptic Ras GTPase activating protein 1
  ENSP ID: ENSP00000348072
EDFLGFMNEFLELEWGSMQQFLYEISNLDTLTNSSSFEGYIDLGRELSTLHALLWEVLPQLSKEALLKLGPLPRLLNDISTALRNPNIQRQPSRQSERPRPQPVVLRGPSAEMQGYMMRDLNSSMDMARLPSPTKEKPPPPPPGGGKDLFYVSRPPLARSSPAYCTSSSDITEPEQKMLSVNKSVSMLDLQGDGPGGRLNSSSVSNLAAVGDLLHSSQASLTAALGLRPAPAGRLSQGSGSSITAAGMRLSQMGVTTDGVPAQQLRIPLSFQNPLFHMAADGPGPPGGHGGGGGHGPPSSHHHHHHHHHHRGGEPPGDTFAPFHGYSKSEDLSSGVPKPPAASILHSHSYSDEFGPSGTDFTRRQLSLQDNLQHMLSPPQITIGPQRPAPSGPGGGSGGGSGGGGGGQPPPLQRGKSQQLTVSAAQKPRPSSGNLLQSPEPSYGPARPRQQSLSKEGSIGGSGGSGGGGGGGLKPSITKQHSQTPST

SEQ ID NO: 85515 - protein, 1299 aa, Homo sapiens
  Payload ID: 16991
  Gene Symbol: SYNGAP1
  Gene Name: synaptic Ras GTPase activating protein 1
  Uniprot ID: Q96PV0
  ENSP ID: ENSP00000378509
MSRSRASIHRGSIPAMSYAPFRDVRGPSMHRTQYVHSPYDRPGWNPRFCIISGNQLLMLDEDEIHPLLIRDRRSESSRNKLLRRTVSVPVEGRPHGEHEYHLGRSRRKSVPGGKQYSMEGAPAAPFRPSQGFLSRRLKSSIKRTKSQPKLDRTSSFRQILPRFRSADHDRARLMQSFKESHSHESLLSPSSAAEALELNLDEDSIIKPVHSSILGQEFCFEVTTSSGTKCFACRSAAERDKWIENLQRAVKPNKDNSRRVDNVLKLWIIEARELPPKKRYYCELCLDDMLYARTTSKPRSASGDTVFWGEHFEFNNLPAVRALRLHLYRDSDKKRKKDKAGYVGLVTVPVATLAGRHFTEQWYPVTLPTGSGGSGGMGSGGGGGSGGGSGGKGKGGCPAVRLKARYQTMSILPMELYKEFAEYVTNHYRMLCAVLEPALNVKGKEEVASALVHILQSTGKAKDFLSDMAMSEVDRFMEREHLIFRENTLATKAIEEYMRLIGQKYLKDAIGEFIRALYESEENCEVDPIKCTASSLAEHQANLRMCCELALCKVVNSHCVFPRELKEVFASWRLRCAERGREDIADRLISASLFLRFLCPAIMSPSLFGLMQEYPDEQTSRTLTLIAKVIQNLANFSKFTSKEDFLGFMNEFLELEWGSMQQFLYEISNLDTLTNSSSFEGYIDLGRELSTLHALLWEVLPQLSKEALLKLGPLPRLLNDISTALRNPNIQRQPSRQSERPRPQPVVLRGPSAEMQGYMMRDLNSSIDLQSFMARGLNSSMDMARLPSPTKEKPPPPPPGGGKDLFYVSRPPLARSSPAYCTSSSDITEPEQKMLSVNKSVSMLDLQGDGPGGRLNSSSVSNLAAVGDLLHSSQASLTAALGLRPAPAGRLSQGSGSSITAAGMRLSQMGVTTDGVPAQQLRIPLSFQNPLFHMAADGPGPPGGHGGGGGHGPPSSHHHHHHHHHHRGGEPPGDTFAPFHGYSKSEDLSSGVPKPPAASILHSHSYSDEFGPSGTDFTRRQLSLQDNLQHMLSPPQITIGPQRPAPSGPGGGSGGGSGGGGGGQPPPLQRGKSQQLTVSAAQKPRPSSGNLLQSPEPSYGPARPRQQSLSKEGSIGGSGGSGGGGGGGLKPSITKQHSQTPSTLNPTMPASERTVAWVSNMPHLSADIESAHIEREEYKLKEYSKSMDESRLDRVKEYEEEIHSLKERLHMSNRKLEEYERRLLSQEEQTSKILMQYQARLEQSEKRLRQQQAEKDSQIKSIIGRLMLVEEELRRDHPAMAEPLPEPKKRLLDAQLLIR

SEQ ID NO: 85516 - protein, 1285 aa, Homo sapiens
  Payload ID: 16991
  Gene Symbol: SYNGAP1
  Gene Name: synaptic Ras GTPase activating protein 1
  Uniprot ID: Q96PV0
  ENSP ID: ENSP00000403636
MSRSRASIHRGSIPAMSYAPFRDVRGPSMHRTQYVHSPYDRPGWNPRFCIISGNQLLMLDEDEIHPLLIRDRRSESSRNKLLRRTVSVPVEGRPHGEHEYHLGRSRRKSVPGGKQYSMEGAPAAPFRPSQGFLSRRLKSSIKRTKSQPKLDRTSSFRQILPRFRSADHDRARLMQSFKESHSHESLLSPSSAAEALELNLDEDSIIKPVHSSILGQEFCFEVTTSSGTKCFACRSAAERDKWIENLQRAVKPNKDNSRRVDNVLKLWIIEARELPPKKRYYCELCLDDMLYARTTSKPRSASGDTVFWGEHFEFNNLPAVRALRLHLYRDSDKKRKKDKAGYVGLVTVPVATLAGRHFTEQWYPVTLPTGSGGSGGMGSGGGGGSGGGSGGKGKGGCPAVRLKARYQTMSILPMELYKEFAEYVTNHYRMLCAVLEPALNVKGKEEVASALVHILQSTGKAKDFLSDMAMSEVDRFMEREHLIFRENTLATKAIEEYMRLIGQKYLKDAIGEFIRALYESEENCEVDPIKCTASSLAEHQANLRMCCELALCKVVNSHCVFPRELKEVFASWRLRCAERGREDIADRLISASLFLRFLCPAIMSPSLFGLMQEYPDEQTSRTLTLIAKVIQNLANFSKFTSKEDFLGFMNEFLELEWGSMQQFLYEISNLDTLTNSSSFEGYIDLGRELSTLHALLWEVLPQLSKEALLKLGPLPRLLNDISTALRNPNIQRQPSRQSERPRPQPVVLRGPSAEMQGYMMRDLNSSIDLQSFMARGLNSSMDMARLPSPTKEKPPPPPPGGGKDLFYVSRPPLARSSPAYCTSSSDITEPEQKMLSVNKSVSMLDLQGDGPGGRLNSSSVSNLAAVGDLLHSSQASLTAALGLRPAPAGRLSQGSGSSITAAGMRLSQMGVTTDGVPAQQLRIPLSFQNPLFHMAADGPGPPGGHGGGGGHGPPSSHHHHHHHHHHRGGEPPGDTFAPFHGYSKSEDLSSGVPKPPAASILHSHSYSDEFGPSGTDFTRRQLSLQDNLQHMLSPPQITIGPQRPAPSGPGGGSGGGSGGGGGGQPPPLQRGKSQQLTVSAAQKPRPSSGNLLQSPEPSYGPARPRQQSLSKEGSIGGSGGSGGGGGGGLKPSITKQHSQTPSTLNPTMPASERTVAWVSNMPHLSADIESAHIEREEYKLKEYSKSMDESRLDRVKEYEEEIHSLKERLHMSNRKLEEYERRLLSQEEQTSKILMQYQARLEQSEKRLRQQQAEKDSQIKSIIGSPSLQADAGGGGAAPGPPRHG

SEQ ID NO: 85517 - protein, 1284 aa, Homo sapiens
  Payload ID: 16991
  Gene Symbol: SYNGAP1
  Gene Name: synaptic Ras GTPase activating protein 1
  Uniprot ID: Q96PV0
  ENSP ID: ENSP00000407995
MGLRPPTPSPSGGSCSGSLPPPSRCQPLRRRCSSCCFPGEYHLGRSRRKSVPGGKQYSMEGAPAAPFRPSQGFLSRRLKSSIKRTKSQPKLDRTSSFRQILPRFRSADHDRARLMQSFKESHSHESLLSPSSAAEALELNLDEDSIIKPVHSSILGQEFCFEVTTSSGTKCFACRSAAERDKWIENLQRAVKPNKDNSRRVDNVLKLWIIEARELPPKKRYYCELCLDDMLYARTTSKPRSASGDTVFWGEHFEFNNLPAVRALRLHLYRDSDKKRKKDKAGYVGLVTVPVATLAGRHFTEQWYPVTLPTGSGGSGGMGSGGGGGSGGGSGGKGKGGCPAVRLKARYQTMSILPMELYKEFAEYVTNHYRMLCAVLEPALNVKGKEEVASALVHILQSTGKAKDFLSDMAMSEVDRFMEREHLIFRENTLATKAIEEYMRLIGQKYLKDAIGEFIRALYESEENCEVDPIKCTASSLAEHQANLRMCCELALCKVVNSHCVFPRELKEVFASWRLRCAERGREDIADRLISASLFLRFLCPAIMSPSLFGLMQEYPDEQTSRTLTLIAKVIQNLANFSKFTSKEDFLGFMNEFLELEWGSMQQFLYEISNLDTLTNSSSFEGYIDLGRELSTLHALLWEVLPQLSKEALLKLGPLPRLLNDISTALRNPNIQRQPSRQSERPRPQPVVLRGPSAEMQGYMMRDLNSSIDLQSFMARGLNSSMDMARLPSPTKEKPPPPPPGGGKDLFYVSRPPLARSSPAYCTSSSDITEPEQKMLSVNKSVSMLDLQGDGPGGRLNSSSVSNLAAVGDLLHSSQASLTAALGLRPAPAGRLSQGSGSSITAAGMRLSQMGVTTDGVPAQQLRIPLSFQNPLFHMAADGPGPPGGHGGGGGHGPPSSHHHHHHHHHHRGGEPPGDTFAPFHGYSKSEDLSSGVPKPPAASILHSHSYSDEFGPSGTDFTRRQLSLQDNLQHMLSPPQITIGPQRPAPSGPGGGSGGGSGGGGGGQPPPLQRGKSQQLTVSAAQKPRPSSGNLLQSPEPSYGPARPRQQSLSKEGSIGGSGGSGGGGGGGLKPSITKQHSQTPSTLNPTMPASERTVAWVSNMPHLSADIESAHIEREEYKLKEYSKSMDESRLDRVKEYEEEIHSLKERLHMSNRKLEEYERRLLSQEEQTSKILMQYQARLEQSEKRLRQQQAEKDSQIKSIIGRLMLVEEELRRDHPAMAEPLPEPKKRLLDAQERQLPPLGPTNPRVTLAPPWNGLAPPAPPPPPRLQITENGEFRNTADH

SEQ ID NO: 85518 - protein, 1284 aa, Homo sapiens; identical to SEQ ID NO: 85517
  Payload ID: 16991
  Gene Symbol: SYNGAP1
  Gene Name: synaptic Ras GTPase activating protein 1
  Uniprot ID: Q96PV0
  ENSP ID: ENSP00000412475

SEQ ID NO: 85519 - protein, 1343 aa, Homo sapiens [sequence omitted]

SEQ ID NO: 85520 - protein, 1306 aa, Homo sapiens
  Payload ID: 16991
  Gene Symbol: SYNGAP1
  Gene Name: synaptic Ras GTPase activating protein 1
  ENSP ID: ENSP00000416519
MSRSRASIHRGSIPAMSYAPFRDVRGPSMHRTQYVHSPYDRPGWNPRFCIISGNQLLMLDEDEIHPLLIRDRRSESSRNKLLRRTVSVPVEGRPHGEHEYHLGRSRRKSVPGGKQYSMEGAPAAPFRPSQGFLSRRLKSSIKRTKSQPKLDRTSSFRQILPRFRSADHDRARLMQSFKESHSHESLLSPSSAAEALELNLDEDSIIKPVHSSILGQEFCFEVTTSSGTKCFACRSAAERDKWIENLQRAVKPNKDNSRRVDNVLKLWIIEARELPPKKRYYCELCLDDMLYARTTSKPRSASGDTVFWGEHFEFNNLPAVRALRLHLYRDSDKKRKKDKAGYVGLVTVPVATLAGRHFTEQWYPVTLPTGSGGSGGMGSGGGGGSGGGSGGKGKGGCPAVRLKARYQTMSILPMELYKEFAEYVTNHYRMLCAVLEPALNVKGKEEVASALVHILQSTGKAKDFLSDMAMSEVDRFMEREHLIFRENTLATKAIEEYMRLIGQKYLKDAIGEFIRALYESEENCEVDPIKCTASSLAEHQANLRMCCELALCKVVNSHCVFPRELKEVFASWRLRCAERGREDIADRLISASLFLRFLCPAIMSPSLFGLMQEYPDEQTSRTLTLIAKVIQNLANFSKFTSKEDFLGFMNEFLELEWGSMQQFLYEISNLDTLTNSSSFEGYIDLGRELSTLHALLWEVLPQLSKEALLKLGPLPRLLNDISTALRNPNIQRQPSRQSERPRPQPVVLRGPSAEMQGYMMRDLNSSMDMARLPSPTKEKPPPPPPGGGKDLFYVSRPPLARSSPAYCTSSSDITEPEQKMLSVNKSVSMLDLQGDGPGGRLNSSSVSNLAAVGDLLHSSQASLTAALGLRPAPAGRLSQGSGSSITAAGMRLSQMGVTTDGVPAQQLRIPLSFQNPLFHMAADGPGPPGGHGGGGGHGPPSSHHHHHHHHHHRGGEPPGDTFAPFHGYSKSEDLSSGVPKPPAASILHSHSYSDEFGPSGTDFTRRQLSLQDNLQHMLSPPQITIGPQRPAPSGPGGGSGGGSGGGGGGQPPPLQRGKSQQLTVSAAQKPRPSSGNLLQSPEPSYGPARPRQQSLSKEGSIGGSGGSGGGGGGGLKPSITKQHSQTPSTLNPTMPASERTVAWVSNMPHLSADIESAHIEREEYKLKEYSKSMDESRLDREYEEEIHSLKERLHMSNRKLEEYERRLLSQEEQTSKILMQYQARLEQSEKRLRQQQAEKDSQIKSIIGRLMLVEEELRRDHPAMAEPLPEPKKRLLDAQERQLPPLGPTNPRVTLAPPWNGLAPPA

SEQ ID NO: 85521 - protein, 1299 aa, Homo sapiens; identical to SEQ ID NO: 85515
  Payload ID: 16991
  Gene Symbol: SYNGAP1
  Gene Name: synaptic Ras GTPase activating protein 1
  Uniprot ID: Q96PV0
  ENSP ID: ENSP00000486431

SEQ ID NO: 85522 - protein, 1343 aa, Homo sapiens [sequence omitted]

SEQ ID NO: 85523 - protein, 682 aa, Homo sapiens
  Payload ID: 16992
  Gene Symbol: SV2A
  Gene Name: synaptic vesicle glycoprotein 2A
  Uniprot ID: Q7L0J3
  ENSP ID: ENSP00000358141
MEEGFRDRAAFIRGAKDIAKEVKKHAAKKVVKGLDRVQDEYSRRSYSRFEEEDDDDDFPAPSDGYYRGEGTQDEEEGGASSDATEGHDEDDEIYEGEYQGIPRAESGGKGERMADGAPLAGVRGGLSDGEGPPGGRGEAQRRKEREELAQQYEAILRECGHGRFQWTLYFVLGLALMADGVEVFVVGFVLPSAEKDMCLSDSNKGMLGLIVYLGMMVGAFLWGGLADRLGRRQCLLISLSVNSVFAFFSSFVQGYGTFLFCRLLSGVGIGGSIPIVFSYFSEFLAQEKRGEHLSWLCMFWMIGGVYAAAMAWAIIPHYGWSFQMGSAYQFHSWRVFVLVCAFPSVFAIGALTTQPESPRFFLENGKHDEAWMVLKQVHDTNMRAKGHPERVFSVTHIKTIHQEDELIEIQSDTGTWYQRWGVRALSLGGQVWGNFLSCFGPEYRRITLMMMGVWFTMSFSYYGLTVWFPDMIRHLQAVDYASRTKVFPGERVEHVTFNFTLENQIHRGGQYFNDKFIGLRLKSVSFEDSLFEECYFEDVTSSNTFFRNCTFINTVFYNTDLFEYKFVNSRLINSTFLHNKEGCPLDVTGTGEGAYMVYFVSFLGTLAVLPGNIVSALLMDKIGRLRMLAGSSVMSCVSCFFLSFGNSESAMIALLCLFGGVSIASWNALDVLTVELYPSDKR

SEQ ID NO: 85524 - protein, 742 aa, Homo sapiens
  Payload ID: 16992
  Gene Symbol: SV2A
  Gene Name: synaptic vesicle glycoprotein 2A
  Uniprot ID: Q7L0J3
  ENSP ID: ENSP00000358142
MEEGFRDRAAFIRGAKDIAKEVKKHAAKKVVKGLDRVQDEYSRRSYSRFEEEDDDDDFPAPSDGYYRGEGTQDEEEGGASSDATEGHDEDDEIYEGEYQGIPRAESGGKGERMADGAPLAGVRGGLSDGEGPPGGRGEAQRRKEREELAQQYEAILRECGHGRFQWTLYFVLGLALMADGVEVFVVGFVLPSAEKDMCLSDSNKGMLGLIVYLGMMVGAFLWGGLADRLGRRQCLLISLSVNSVFAFFSSFVQGYGTFLFCRLLSGVGIGGSIPIVFSYFSEFLAQEKRGEHLSWLCMFWMIGGVYAAAMAWAIIPHYGWSFQMGSAYQFHSWRVFVLVCAFPSVFAIGALTTQPESPRFFLENGKHDEAWMVLKQVHDTNMRAKGHPERVFSVTHIKTIHQEDELIEIQSDTGTWYQRWGVRALSLGGQVWGNFLSCFGPEYRRITLMMMGVWFTMSFSYYGLTVWFPDMIRHLQAVDYASRTKVFPGERVEHVTFNFTLENQIHRGGQYFNDKFIGLRLKSVSFEDSLFEECYFEDVTSSNTFFRNCTFINTVFYNTDLFEYKFVNSRLINSTFLHNKEGCPLDVTGTGEGAYMVYFVSFLGTLAVLPGNIVSALLMDKIGRLRMLAGSSVMSCVSCFFLSFGNSESAMIALLCLFGGVSIASWNALDVLTVELYPSDKRTTAFGFLNALCKLAAVLGISIFTSFVGITKAAPILFASAALALGSSLALKLPETRGQVLQ

SEQ ID NO: 85525 - protein, 683 aa, Homo sapiens
  Payload ID: 16993
  Gene Symbol: SV2B
  Gene Name: synaptic vesicle glycoprotein 2B
  Uniprot ID: Q7L1I2
  ENSP ID: ENSP00000332818
MDDYKYQDNYGGYAPSDGYYRGNESNPEEDAQSDVTEGHDEEDEIYEGEYQGIPHPDDVKAKQAKMAPSRMDSLRGQTDLMAERLEDEEQLAHQYETIMDECGHGRFQWILFFVLGLALMADGVEVFVVSFALPSAEKDMCLSSSKKGMLGMIVYLGMMAGAFILGGLADKLGRKRVLSMSLAVNASFASLSSFVQGYGAFLFCRLISGIGIGGALPIVFAYFSEFLSREKRGEHLSWLGIFWMTGGLYASAMAWSIIPHYGWGFSMGTNYHFHSWRVFVIVCALPCTVSMVALKFMPESPRFLLEMGKHDEAWMILKQVHDTNMRAKGTPEKVFTVSNIKTPKQMDEFIEIQSSTGTWYQRWLVRFKTIFKQVWDNALYCVMGPYRMNTLILAVVWFAMAFSYYGLTVWFPDMIRYFQDEEYKSKMKVFFGEHVYGATINFTMENQIHQHGKLVNDKFTRMYFKHVLFEDTFFDECYFEDVTSTDTYFKNCTIESTIFYNTDLYEHKFINCRFINSTFLEQKEGCHMDLEQDNDFLIYLVSFLGSLSVLPGNIISALLMDRIGRLKMIGGSMLISAVCCFFLFFGNSESAMIGWQCLFCGTSIAAWNALDVITVELYPTNQRATAFGILNGLCKFGAILGNTIFASFVGITKVVPILLAAASLVGGGLIALRLPETREQVLM

SEQ ID NO: 85526 - protein, 683 aa, Homo sapiens; identical to SEQ ID NO: 85525
  Payload ID: 16993
  Gene Symbol: SV2B
  Gene Name: synaptic vesicle glycoprotein 2B
  Uniprot ID: Q7L1I2
  ENSP ID: ENSP00000377779

SEQ ID NO: 85527 - protein, 532 aa, Homo sapiens
  Payload ID: 16993
  Gene Symbol: SV2B
  Gene Name: synaptic vesicle glycoprotein 2B
  Uniprot ID: Q7L1I2
  ENSP ID: ENSP00000443243
MIVYLGMMAGAFILGGLADKLGRKRVLSMSLAVNASFASLSSFVQGYGAFLFCRLISGIGIGGALPIVFAYFSEFLSREKRGEHLSWLGIFWMTGGLYASAMAWSIIPHYGWGFSMGTNYHFHSWRVFVIVCALPCTVSMVALKFMPESPRFLLEMGKHDEAWMILKQVHDTNMRAKGTPEKVFTVSNIKTPKQMDEFIEIQSSTGTWYQRWLVRFKTIFKQVWDNALYCVMGPYRMNTLILAVVWFAMAFSYYGLTVWFPDMIRYFQDEEYKSKMKVFFGEHVYGATINFTMENQIHQHGKLVNDKFTRMYFKHVLFEDTFFDECYFEDVTSTDTYFKNCTIESTIFYNTDLYEHKFINCRFINSTFLEQKEGCHMDLEQDNDFLIYLVSFLGSLSVLPGNIISALLMDRIGRLKMIGGSMLISAVCCFFLFFGNSESAMIGWQCLFCGTSIAAWNALDVITVELYPTNQRATAFGILNGLCKFGAILGNTIFASFVGITKVVPILLAAASLVGGGLIALRLPETREQVLM

SEQ ID NO: 85528 - protein, 683 aa, Homo sapiens; identical to SEQ ID NO: 85525
  Payload ID: 16993
  Gene Symbol: SV2B
  Gene Name: synaptic vesicle glycoprotein 2B
  Uniprot ID: Q7L1I2
  ENSP ID: ENSP00000450992

SEQ ID NO: 85529 - protein, 676 aa, Homo sapiens
  Payload ID: 16994
  Gene Symbol: SV2C
  Gene Name: synaptic vesicle glycoprotein 2C
  ENSP ID: ENSP00000316983
MEDSYKDRTSLMKGAKDIAREVKKQTVKKVNQAVDRAQDEYTQRSYSRFQDEEDDDDYYPAGETYNGEANDDEGSSEATEGHDEDDEIYEGEYQGIPSMNQAKDSIVSVGQPKGDEYKDRRELESERRADEEELAQQYELIIQECGHGRFQWALFFVLGMALMADGVEVFVVGFVLPSAETDLCIPNSGSGWLGSIVYLGMMVGAFFWGGLADKVGRKQSLLICMSVNGFFAFLSSFVQGYGFFLFCRLLSGFGIGGAIPTVFSYFAEVLAREKRGEHLSWLCMFWMIGGIYASAMAWAIIPHYGWSFSMGSAYQFHSWRVFVIVCALPCVSSVVALTFMPESPRFLLEVGKHDEAWMILKLIHDTNMRARGQPEKVFTVNKIKTPKQIDELIEIESDTGTWYRRCFVRIRTELYGIWLTFMRCFNYPVRDNTIKLTIVWFTLSFGYYGLSVWFPDVIKPLQSDEYALLTRNVERDKYANFTINFTMENQIHTGMEYDNGRFIGVKFKSVTFKDSVFKSCTFEDVTSVNTYFKNCTFIDTVFDNTDFEPYKFIDSEFKNCSFFHNKTGCQITFDDDYSAYWIYFVNFLGTLAVLPGNIVSALLMDRIGRLTMLGGSMVLSGISCFFLWFGTSESMMIGMLCLYNGLTISAWNSLDVVTVELYPTDRRRRVLPCCPG

SEQ ID NO: 85530 - protein, 727 aa, Homo sapiens
  Payload ID: 16994
  Gene Symbol: SV2C
  Gene Name: synaptic vesicle glycoprotein 2C
  Uniprot ID: Q496J9
  ENSP ID: ENSP00000423541
MEDSYKDRTSLMKGAKDIAREVKKQTVKKVNQAVDRAQDEYTQRSYSRFQDEEDDDDYYPAGETYNGEANDDEGSSEATEGHDEDDEIYEGEYQGIPSMNQAKDSIVSVGQPKGDEYKDRRELESERRADEEELAQQYELIIQECGHGRFQWALFFVLGMALMADGVEVFVVGFVLPSAETDLCIPNSGSGWLGSIVYLGMMVGAFFWGGLADKVGRKQSLLICMSVNGFFAFLSSFVQGYGFFLFCRLLSGFGIGGAIPTVFSYFAEVLAREKRGEHLSWLCMFWMIGGIYASAMAWAIIPHYGWSFSMGSAYQFHSWRVFVIVCALPCVSSVVALTFMPESPRFLLEVGKHDEAWMILKLIHDTNMRARGQPEKVFTVNKIKTPKQIDELIEIESDTGTWYRRCFVRIRTELYGIWLTFMRCFNYPVRDNTIKLTIVWFTLSFGYYGLSVWFPDVIKPLQSDEYALLTRNVERDKYANFTINFTMENQIHTGMEYDNGRFIGVKFKSVTFKDSVFKSCTFEDVTSVNTYFKNCTFIDTVFDNTDFEPYKFIDSEFKNCSFFHNKTGCQITFDDDYSAYWIYFVNFLGTLAVLPGNIVSALLMDRIGRLTMLGGSMVLSGISCFFLWFGTSESMMIGMLCLYNGLTISAWNSLDVVTVELYPTDRRATGFGFLNALCKAAAVLGNLIFGSLVSITKSIPILLASTVLVCGGLVGLCLPDTRTQVLM

SEQ ID NO: 85531 - protein, 118 aa, Homo sapiens
  Payload ID: 16995
  Gene Symbol: SYNGR1
  Gene Name: synaptogyrin 1
  ENSP ID: ENSP00000216155
MEGGAYGAGKAGGAFDPYTLVRQPHTILRVVSWLFSIVVFGSIVNEGYLNSASEGEEFCIYNRNPNACSYGVAVGVLAFLTCLLYLALDVYFPQISSVKDRKKAVLSDIGVSAWEMHS

SEQ ID NO: 85532 - protein, 191 aa, Homo sapiens
  Payload ID: 16995
  Gene Symbol: SYNGR1
  Gene Name: synaptogyrin 1
  Uniprot ID: O43759
  ENSP ID: ENSP00000318845
MEGGAYGAGKAGGAFDPYTLVRQPHTILRVVSWLFSIVVFGSIVNEGYLNSASEGEEFCIYNRNPNACSYGVAVGVLAFLTCLLYLALDVYFPQISSVKDRKKAVLSDIGVSAFWAFLWFVGFCYLANQWQVSKPKDNPLNEGTDAARAAIAFSFFSIFTWSLTAALAVRRFKDLSFQEEYSTLFPASAQP

SEQ ID NO: 85533 - protein, 233 aa, Homo sapiens
  Payload ID: 16995
  Gene Symbol: SYNGR1
  Gene Name: synaptogyrin 1
  Uniprot ID: O43759
  ENSP ID: ENSP00000332287
MEGGAYGAGKAGGAFDPYTLVRQPHTILRVVSWLFSIVVFGSIVNEGYLNSASEGEEFCIYNRNPNACSYGVAVGVLAFLTCLLYLALDVYFPQISSVKDRKKAVLSDIGVSAFWAFLWFVGFCYLANQWQVSKPKDNPLNEGTDAARAAIAFSFFSIFTWAGQAVLAFQRYQIGADSALFSQDYMDPSQDSSMPYAPYVEPTGPDPAGMGGTYQQPANTFDTEPQGYQSQGY

SEQ ID NO: 85534 - protein, 192 aa, Homo sapiens
  Payload ID: 16995
  Gene Symbol: SYNGR1
  Gene Name: synaptogyrin 1
  Uniprot ID: O43759
  ENSP ID: ENSP00000370946
MLTLEFGILEFDPSWIGSWTQRSWVSWRSRPGCELFSIVVFGSIVNEGYLNSASEGEEFCIYNRNPNACSYGVAVGVLAFLTCLLYLALDVYFPQISSVKDRKKAVLSDIGVSAFWAFLWFVGFCYLANQWQVSKPKDNPLNEGTDAARAAIAFSFFSIFTWSLTAALAVRRFKDLSFQEEYSTLFPASAQP

SEQ ID NO: 85535 - protein, 169 aa, Homo sapiens
  Payload ID: 16995
  Gene Symbol: SYNGR1
  Gene Name: synaptogyrin 1
  ENSP ID: ENSP00000385447
MEGGAYGAGKAGGAFDPYTLVRQPHTILRVVSWLFSIVVFGSIVNEGYLNSASEGEEFCIYNRNPNACSYGVAVGVLAFLTCLLYLALDVYFPQISSVKDRKKAVLSDIGVSAFWAFLWFVGFCYLANQWQVSKPKDNPLNEGTDAARAAIAFSFFSIFTWRSGATSPP

SEQ ID NO: 85536 - protein, 144 aa, Homo sapiens
  Payload ID: 16995
  Gene Symbol: SYNGR1
  Gene Name: synaptogyrin 1
  ENSP ID: ENSP00000412442
MEGGAYGAGKAGGAFDPYTLVRQPHTILRVVSWLFSIVVFGSIVNEGYLNSASEGEEFCIYNRNPNACSYGVAVGVLAFLTCLLYLALDVYFPQISSVKDRKKAVLSDIGVSGEPHPAGTPCTESTEGCPGHRRRLPPFFPCFR

SEQ ID NO: 85537 - protein, 224 aa, Homo sapiens
  Payload ID: 16996
  Gene Symbol: SYNGR2
  Gene Name: synaptogyrin 2
  Uniprot ID: O43760
  ENSP ID: ENSP00000225777
MESGAYGAAKAGGSFDLRRFLTQPQVVARAVCLVFALIVFSCIYGEGYSNAHESKQMYCVFNRNEDACRYGSAIGVLAFLASAFFLVVDAYFPQISNATDRKYLVIGDLLFSALWTFLWFVGFCFLTNQWAVTNPKDVLVGADSVRAAITFSFFSIFSWGVLASLAYQRYKAGVDDFIQNYVDPTPDPNTAYASYPGASVDNYQQPPFTQNAETTEGYQPPPVY

SEQ ID NO: 85538 - protein, 168 aa, Homo sapiens
  Payload ID: 16996
  Gene Symbol: SYNGR2
  Gene Name: synaptogyrin 2
  ENSP ID: ENSP00000465005
MYCVFNRNEDACRYGSAIGVLAFLASAFFLVVDAYFPQISNATDRKYLVIGDLLFSALWTFLWFVGFCFLTNQWAVTNPKDVLVGADSVRAAITFSFFSIFSWGVLASLAYQRYKAGVDDFIQNYVDPTPDPNTAYASYPGASVDNYQQPPFTQNAETTEGYQPPPVY

SEQ ID NO: 85539 - protein, 224 aa, Homo sapiens; identical to SEQ ID NO: 85537
  Payload ID: 16996
  Gene Symbol: SYNGR2
  Gene Name: synaptogyrin 2
  Uniprot ID: O43760
  ENSP ID: ENSP00000465678

SEQ ID NO: 85540 - protein, 65 aa, Homo sapiens
  Payload ID: 16996
  Gene Symbol: SYNGR2
  Gene Name: synaptogyrin 2
  ENSP ID: ENSP00000466032
MESGAYGAAKAGGSFDLRRFLTQPQVVARAVCLLSGPSCGLLVSASSPTSGQSPTRRTCWWGPTL

SEQ ID NO: 85541 - protein, 135 aa, Homo sapiens
  Payload ID: 16996
  Gene Symbol: SYNGR2
  Gene Name: synaptogyrin 2
  ENSP ID: ENSP00000466204
  MOD_RES (1)..(1): Any amino acid
XESGAYGAAKAGGSFDLRRFLTQPQVVARAVCLVFALIVFSCIYGEGYSNAHESKQMYCVFNRNEDACRYGSAIGVLAFLASAFFLVVDAYFPQISNATDRKYLVIGDLLFSGCAGLPGLPALQGWRGRLHPELR

SEQ ID NO: 85542 - protein, 113 aa, Homo sapiens
  Payload ID: 16996
  Gene Symbol: SYNGR2
  Gene Name: synaptogyrin 2
  ENSP ID: ENSP00000466942
MESGAYGAAKAGGSFDLRRFLTQPQVVARAVCLEAEDAVSRDRTIALQPGQQEQDSISNNNKNPKGDSSSGRGQHLYTPSGSPLCVPLRRPPALPGPPLPAGLRLDRVLLHLW

SEQ ID NO: 85543 - protein, 275 aa, Homo sapiens
  Payload ID: 16996
  Gene Symbol: SYNGR2
  Gene Name: synaptogyrin 2
  Uniprot ID: O43760
  ENSP ID: ENSP00000467600
MESGAYGAAKAGGSFDLRRFLTQPQVVARAVCLVFALIVFSCIYGEGYSNAHESKQMYCVFNRNEDACRYGSAIGVLAFLASAFFLVVDAYFPQISNATDRKYLVIGDLLFSALWTFLWFVGFCFLTNQWAVTNPKDVLVGADSVRAAITFSFFSIFSWVGWPGAGSWVKGGGGWGPPPTCTLLCSPCRVCWPPWPTSATRLAWTTSSRITLTPLRTPTLPTPPTQVHLWTTTNSHPSPRTRRPPRATSRPLCTERRLAWEGGQRGPSPLPWTFP

SEQ ID NO: 85544 - protein, 229 aa, Homo sapiens
  Payload ID: 16997
  Gene Symbol: SYNGR3
  Gene Name: synaptogyrin 3
  Uniprot ID: O43761
  ENSP ID: ENSP00000248121
MEGASFGAGRAGAALDPVSFARRPQTLLRVASWVFSIAVFGPIVNEGYVNTDSGPELRCVFNGNAGACRFGVALGLGAFLACAAFLLLDVRFQQISSVRDRRRAVLLDLGFSGLWSFLWFVGFCFLTNQWQRTAPGPATTQAGDAARAAIAFSFFSILSWVALTVKALQRFRLGTDMSLFATEQLSTGASQAYPGYPVGSGVEGTETYQSPPFTETLDTSPKGYQVPAY

SEQ ID NO: 85545 - protein, 177 aa, Homo sapiens
  Payload ID: 16997
  Gene Symbol: SYNGR3
  Gene Name: synaptogyrin 3
  ENSP ID: ENSP00000454756
SFARRPQTLLRVASWPLLRFSCSRDLEAGTGWGRNSPRGRRGLREPRSASPSPAHTPSGLLGREPVPWPPVPAVFSIAVFGPIVNEGYVNTDSGPELRCVFNGNAGACRFGVALGLGAFLACAAFLLLDVRFQQISSVRDRRRAVLLDLGFSGLWSFLWFVGFCFLTNQWQRTAPGP

SEQ ID NO: 85546 - protein, 239 aa, Homo sapiens
  Payload ID: 16997
  Gene Symbol: SYNGR3
  Gene Name: synaptogyrin 3
  ENSP ID: ENSP00000455344
MVSISGPGQAGVLHRRLRAHRQRGLREHRQRPRAALRVQRERGRLPLRRRAGPRSLPRLRRLPAARCALPANQQRPRPPARGVAGPGLLRTLVLPVVRGLLLPHQSVAAHGARAGHDAGGGRGAGRHRLQLLLHPQLGGAHREGPAAVPPGHRHVTLRHRTAEHRGEPGLPRLSGGQRRGGHRDLPEPALHRDPGHQPQRVPGARLLAAGRHRPGLQGHPTNAGPRVSGTSLGSFQLSA

SEQ ID NO: 85547 - protein, 76 aa, Homo sapiens
  Payload ID: 16997
  Gene Symbol: SYNGR3
  Gene Name: synaptogyrin 3
  ENSP ID: ENSP00000455577
MCASSKSAASATAGARCCWTWASQDSGPSCGSWASASSPISGSARRQGRPRRRRGTRRGPPSPSASSPSSAGWRSP

SEQ ID NO: 85548 - protein, 145 aa, Homo sapiens
  Payload ID: 16997
  Gene Symbol: SYNGR3
  Gene Name: synaptogyrin 3
  ENSP ID: ENSP00000481324
MEGASFGAGRAGAALDPVSFARRPQTLLRVASWVFSIAVFGPIVNEGYVNTDSGPELRCVFNGNAGACRFGVALGLGAFLACAAFLLLDVRFQQSGGRGKTPPSPQDWGSWPLFPSHVPVGSDCLVSVMVVRPVRSHSPLSLTGC

SEQ ID NO: 85549 - protein, 234 aa, Homo sapiens
  Payload ID: 16998
  Gene Symbol: SYNGR4
  Gene Name: synaptogyrin 4
  Uniprot ID: O95473
  ENSP ID: ENSP00000344041
MHIPKSLQELANSEAVQFLRRPKTITRVFEGVFSLIVFSSLLTDGYQNKMESPQLHCILNSNSVACSFAVGAGFLAFLSCLAFLVLDTQETRIAGTRFKTAFQLLDFILAVLWAVVWFMGFCFLANQWQHSPPKEFLLGSSSAQAAIAFTFFSILVWIFQAYLAFQDLRNDAPVPYKRFLDEGGMVLTTLPLPSANSPVNMPTTGPNSLSYASSALSPCLTAPKSPRLAMMPDN

SEQ ID NO: 85550 - protein, 74 aa, Homo sapiens
  Payload ID: 16998
  Gene Symbol: SYNGR4
  Gene Name: synaptogyrin 4
  ENSP ID: ENSP00000469430
MESPQLHCILNSNSVACSFAVGAGFLAFLSCLAFLVLDTQETRIAGTRFKTAFQLLDFILADIPGLPGIPGPPK

SEQ ID NO: 85551 - protein, 91 aa, Homo sapiens
  Payload ID: 16998
  Gene Symbol: SYNGR4
  Gene Name: synaptogyrin 4
  ENSP ID: ENSP00000469900
MESPQLHCILNSNSVACSFAVGAGFLAFLSCLAFLVLDTQETRIAGTRFKTAFQLLDFILAVLWAVVWFMGFCFLANQWQHSPPKEFLLGS

SEQ ID NO: 85552 - protein, 146 aa, Homo sapiens
  Payload ID: 16998
  Gene Symbol: SYNGR4
  Gene Name: synaptogyrin 4
  ENSP ID: ENSP00000472198
MESPQLHCILNSNSVACSFAVGAGFLAFLSCLAFLVLDTQETRIAGTRFKTAFQLLDFILAVLWAVVWFMGFCFLANQWQHSPPKEFLLGSSSAQAAIAFTFFSILVWASPQPSPSPDLPSPSQPSARAFLPTDIPGLPGIPGPPK

SEQ ID NO: 85553 - protein, 1295 aa, Homo sapiens
  Payload ID: 16999
  Gene Symbol: SYNJ1
  Gene Name: synaptojanin 1
  Uniprot ID: O43426
  ENSP ID: ENSP00000349903
MAFSKGFRIYHKLDPPPFSLIVETRHKEECLMFESGAVAVLSSAEKEAIKGTYSKVLDAYGLLGVLRLNLGDTMLHYLVLVTGCMSVGKIQESEVFRVTSTEFISLRIDSSDEDRISEVRKVLNSGNFYFAWSASGISLDLSLNAHRSMQEQTTDNRFFWNQSLHLHLKHYGVNCDDWLLRLMCGGVEIRTIYAAHKQAKACLISRLSCERAGTRFNVRGTNDDGHVANFVETEQVVYLDDSVSSFIQIRGSVPLFWEQPGLQVGSHRVRMSRGFEANAPAFDRHFRTLKNLYGKQIIVNLLGSKEGEHMLSKAFQSHLKASEHAADIQMVNFDYHQMVKGGKAEKLHSVLKPQVQKFLDYGFFYFNGSEVQRCQSGTVRTNCLDCLDRTNSVQAFLGLEMLAKQLEALGLAEKPQLVTRFQEVFRSMWSVNGDSISKIYAGTGALEGKAKLKDGARSVTRTIQNNFFDSSKQEAIDVLLLGNTLNSDLADKARALLTTGSLRVSEQTLQSASSKVLKSMCENFYKYSKPKKIRVCVGTWNVNGGKQFRSIAFKNQTLTDWLLDAPKLAGIQEFQDKRSKPTDIFAIGFEEMVELNAGNIVSASTTNQKLWAVELQKTISRDNKYVLLASEQLVGVCLFVFIRPQHAPFIRDVAVDTVKTGMGGATGNKGAVAIRMLFHTTSLCFVCSHFAAGQSQVKERNEDFIEIARKLSFPMGRMLFSHDYVFWCGDFNYRIDLPNEEVKELIRQQNWDSLIAGDQLINQKNAGQVFRGFLEGKVTFAPTYKYDLFSDDYDTSEKCRTPAWTDRVLWRRRKWPFDRSAEDLDLLNASFQDESKILYTWTPGTLLHYGRAELKTSDHRPVVALIDIDIFEVEAEERQNIYKEVIAVQGPPDGTVLVSIKSSLPENNFFDDALIDELLQQFASFGEVILIRFVEDKMWVTFLEGSSALNVLSLNGKELLNRTITIALKSPDWIKNLEEEMSLEKISIALPSSTSSTLLGEDAEVAADFDMEGDVDDYSAEVEELLPQHLQPSSSSGLGTSPSSSPRTSPCQSPTISEGPVPSLPIRPSRAPSRTPGPPSAQSSPIDAQPATPLPQKDPAQPLEPKRPPPPRPVAPPTRPAPPQRPPPPSGARSPAPTRKEFGAPKSPGTTRKDNIGRSQPSPQAGLAGPGPAGYSTARPTIPPRAGVISAPQSHARASAGRLTPESQSKTSETSKGSTFLPEPLKPQAAFPPQSSLPPPAQRLQEPLVPVAAPMPQSGPQPNLETPPQPPPRSRSSHSLPSEASSQPQQEQPSG

SEQ ID NO: 85554 - protein, 1264 aa, Homo sapiens
  Payload ID: 16999
  Gene Symbol: SYNJ1
  Gene Name: synaptojanin 1
  ENSP ID: ENSP00000371931
MAFSKGFRIYHKLDPPPFSLIVETRHKEECLMFESGAVAVLSSAEKEAIKGTYSKVLDAYGLLGVLRLNLGDTMLHYLVLVTGCMSVGKIQESEVFRVTSTEFISLRIDSSDEDRISEVRKVLNSGNFYFAWSASGISLDLSLNAHRSMQEQTTDNRFFWNQSLHLHLKHYGVNCDDWLLRLMCGGVEIRTIYAAHKQAKACLISRLSCERAGTRFNVRGTNDDGHVANFVETEQVVYLDDSVSSFIQIRGSVPLFWEQPGLQVGSHRVRMSRGFEANAPAFDRHFRTLKNLYGKQIIVNLLGSKEGEHMLSKAFQSHLKASEHAADIQMVNFDYHQMVKGGKAEKLHSVLKPQVQKFLDYGFFYFNGSEVQRCQSGTVRTNCLDCLDRTNSVQAFLGLEMLAKQLEALGLAEKPQLVTRFQEVFRSMWSVNGDSISKIYAGTGALEGKAKAGKLKDGARSVTRTIQNNFFDSSKQEAIDVLLLGNTLNSDLADKARALLTTGSLRASSKVLKSMCENFYKYSKPKKIRVCVGTWNVNGGKQFRSIAFKNQTLTDWLLDAPKLAGIQEFQDKRSKPTDIFAIGFEEMVELNAGNIVSASTTNQKLWAVELQKTISRDNKYVLLASEQLVGVCLFVFIRPQHAPFIRDVAVDTVKTGMGGATGNKGAVAIRMLFHTTSLCFVCSHFAAGQSQVKERNEDFIEIARKLSFPMGRMLFSHDYVFWCGDFNYRIDLPNEEVKELIRQQNWDSLIAGDQLINQKNAGQVFRGFLEGKVTFAPTYKYDLFSDDYDTSEKCRTPAWTDRVLWRRRKWPFDRSAEDLDLLNASFQDESKILYTWTPGTLLHYGRAELKTSDHRPVVALIDIDIFEVEAEERQNIYKEVIAVQGPPDGTVLVSIKSSLPENNFFDDALIDELLQQFASFGEVILIRFVEDKMWVTFLEGSSALNVLSLNGKELLNRTITIALKSPDWIKNLEEEMSLEKISIALPSSTSSTLLGEDAEVAADFDMEGDVDDYSAEVEELLPQHLQPSSSSGLGTSPSSSPRTSPCQSPTISEGPVPSLPIRPSRAPSRTPGPPSAQSSPIDAQPATPLPQKDPAQPLEPKRPPPPRPVAPPTRPAPPQRPPPPSGRSQPSPQAGLAGPGPAGYSTARPTIPPRAGVISAPQSHARASAGRLTPESQSKTSETSKGSTFLPEPLKPQAAFPPQSSLPPPAQRLQEPLVPVAAPMPQSGPQPNLETPPQPPPRSRSSHSLPSEASSQPQQEQPSG

SEQ ID NO: 85555 - protein, 1350 aa, Homo sapiens
  Payload ID: 16999
  Gene Symbol: SYNJ1
  Gene Name: synaptojanin 1
  ENSP ID: ENSP00000371939
MRKRWACWSGSDAPGGCGGGCGRRRRRSRRKRAASEERRMAFSKGFRIYHKLDPPPFSLIVETRHKEECLMFESGAVAVLSSAEKEAIKGTYSKVLDAYGLLGVLRLNLGDTMLHYLVLVTGCMSVGKIQESEVFRVTSTEFISLRIDSSDEDRISEVRKVLNSGNFYFAWSASGISLDLSLNAHRSMQEQTTDNRFFWNQSLHLHLKHYGVNCDDWLLRLMCGGVEIRTIYAAHKQAKACLISRLSCERAGTRFNVRGTNDDGHVANFVETEQVVYLDDSVSSFIQIRGSVPLFWEQPGLQVGSHRVRMSRGFEANAPAFDRHFRTLKNLYGKQIIVNLLGSKEGEHMLSKAFQSHLKASEHAADIQMVNFDYHQMVKGGKAEKLHSVLKPQVQKFLDYGFFYFNGSEVQRCQSGTVRTNCLDCLDRTNSVQAFLGLEMLAKQLEALGLAEKPQLVTRFQEVFRSMWSVNGDSISKIYAGTGALEGKAKLKDGARSVTRTIQNNFFDSSKQEAIDVLLLGNTLNSDLADKARALLTTGSLRVSEQTLQSASSKVLKSMCENFYKYSKPKKIRVCVGTWNVNGGKQFRSIAFKNQTLTDWLLDAPKLAGIQEFQDKRSKPTDIFAIGFEEMVELNAGNIVSASTTNQKLWAVELQKTISRDNKYVLLASEQLVGVCLFVFIRPQHAPFIRDVAVDTVKTGMGGATGNKGAVAIRMLFHTTSLCFVCSHFAAGQSQVKERNEDFIEIARKLSFPMGRMLFSHDYVFWCGDFNYRIDLPNEEVKELIRQQNWDSLIAGDQLINQKNAGQVFRGFLEGKVTFAPTYKYDLFSDDYDTSEKCRTPAWTDRVLWRRRKWPFDRSAEDLDLLNASFQDESKILYTWTPGTLLHYGRAELKTSDHRPVVALIDIDIFEVEAEERQNIYKEVIAVQGPPDGTVLVSIKSSLPENNFFDDALIDELLQQFASFGEVILIRFVEDKMWVTFLEGSSALNVLSLNGKELLNRTITIALKSPDWIKNLEEEMSLEKISIALPSSTSSTLLGEDAEVAADFDMEGDVDDYSAEVEELLPQHLQPSSSSGLGTSPSSSPRTSPCQSPTISEGPVPSLPIRPSRAPSRTPGPPSAQSSPIDAQPATPLPQKDPAQPLEPKRPPPPRPVAPPTRPAPPQRPPPPSGARSPAPTRKEFGGIGAPPSPGVARREMEAPKSPGTTRKDNIGRSQPSPQAGLAGPGPAGYSTARPTIPPRAGVISAPQSHARASAGRLTPESQSKTSETSKGSTFLPEPLKPQAAFPPQSSLPPPAQRLQEPLVPVAAPMPQSGPQPNLETPPQPPPRSRSSHSLPSEASSQPQQEQPSG

SEQ ID NO: 85556 - protein, 131 aa, Homo sapiens
  Payload ID: 16999
  Gene Symbol: SYNJ1
  Gene Name: synaptojanin 1
  ENSP ID: ENSP00000387868
  MOD_RES (1)..(1): Any amino acid
XAGLAGPGPAGYSTARPTIPPRAGVISAPQSHARASAGRLTPESQSKTSETSKGSTFLPEPLKPQAAFPPQSSLPPPAQRLQEPLVPVAAPMPQSGPQPNLETPPQPPPRSRSSHSLPSEASSQPQEQPSG

SEQ ID NO: 85557 - protein, 187 aa, Homo sapiens
  Payload ID: 16999
  Gene Symbol: SYNJ1
  Gene Name: synaptojanin 1
  ENSP ID: ENSP00000388869
  MOD_RES (1)..(1): Any amino acid
XPPRPVAPPTRPAPPQRPPPPSGARSPAPTRKEFGAPKSPGTTRKDNIGRSQPSPQAGLAGPGPAGYSTARPTIPPRAGVISAPQSHARASAGRLTPESQSKTSETSKGSTFLPEPLKPQAAFPPQSSLPPPAQRLQEPLVPVAAPMPQSGPQPNLETPPQPPPRSRSSHSLPSEASSQPQQEQPSG

SEQ ID NO: 85558 - protein, 1612 aa, Homo sapiens
  Payload ID: 16999
  Gene Symbol: SYNJ1
  Gene Name: synaptojanin 1
  ENSP ID: ENSP00000409667
MRKRWACWSGSDAPGGCGGGCGRRRRRSRRKRAASEERRMAFSKGFRIYHKLDPPPFSLIVETRHKEECLMFESGAVAVLSSAEKEAIKGTYSKVLDAYGLLGVLRLNLGDTMLHYLVLVTGCMSVGKIQESEVFRVTSTEFISLRIDSSDEDRISEVRKVLNSGNFYFAWSASGISLDLSLNAHRSMQEQTTDNRFFWNQSLHLHLKHYGVNCDDWLLRLMCGGVEIRTIYAAHKQAKACLISRLSCERAGTRFNVRGTNDDGHVANFVETEQVVYLDDSVSSFIQIRGSVPLFWEQPGLQVGSHRVRMSRGFEANAPAFDRHFRTLKNLYGKQIIVNLLGSKEGEHMLSKAFQSHLKASEHAADIQMVNFDYHQMVKGGKAEKLHSVLKPQVQKFLDYGFFYFNGSEVQRCQSGTVRTNCLDCLDRTNSVQAFLGLEMLAKQLEALGLAEKPQLVTRFQEVFRSMWSVNGDSISKIYAGTGALEGKAKLKDGARSVTRTIQNNFFDSSKQEAIDVLLLGNTLNSDLADKARALLTTGSLRVSEQTLQSASSKVLKSMCENFYKYSKPKKIRVCVGTWNVNGGKQFRSIAFKNQTLTDWLLDAPKLAGIQEFQDKRSKPTDIFAIGFEEMVELNAGNIVSASTTNQKLWAVELQKTISRDNKYVLLASEQLVGVCLFVFIRPQHAPFIRDVAVDTVKTGMGGATGNKGAVAIRMLFHTTSLCFVCSHFAAGQSQVKERNEDFIEIARKLSFPMGRMLFSHDYVFWCGDFNYRIDLPNEEVKELIRQQNWDSLIAGDQLINQKNAGQVFRGFLEGKVTFAPTYKYDLFSDDYDTSEKCRTPAWTDRVLWRRRKWPFDRSAEDLDLLNASFQDESKILYTWTPGTLLHYGRAELKTSDHRPVVALIDIDIFEVEAEERQNIYKEVIAVQGPPDGTVLVSIKSSLPENNFFDDALIDELLQQFASFGEVILIRFVEDKMWVTFLEGSSALNVLSLNGKELLNRTITIALKSPDWIKNLEEEMSLEKISIALPSSTSSTLLGEDAEVAADFDMEGDVDDYSAEVEELLPQHLQPSSSSGLGTSPSSSPRTSPCQSPTISEGPVPSLPIRPSRAPSRTPGPPSAQSSPIDAQPATPLPQKDPAQPLEPKRPPPPRPVAPPTRPAPPQRPPPPSGARSPAPTRKEFGGIGAPPSPGVARREMEAPKSPGTTRKDNIGRSQPSPQAGLAGPGPAGYSTARPTIPPRAGVISAPQSHARASAGRLTPESQSKTSETSKGSTFLPEPLKPQAAFPPQSSLPPPAQRLQEPLVPVAAPMPQSGPQPNLETPPQPPPRSRSSHSLPSEASSQPQVKTNGISDGKRESPLKIDPFEDLSFNLLAVSKAQLSVQTSPVPTPDPKRLIQLPSATQSNVLSSVSCMPTMPPIPARSQSQENMRSSPNPFITGLTRTNPFSDRTAAPGNPFRAKSEESEATSWFSKEEPVTISPFPSLQPLGHNKSRASSSLDGFKDSFDLQGQSTLKISNPKGWVTFEEEEDFGVKGKSKSACSDLLGNQPSSFSGSNLTLNDDWNKGTNVSFCVLPSRRPPPPPVPLLPPGTSPPVDPFTTLASKASPTLDFTER

SEQ ID NO: 85559 - protein, 178 aa, Homo sapiens
  Payload ID: 16999
  Gene Symbol: SYNJ1
  Gene Name: synaptojanin 1
  ENSP ID: ENSP00000412707
MAFSKGFRIYHKLDPPPFSLIVETRHKEECLMFESGAVAVLSSAEKEAIKGTYSKVLDAYGLLGVLRLNLGDTMLHYLVLVTGCMSVGKIQESEVFRVTSTEFISLRIDSSDEDRISEVRKVLNSGNFYFAWSASGISLDLSLNAHRSMQEQTTDNRFFWNQSLHLHLKHYGVNCDDW

SEQ ID NO: 85560 - protein, 695 aa, Homo sapiens
  Payload ID: 16999
  Gene Symbol: SYNJ1
  Gene Name: synaptojanin 1
  ENSP ID: ENSP00000413649
MAFSKGFRIYHKLDPPPFSLIVETRHKEECLMFESGAVAVLSSAEKEAIKGTYSKVLDAYGLLGVLRLNLGDTMLHYLVLVTGCMSVGKIQESEVFRVTSTEFISLRIDSSDEDRISEVRKVLNSGNFYFAWSASGISLDLSLNAHRSMQEQTTDNRFFWNQSLHLHLKHYGVNCDDWLLRLMCGGVEIRTIYAAHKQAKACLISRLSCERAGTRFNVRGTNDDGHVANFVETEQVVYLDDSVSSFIQIRGSVPLFWEQPGLQVGSHRVRMSRGFEANAPAFDRHFRTLKNLYGKQIIVNLLGSKEGEHMLSKAFQSHLKASEHAADIQMVNFDYHQMVKGGKAEKLHSVLKPQVQKFLDYGFFYFNGSEVQRCQSGTVRTNCLDCLDRTNSVQAFLGLEMLAKQLEALGLAEKPQLVTRFQEVFRSMWSVNGDSISKIYAGTGALEGKAKAGKLKDGARSVTRTIQNNFFDSSKQEAIDVLLLGNTLNSDLADKARALLTTGSLRASSKVLKSMCENFYKYSKPKKIRVCVGTWNVNGGKQFRSIAFKNQTLTDWLLDAPKLAGIQEFQDKRSKPTDIFAIGFEEMVELNAGNIVSASTTNQKLWAVELQKTISRDNKYVLLASEQLVGVCLFVFIRPQHAPFIRDVAVDTVKTGMGGATGNKGAVAIRMLFHTTSLCFVCSHFAAGQSQVKER

SEQ ID NO: 85561 - protein, 1526 aa, Homo sapiens
  Payload ID: 16999
  Gene Symbol: SYNJ1
  Gene Name: synaptojanin 1
  ENSP ID: ENSP00000487560
MAFSKGFRIYHKLDPPPFSLIVETRHKEECLMFESGAVAVLSSAEKEAIKGTYSKVLDAYGLLGVLRLNLGDTMLHYLVLVTGCMSVGKIQESEVFRVTSTEFISLRIDSSDEDRISEVRKVLNSGNFYFAWSASGISLDLSLNAHRSMQEQTTDNRFFWNQSLHLHLKHYGVNCDDWLLRLMCGGVEIRTIYAAHKQAKACLISRLSCERAGTRFNVRGTNDDGHVANFVETEQVVYLDDSVSSFIQIRGSVPLFWEQPGLQVGSHRVRMSRGFEANAPAFDRHFRTLKNLYGKQIIVNLLGSKEGEHMLSKAFQSHLKASEHAADIQMVNFDYHQMVKGGKAEKLHSVLKPQVQKFLDYGFFYFNGSEVQRCQSGTVRTNCLDCLDRTNSVQAFLGLEMLAKQLEALGLAEKPQLVTRFQEVFRSMWSVNGDSISKIYAGTGALEGKAKAGKLKDGARSVTRTIQNNFFDSSKQEAIDVLLLGNTLNSDLADKARALLTTGSLRASSKVLKSMCENFYKYSKPKKIRVCVGTWNVNGGKQFRSIAFKNQTLTDWLLDAPKLAGIQEFQDKRSKPTDIFAIGFEEMVELNAGNIVSASTTNQKLWAVELQKTISRDNKYVLLASEQLVGVCLFVFIRPQHAPFIRDVAVDTVKTGMGGATGNKGAVAIRMLFHTTSLCFVCSHFAAGQSQVKERNEDFIEIARKLSFPMGRMLFSHDYVFWCGDFNYRIDLPNEEVKELIRQQNWDSLIAGDQLINQKNAGQVFRGFLEGKVTFAPTYKYDLFSDDYDTSEKCRTPAWTDRVLWRRRKWPFDRSAEDLDLLNASFQDESKILYTWTPGTLLHYGRAELKTSDHRPVVALIDIDIFEVEAEERQNIYKEVIAVQGPPDGTVLVSIKSSLPENNFFDDALIDELLQQFASFGEVILIRFVEDKMWVTFLEGSSALNVLSLNGKELLNRTITIALKSPDWIKNLEEEMSLEKISIALPSSTSSTLLGEDAEVAADFDMEGDVDDYSAEVEELLPQHLQPSSSSGLGTSPSSSPRTSPCQSPTISEGPVPSLPIRPSRAPSRTPGPPSAQSSPIDAQPATPLPQKDPAQPLEPKRPPPPRPVAPPTRPAPPQRPPPPSGRSQPSPQAGLAGPGPAGYSTARPTIPPRAGVISAPQSHARASAGRLTPESQSKTSETSKGSTFLPEPLKPQAAFPPQSSLPPPAQRLQEPLVPVAAPMPQSGPQPNLETPPQPPPRSRSSHSLPSEASSQPQVKTNGISDGKRESPLKIDPFEDLSFNLLAVSKAQLSVQTSPVPTPDPKRLIQLPSATQSNVLSSVSCMPTMPPIPARSQSQENMRSSPNPFITGLTRTNPFSDRTAAPGNPFRAKSEESEATSWFSKEEPVTISPFPSLQPLGHNKSRASSSLDGFKDSFDLQGQSTLKISNPKGWVTFEEEEDFGVKGKSKSACSDLLGNQPSSFSGSNLTLNDDWNKGTNVSFCVLPSRRPPPPPVPLLPPGTSPPVDPFTTLASKASPTLDFTER

SEQ ID NO: 85562 - protein, 1496 aa, Homo sapiens
  Payload ID: 17000
  Gene Symbol: SYNJ2
  Gene Name: synaptojanin 2
  Uniprot ID: O15056
  ENSP ID: ENSP00000347792
MALSKGLRLLGRLGAEGDCSVLLEARGRDDCLLFEAGTVATLAPEEKEVIKGQYGKLTDAYGCLGELRLKSGGTSLSFLVLVTGCTSVGRIPDAEIYKITATDFYPLQEEAKEEERLIALKKILSSGVFYFSWPNDGSRFDLTVRTQKQGDDSSEWGNSFFWNQLLHVPLRQHQVSCCDWLLKIICGVVTIRTVYASHKQAKACLVSRVSCERTGTRFHTRGVNDDGHVSNFVETEQMIYMDDGVSSFVQIRGSVPLFWEQPGLQVGSHHLRLHRGLEANAPAFDRHMVLLKEQYGQQVVVNLLGSRGGEEVLNRAFKKLLWASCHAGDTPMINFDFHQFAKGGKLEKLETLLRPQLKLHWEDFDVFTKGENVSPRFQKGTLRMNCLDCLDRTNTVQSFIALEVLHLQLKTLGLSSKPIVDRFVESFKAMWSLNGHSLSKVFTGSRALEGKAKVGKLKDGARSMSRTIQSNFFDGVKQEAIKLLLVGDVYGEEVADKGGMLLDSTALLVTPRILKAMTERQSEFTNFKRIRIAMGTWNVNGGKQFRSNVLRTAELTDWLLDSPQLSGATDSQDDSSPADIFAVGFEEMVELSAGNIVNASTTNKKMWGEQLQKAISRSHRYILLTSAQLVGVCLYIFVRPYHVPFIRDVAIDTVKTGMGGKAGNKGAVGIRFQFHSTSFCFICSHLTAGQSQVKERNEDYKEITQKLCFPMGRNVFSHDYVFWCGDFNYRIDLTYEEVFYFVKRQDWKKLLEFDQLQLQKSSGKIFKDFHEGAINFGPTYKYDVGSAAYDTSDKCRTPAWTDRVLWWRKKHPFDKTAGELNLLDSDLDVDTKVRHTWSPGALQYYGRAELQASDHRPVLAIVEVEVQEVDVGARERVFQEVSSFQGPLDATVVVNLQSPTLEEKNEFPEDLRTELMQTLGSYGTIVLVRINQGQMLVTFADSHSALSVLDVDGMKVKGRAVKIRPKTKDWLKGLREEIIRKRDSMAPVSPTANSCLLEENFDFTSLDYESEGDILEDDEDYLVDEFNQPGVSDSELGGDDLSDVPGPTALAPPSKSPALTKKKQHPTYKDDADLVELKRELEAVGEFRHRSPSRSLSVPNRPRPPQPPQRPPPPTGLMVKKSASDASISSGTHGQYSILQTARLLPGAPQQPPKARTGISKPYNVKQIKTTNAQEAEAAIRCLLEARGGASEEALSAVAPRDLEASSEPEPTPGAAKPETPQAPPLLPRRPPPRVPAIKKPTLRRTGKPLSPEEQFEQQTVHFTIGPPETSVEAPPVVTAPRVPPVPKPRTFQPGKAAERPSHRKPASDEAPPGAGASVPPPLEAPPLVPKVPPRRKKSAPAAFHLQVLQSNSQLLQGLTYNSSDSPSGHPPAAGTVFPQGDFLSTSSATSPDSDGTKAMKPEAAPLLGDYQDPFWNLLHHPKLLNNTWLSKSSDPLDSGTRSPKRDPIDPVSAGASAAKAELPPDHEHKTLGHWVTISDQEKRTALQVFDPLAKT

SEQ ID NO: 85563 - protein, 581 aa, Homo sapiens
  Payload ID: 17000
  Gene Symbol: SYNJ2
  Gene Name: synaptojanin 2
  ENSP ID: ENSP00000356079
MQTLGSYGTIVLVRINQGQMLVTFADSHSALSVLDVDGMKVKGRAVKIRPKTKDWLKGLREEIIRKRDSMAPVSPTANSCLLEENFDFTSLDYESEGDILEDDEDYLVDEFNQPGVSDSELGGDDLSDVPGPTALAPPSKSPALTKKKQHPTYKDDADLVELKRELEAVGEFRHRSPSRSLSVPNRPRPPQPPQRPPPPTGLMVKKSASDASISSGTHGQYSILQTARLLPGAPQQPPKARTGISKPYNVKQIKTTNAQEAEAAIRCLLEARGGASEEALSAVAPRDLEASSEPEPTPGAAKPETPQAPPLLPRRPPPRVPAIKKPTLRRTGKPLSPEEQFEQQTVHFTIGPPETSVEAPPVVTAPRVPPVPKPRTFQPGKAAERPSHRKPASDEAPPGAGASVPPPLEAPPLVPKVPPRRKKSAPAAFHLQVLQSNSQLLQGLTYNSSDSPSGHPPAAGTVFPQGDFLSTSSATSPDSDGTKAMKPEAAPLLGDYQDPFWNLLHHPKLLNNTWLSKSSDPLDSGTRSPKRDPIDPVSAGASAAKAELPPDHEHKTLGHWVTISDQEKRTALQVFDPLAKT

SEQ ID NO: 85564 - protein, 136 aa, Homo sapiens
  Payload ID: 17000
  Gene Symbol: SYNJ2
  Gene Name: synaptojanin 2
  ENSP ID: ENSP00000356080
  MOD_RES (1)..(1): Any amino acid
XGRDDCLLFEAGTVATLAPEEKEVIKGQYGKLTDAYGCLGELRLKSGGTSLSFLVLVTGCTSVGRIPDAEIYKITATDFYPLQEEAKEEERLIALKKILSSGVFYFSWPNDGSRFDLTVRTQKQGDDSSEWGNSFF

SEQ ID NO: 85565 - protein, 839 aa, Homo sapiens
  Payload ID: 17000
  Gene Symbol: SYNJ2
  Gene Name: synaptojanin 2
  ENSP ID: ENSP00000356089
MGGKAGNKGAVGIRFQFHSTSFCFICSHLTAGQSQVKERNEDYKEITQKLCFPMGRNVFSHDYVFWCGDFNYRIDLTYEEVFYFVKRQDWKKLLEFDQLQLQKSSGKIFKDFHEGAINFGPTYKYDVGSAAYDTSDKCRTPAWTDRVLWWRKKHPFDKTAGELNLLDSDLDVDTKVRHTWSPGALQYYGRAELQASDHRPVLAIVEVEVQEVDVGARERVFQEVSSFQGPLDATVVVNLQSPTLEEKNEFPEDLRTELMQTLGSYGTIVLVRINQGQMLVTFADSHSALSVLDVDGMKVKGRAVKIRPKTKDWLKGLREEIIRKRDSMAPVSPTANSCLLEENFDFTSLDYESEGDILEDDEDYLVDEFNQPGVSDSELGGDDLSDVPGPTALAPPSKSPALTKKKQHPTYKDDADLVELKRELEAVGEFRHRSPSRSLSVPNRPRPPQPPQRPPPPTGLMVKKSASDASISSGTHGQYSILQTARLLPGAPQQPPKARTGISKPYNVKQIKTTNAQEAEAAIRCLLEARGGASEEALSAVAPRDLEASSEPEPTPGAAKPETPQAPPLLPRRPPPRVPAIKKPTLRRTGKPLSPEEQFEQQTVHFTIGPPETSVEAPPVVTAPRVPPVPKPRTFQPGKAAERPSHRKPASDEAPPGAGASVPPPLEAPPLVPKVPPRRKKSAPAAFHLQVLQSNSQLLQGLTYNSSDSPSGHPPAAGTVFPQGDFLSTSSATSPDSDGTKAMKPEAAPLLGDYQDPFWNLLHHPKLLNNTWLSKSSDPLDSGTRSPKRDPIDPVSAGASAAKAELPPDHEHKTLGHWVTISDQEKRTALQVFDPLAKT

SEQ ID NO: 85566 - protein, 92 aa, Homo sapiens
  Payload ID: 17000
  Gene Symbol: SYNJ2
  Gene Name: synaptojanin 2
  ENSP ID: ENSP00000411202
MFLYASGPAPPAGTCRWGGQGGTSLSFLVLVTGCTSVGRIPDAEIYKITATDFYPLQEEAKEEERLIALKKILSSGVFYFSWPNDGSRFDLT

SEQ ID NO: 85567 - protein, 165 aa, Homo sapiens
  Payload ID: 17000
  Gene Symbol: SYNJ2
  Gene Name: synaptojanin 2
  ENSP ID: ENSP00000436657
  MOD_RES (1)..(1): Any amino acid
XVSCCDWLLKIICGVVTIRTVYASHKQAKACLVSRVSCERTGTRFHTRGVNDDGHVSNFVETEQMIYMDDGVSSFVQIRGSVPLFWEQPGLQVGSHHLRLHRGLEANAPAFDRHMVLLKEQYGQQVVVNLLGSRGGEEVLNRAFKVRPGCPLHSWAGRQVAMVER

SEQ ID NO: 85568 - protein, 145 aa, Homo sapiens
  Payload ID: 17001
  Gene Symbol: SYNJ2BP
  Gene Name: synaptojanin 2 binding protein
  Uniprot ID: P57105
  ENSP ID: ENSP00000256366
MNGRVDYLVTEEEINLTRGPSGLGFNIVGGTDQQYVSNDSGIYVSRIKENGAAALDGRLQEGDKILSVNGQDLKNLLHQDAVDLFRNAGYAVSLRVQHRLQVQNGPIGHRGEGDPSGIPIFMVLVPVFALTMVAAWAFMRYRQQL

SEQ ID NO: 85569 - protein, 318 aa, Homo sapiens
  Payload ID: 17002
  Gene Symbol: SYCE1
  Gene Name: synaptonemal complex central element protein 1
  ENSP ID: ENSP00000303978
MAGRSLTSKAEPTAGAVDRAEKAGGQDTSSQKIEDLMEMVQKLQKVGSLEPRVEVLINRINEVQQAKKKANKDLGEARTICEALQKELDSLHGEKVHLKEILSKKQETLRILRLHCQEKESEAHRKHTMLQECKERISALNLQIEEEKNKQRQLRLAFEEQLEDLMGQHKDLWDFHMPERLAKEICALDSSKEQLLKEEKLVKATLEDVKHQLCSLCGAEGPSTLDEGLFLRSQEAAATVQLFQEEHRKAEELLAAAAQRHQQLQQKCQQQQQKRQRLKEELEKHGMQVPAQAQSTQEEEAGPGDVAPRPGRPVTWWS

SEQ ID NO: 85570 - protein, 351 aa, Homo sapiens
  Payload ID: 17002
  Gene Symbol: SYCE1
  Gene Name: synaptonemal complex central element protein 1
  Uniprot ID: Q8N0S2
  ENSP ID: ENSP00000341282
MAGRSLTSKAEPTAGAVDRAEKAGGQDTSSQKIEDLMEMVQKLQKVGSLEPRVEVLINRINEVQQAKKKANKDLGEARTICEALQKELDSLHGEKVHLKEILSKKQETLRILRLHCQEKESEAHRKHTMLQECKERISALNLQIEEEKNKQRQLRLAFEEQLEDLMGQHKDLWDFHMPERLAKEICALDSSKEQLLKEEKLVKATLEDVKHQLCSLCGAEGPSTLDEGLFLRSQEAAATVQLFQEEHRKAEELLAAAAQRHQQLQQKCQQQQQKRQRLKEELEKHGMQVPAQAQSTQEEEAGPGDVASPKPLKGERPGAAHQAGPDVLIGQEDTLHPDLSPRGFQEIKELF

SEQ ID NO: 85571 - protein, 282 aa, Homo sapiens
  Payload ID: 17002
  Gene Symbol: SYCE1
  Gene Name: synaptonemal complex central element protein 1
  Uniprot ID: Q8N0S2
  ENSP ID: ENSP00000357503
MEMVQKLQKVGSLEPRVEVLINRINEVQQAKKKANKDLGEARTICEALQKELDSLHGEKVHLKEILSKKQETLRILRLHCQEKESEAHRKHTMLQECKERISALNLQIEEEKNKQRQLRLAFEEQLEDLMGQHKDLWDFHMPERLAKEICALDSSKEQLLKEEKLVKATLEDVKHQLCSLCGAEGPSTLDEGLFLRSQEAAATVQLFQEEHRKAEELLAAAAQRHQQLQQKCQQQQQKRQRLKEELEKHGMQVPAQAQSTQEEEAGPGDVAPRPGRPVTWWS

SEQ ID NO: 85572 - protein, 124 aa, Homo sapiens
  Payload ID: 17002
  Gene Symbol: SYCE1
  Gene Name: synaptonemal complex central element protein 1
  ENSP ID: ENSP00000411779
MAGLCYRRQPSSACGRGGLRGGSRGASRVCVRPALCYGAPGSSLRVAAAGAAGSGWRRAAGPGERGLEDEEDWVPGGNRTGSASTATVRGLRALDPRAACASVSGWVAPSVPWGCCGPRPGWAR

SEQ ID NO: 85573 - protein, 242 aa, Homo sapiens
  Payload ID: 17003
  Gene Symbol: SYCE1L
  Gene Name: synaptonemal complex central element protein 1-like
  Uniprot ID: A8MT33
  ENSP ID: ENSP00000367911
MAGKLKPLNVEAPEATEEAEGQAKSLKTEDLLAMVIKLQKEGSLEPQIEDLISRINDLQQAKKKSSEELRETHSLWEALHRELDSLNGEKVHLEEVLGKKQEALRILQMHCQEKESEAQRLDVRGQLEDLMGQHKDLWEFHMLEQRLAREIRALERSKEQLLSERRLVRAKLREVERRLHSPPEVEGAMAVNDGLKAELEIFGEQVRSAPEVGAGEGEAGPELPRARDEEDPEPPVAAPDAL

SEQ ID NO: 85574 - protein, 24 aa, Homo sapiens
  Payload ID: 17003
  Gene Symbol: SYCE1L
  Gene Name: synaptonemal complex central element protein 1-like
  ENSP ID: ENSP00000454349
IFGEQVRSAPEVGAGEGEPPAGRT

SEQ ID NO: 85575 - protein, 218 aa, Homo sapiens
  Payload ID: 17004
  Gene Symbol: SYCE2
  Gene Name: synaptonemal complex central element protein 2
  Uniprot ID: Q6PIF2
  ENSP ID: ENSP00000293695
MERQGVDVPHVKCKDQEPQPLGESKEHPRWEENCEEEAGGGPASASCQLTVLEGKSGLYFSSLDSSIDILQKRAQELIENINKSRQKDHALMTNFRNSLKTKVSDLTEKLEERIYQIYNDHNKIIQEKLQEFTQKMAKISHLETELKQVCHSVETVYKDLCLQPEQSLRLRWGPDHSRGKSPPRPGNSQPPDVFVSSVAETTSQATASEVQTNRDGEC

SEQ ID NO: 85576 - protein, 54 aa, Homo sapiens
  Payload ID: 17004
  Gene Symbol: SYCE2
  Gene Name: synaptonemal complex central element protein 2
  ENSP ID: ENSP00000466359
  MOD_RES (1)..(1): Any amino acid
XKDLCLQPESLRLRWGPDHSRGKSPPRPGNSQPPDVFVSSVAETTSQVVTSKPA

SEQ ID NO: 85577 - protein, 88 aa, Homo sapiens
  Payload ID: 17005
  Gene Symbol: SYCE3
  Gene Name: synaptonemal complex central element protein 3
  Uniprot ID: A1L190
  ENSP ID: ENSP00000385122
MDDADPEERNYDNMLKMLSDLNKDLEKLLEEMEKISVQATWMAYDMVVMRTNPTLAESMRRLEDAFVNCKEEMEKNWQELLHETKQRL

SEQ ID NO: 85578 - protein, 88 aa, Homo sapiens; identical to SEQ ID NO: 85577
  Payload ID: 17005
  Gene Symbol: SYCE3
  Gene Name: synaptonemal complex central element protein 3
  Uniprot ID: A1L190
  ENSP ID: ENSP00000385480

SEQ ID NO: 85579 - protein, 976 aa, Homo sapiens
  Payload ID: 17006
  Gene Symbol: SYCP1
  Gene Name: synaptonemal complex protein 1
  Uniprot ID: Q15431
  ENSP ID: ENSP00000358531
MEKQKPFALFVPPRSSSSQVSAVKPQTLGGDSTFFKSFNKCTEDDFEFPFAKTNLSKNGENIDSDPALQKVNFLPVLEQVGNSDCHYQEGLKDSDLENSEGLSRVYSKLYKEAEKIKKWKVSTEAELRQKESKLQENRKIIEAQRKAIQELQFGNEKVSLKLEEGIQENKDLIKENNATRHLCNLLKETCARSAEKTKKYEYEREETRQVYMDLNNNIEKMITAFEELRVQAENSRLEMHFKLKEDYEKIQHLEQEYKKEINDKEKQVSLLLIQITEKENKMKDLTFLLEESRDKVNQLEEKTKLQSENLKQSIEKQHHLTKELEDIKVSLQRSVSTQKALEEDLQIATKTICQLTEEKETQMEESNKARAAHSFVVTEFETTVCSLEELLRTEQQRLEKNEDQLKILTMELQKKSSELEEMTKLTNNKEVELEELKKVLGEKETLLYENKQFEKIAEELKGTEQELIGLLQAREKEVHDLEIQLTAITTSEQYYSKEVKDLKTELENEKLKNTELTSHCNKLSLENKELTQETSDMTLELKNQQEDINNNKKQEERMLKQIENLQETETQLRNELEYVREELKQKRDEVKCKLDKSEENCNNLRKQVENKNKYIEELQQENKALKKKGTAESKQLNVYEIKVNKLELELESAKQKFGEITDTYQKEIEDKKISEENLLEEVEKAKVIADEAVKLQKEIDKRCQHKIAEMVALMEKHKHQYDKIIEERDSELGLYKSKEQEQSSLRASLEIELSNLKAELLSVKKQLEIEREEKEKLKREAKENTATLKEKKDKKTQTFLLETPEIYWKLDSKAVPSQTVSRNFTSVDHGISKDKRDYLWTSAKNTLSTPLPKAYTVKTPTKPKLQQRENLNIPIEESKKKRKMAFEFDINSDSSETTDLLSMVSEEETLKTLYRNNNPPASHLCVKTPKKAPSSLTTPGSTLKFGAIRKMREDRWAVIAKMDRKKKLKEAEKLFV

SEQ ID NO: 85580 - protein, 976 aa, Homo sapiens; identical to SEQ ID NO: 85579
  Payload ID: 17006
  Gene Symbol: SYCP1
  Gene Name: synaptonemal complex protein 1
  Uniprot ID: Q15431
  ENSP ID: ENSP00000358535

SEQ ID NO: 85581 - protein, 792 aa, Homo sapiens
  Payload ID: 17006
  Gene Symbol: SYCP1
  Gene Name: synaptonemal complex protein 1
  ENSP ID: ENSP00000410011
MEKQKPFALFVPPRSSSSQVSAVKPQTLGGDSTFFKSFNKCTEDDFEFPFAKTNLSKNGENIDSDPALQKVNFLPVLEQVGNSDCHYQEGLKDSDLENSEGLSRVYSKLYKEAEKIKKWKVSTEAELRQKESKLQENRKIIEAQRKAIQELQFGNEKVSLKLEEGIQENKDLIKENNATRHLCNLLKETCARSAEKTKKYEYEREETRQVYMDLNNNIEKMITAFEELRVQAENSRLEMHFKLKEDYEKIQHLEQEYKKEINDKEKQVSLLLIQITEKENKMKDLTFLLEESRDKVNQLEEKTKLQSENLKQSIEKQHHLTKELEDIKVSLQRSVSTQKALEEDLQIATKTICQLTEEKETQMEESNKARAAHSFVVTEFETTVCSLEELLRTEQQRLEKNEDQLKILTMELQKKSSELEEMTKLTNNKEVELEELKKVLGEKETLLYENKQFEKIAEELKGTEQELIGLLQAREKEVHDLEIQLTAITTSEQYYSKEVKDLKTELENEKLKNTELTSHCNKLSLENKELTQETSDMTLELKNQQEDINNNKKQEERMLKQIENLQETETQLRNELEYVREELKQKRDEVKCKLDKSEENCNNLRKQVENKNKYIEELQQENKALKKKGTAESKQLNVYEIKVNKLELELESAKQKFGEITDTYQKEIEDKKISEENLLEEVEKAKVIADEAVKLQKEIDKRCQHKIAEMVALMEKHKHQYDKIIEERDSELGLYKSKEQEQSSLRASLEIELSNLKAELLSVKKQLEIEREEKEKLKREAKENTATLKEKK

SEQ ID NO: 85582 - protein, 976 aa, Homo sapiens; identical to SEQ ID NO: 85579
  Payload ID: 17006
  Gene Symbol: SYCP1
  Gene Name: synaptonemal complex protein 1
  Uniprot ID: Q15431
  ENSP ID: ENSP00000480997

SEQ ID NO: 85583 - protein, 951 aa, Homo sapiens
  Payload ID: 17006
  Gene Symbol: SYCP1
  Gene Name: synaptonemal complex protein 1
  ENSP ID: ENSP00000482532
MEKQKPFALFVPPRSSSSQVSAVKPQTLGGDSTFFKSFNKCTEDDFEFPFAKTNLSKNGENIDSDPALQKVNFLPVLEQVGNSDCHYQEGLKDSDLENSEGLSRVYSKLYKEAEKIKKWKVSTEAELRQKESKLQENRKIIEAQRKAIQELQFGNEKVSLKLEEGIQENKDLIKENNATRHLCNLLKETCARSAEKTKKYEYEREETRQVYMDLNNNIEKMITAFEELRVQAENSRLEMHFKLKEDYEKIQHLEQEYKKEINDKEKQVSLLLIQITEKENKMKDLTFLLEESRDKVNQLEEKTKLQSENLKQSIEKQHHLTKELEDIKVSLQRSVSTQKALEEDLQIATKTICQLTEEKETQMEESNKARAAHSFVVTEFETTVCSLEELLRTEQQRLEKNEDQLKILTMELQKKSSELEEMTKLTNNKEVELEELKKVLGEKETLLYENKQFEKIAEELKGTEQELIGLLQAREKEVHDLEIQLTAITTSEQYYSKEVKDLKTELENEKLKNTELTSHCNKLSLENKELTQETSDMTLELKNQQEDINNNKKQEERMLKQIENLQETETQLRNELEYVREELKQKRDEVKCKLDKSEENCNNLRKQVENKNKYIEELQQENKALKKKGTAESKQLNVYEIKVNKLELELESAKQKFGEITDTYQKEIEDKKISEENLLEEVEKAKVIADEAVKLQKEIDKRCQHKIAEMVALMEKHKHQYDKIIEERDSELGLYKSKEQEQSSLRASLEKLKREAKENTATLKEKKDKKTQTFLLETPEIYWKLDSKAVPSQTVSRNFTSVDHGISKDKRDYLWTSAKNTLSTPLPKAYTVKTPTKPKLQQRENLNIPIEESKKKRKMAFEFDINSDSSETTDLLSMVSEEETLKTLYRNNNPPASHLCVKTPKKAPSSLTTPGSTLKFGAIRKMREDRWAVIAKMDRKKKLKEAEKLFV

SEQ ID NO: 85584 - protein, 1530 aa, Homo sapiens
  Payload ID: 17007
  Gene Symbol: SYCP2
  Gene Name: synaptonemal complex protein 2
  Uniprot ID: Q9BX26
  ENSP ID: ENSP00000350162
MPIRPDLQQLEKCIDDALRKNDFKPLKTLLQIDICEDVKIKCSKQFFHKVDNLICRELNKEDIHNVSAILVSVGRCGKNISVLGQAGLLTMIKQGLIQKMVAWFEKSKDIIQSQGNSKDEAVLNMIEDLVDLLLVIHDVSDEGKKQVVESFVPRICSLVIDSRVNICIQQEIIKKMNAMLDKMPQDARKILSNQEMLILMSSMGERILDAGDYDLQVGIVEALCRMTTEKQRQELAHQWFSMDFIAKAFKRIKDSEFETDCRIFLNLVNGMLGDKRRVFTFPCLSAFLDKYELQIPSDEKLEEFWIDFNLGSQTLSFYIAGDNDDHQWEAVTVPEEKVQIYSIEVRESKKLLTIILKNTVKISKREGKELLLYFDASLEITNVTQKIFGATKHRESIRKQGISVAKTSLHILFDASGSQILVPESQISPVGEELVSLKEKSKSPKEFAKPSKYIKNSDKGNRNNSQLEKTTPSKRKMSEASMIVSGADRYTMRSPVLFSNTSIPPRRRRIKPPLQMTSSAEKPSVSQTSENRVDNAASLKSRSSEGRHRRDNIDKHIKTAKCVENTENKNVEFPNQNFSELQDVIPDSQAAEKRDHTILPGVLDNICGNKIHSKWACWTPVTNIELCNNQRASTSSGDTLNQDIVINKKLTKQKSSSSISDHNSEGTGKVKYKKEQTDHIKIDKAEVEVCKKHNQQQNHPKYSGQKNTENAKQSDWPVESETTFKSVLLNKTIEESLIYRKKYILSKDVNTATCDKNPSASKNVQSHRKAEKELTSELNSWDSKQKKMREKSKGKEFTNVAESLISQINKRYKTKDDIKSTRKLKESLINSGFSNKPVVQLSKEKVQKKSYRKLKTTFVNVTSECPVNDVYNFNLNGADDPIIKLGIQEFQATAKEACADRSIRLVGPRNHDELKSSVKTKDKKIITNHQKKNLFSDTETEYRCDDSKTDISWLREPKSKPQLIDYSRNKNVKNHKSGKSRSSLEKGQPSSKMTPSKNITKKMDKTIPEGRIRLPRKATKTKKNYKDLSNSESECEQEFSHSFKENIPVKEENIHSRMKTVKLPKKQQKVFCAETEKELSKQWKNSSLLKDAIRDNCLDLSPRSLSGSPSSIEVTRCIEKITEKDFTQDYDCITKSISPYPKTSSLESLNSNSGVGGTIKSPKNNEKNFLCASESCSPIPRPLFLPRHTPTKSNTIVNRKKISSLVLTQETQNSNSYSDVSSYSSEERFMEIESPHINENYIQSKREESHLASSLSKSSEGREKTWFDMPCDATHVSGPTQHLSRKRIYIEDNLSNSNEVEMEEKGERRANLLPKKLCKIEDADHHIHKMSESVSSLSTNDFSIPWETWQNEFAGIEMTYETYERLNSEFKRRNNIRHKMLSYFTTQSWKTAQQHLRTMNHQSQDSRIKKLDKFQFIIIEELENFEKDSQSLKDLEKEFVDFWEKIFQKFSAYQKSEQQRLHLLKTSLAKSVFCNTDSEETVFTSEMCLMKEDMKVLQDRLLKDMLEEELLNVRRELMSVFMSHERNANV

SEQ ID NO: 85585 - protein, 1530 aa, Homo sapiens; identical to SEQ ID NO: 85584
  Payload ID: 17007
  Gene Symbol: SYCP2
  Gene Name: synaptonemal complex protein 2
  Uniprot ID: Q9BX26
  ENSP ID: ENSP00000360040

SEQ ID NO: 85586 - protein, 118 aa, Homo sapiens
  Payload ID: 17007
  Gene Symbol: SYCP2
  Gene Name: synaptonemal complex protein 2
  ENSP ID: ENSP00000399300
MPIRPDLQLEKCIDDALRKNDFKPLKTLLQIDICEDVKIKCSKQFFHKVDNLICRELNKEDIHNVSAILVSVGRCGKNISVLGQAGLLTMIKQGLIQKMVAWFEKSKDIIQSQGNSKD

SEQ ID NO: 85587 - protein, 1023 aa, Homo sapiens
  Payload ID: 17007
  Gene Symbol: SYCP2
  Gene Name: synaptonemal complex protein 2
  ENSP ID: ENSP00000402456
MPIRPDLQQLEKCIDDALRKNDFKPLKTLLQIDICEDVKIKCSKQFFHKVDNLICRELNKEDIHNVSAILVSVGRCGKNISVLGQAGLLTMIKQGLIQKMVAWFEKSKDIIQSQGNSKDEAVLNMIEDLVDLLLVIHDVSDEGKKQVVESFVPRICSLVIDSRVNICIQQEIIKKMNAMLDKMPQDARKILSNQEMLILMSSMGERILDAGDYDLQVGIVEALCRMTTEKQRQELAHQWFSMDFIAKAFKRIKDSEFETDCRIFLNLVNGMLGDKRRVFTFPCLSAFLDKYELQIPSDEKLEEFWIDFNLGSQTLSFYIAGDNDDHQWEAVTVPEEKVQIYSIEVRESKKLLTIILKNTVKISKREGKELLLYFDASLEITNVTQKIFGATKHRESIRKQGISVAKTSLHILFDASGSQILVPESQISPVGEELVSLKEKSKSPKEFAKPSKYIKNSDKGNRNNSQLEKTTPSKRKMSEASMIVSGADRYTMRSPVLFSNTSIPPRRRRIKPPLQMTSSAEKPSVSQTSENRVDNAASLKSRSSEGRHRRDNIDKHIKTAKCVENTENKNVEFPNQNFSELQDVIPDSQAAEKRDHTILPGVLDNICGNKIHSKWACWTPVTNIELCNNQRASTSSGDTLNQDIVINKKLTKQKSSSSISDHNSEGTGKVKYKKEQTDHIKIDKAEVEVCKKHNQQQNHPKYSGQKNTENAKQSDWPVESETTFKSVLLNKTIEESLIYRKKYILSKDVNTATCDKNPSASKNVQSHRKAEKELTSELNSWDSKQKKMREKSKGKEFTNVAESLISQINKRYKTKDDIKSTRKLKESLINSGFSNKPVVQLSKEKVQKKSYRKLKTTFVNVTSECPVNDVYNFNLNGADDPIIKLGIQEFQATAKEACADRSIRLVGPRNHDELKSSVKTKDKKIITNHQKKNLFSDTETEYRCDDSKTDISWLREPKSKPQLIDYSRNKNVKNHKSGKSRSSLEKGQPSSKMTPSKNITKKMDKTIPEGRIRLPRKATKTKK

SEQ ID NO: 85588 - protein, 208 aa, Homo sapiens
  Payload ID: 17007
  Gene Symbol: SYCP2
  Gene Name: synaptonemal complex protein 2
  ENSP ID: ENSP00000404358
EKTWFDMPCDATHVSVSESVSSLSTNDFSIPWETWQNEFAGIEMTYETYERLNSEFKRRNNIRHKMLSYFTTQSWKTAQQHLRTMNHQSQDSRIKKLDKFQFIIIEELENFEKDSQSLKDLEKEFVDFWEKIFQKFSAYQKSEQQRLHLLKTSLAKSVFCNTDSEETVFTSEMCLMKEDMKVLQDRLLKDMLEEELLNVRRELMSVFM

SEQ ID NO: 85589 - protein, 812 aa, Homo sapiens [sequence omitted]

SEQ ID NO: 85590 - protein, 291 aa, Homo sapiens
  Payload ID: 17008
  Gene Symbol: SYCP2L
  Gene Name: synaptonemal complex protein 2-like
  Uniprot ID: Q5T4T6
  ENSP ID: ENSP00000340320
MQAKNKDALQPIKEDRTGKAQDDAFWLQSLITDAFHDKGFQKIKEYFQQKESHFPQKYNRLLLYRLDRSINKELDKNEFQSVSLLLKCIQRFLVDGLKEDEPLLIRQGLIPKLVSWFERTTGILTSEGLASDTSLICVIEDFFDTALIISRSSSEGKIQMLDSFLLSLGFLVTEKTVNHLLQQEGLKTFNCILHAVPREERKKFPLSEGMCHLMKDLARTLLTVGDYDQQVAISEALCRLTIKKSRDELVHKWFDDEVIAEAFKEIKDREFETDSRRFLNHLNNRLGDQRR

SEQ ID NO: 85591 - protein, 109 aa, Homo sapiens
  Payload ID: 17008
  Gene Symbol: SYCP2L
  Gene Name: synaptonemal complex protein 2-like
  ENSP ID: ENSP00000417870
VSWFERTTGILTSEGLASDTSLICVIEDFFDTALIISRSSSEGKIQMLDSFLLSLGFLVTEKTVNHLLQQEGLKTFNCILHAVPREERKKFPLSEGMCHLMTVDVFSIT

SEQ ID NO: 85592 - protein, 811 aa, Homo sapiens
  Payload ID: 17008
  Gene Symbol: SYCP2L
  Gene Name: synaptonemal complex protein 2-like
  ENSP ID: ENSP00000440676
TQKNKDALQPIKEDRTGKAQDDAFWLQSLITDAFHDKGFQKIKEYFQQKESHFPQKYNRLLLYRLDRSINKELDKNEFQSVSLLLKCIQRFLVDGLKEDEPLLIRQGLIPKLVSWFERTTGILTSEGLASDTSLICVIEDFFDTALIISRSSSEGKIQMLDSFLLSLGFLVTEKTVNHLLQQEGLKTFNCILHAVPREERKKFPLSEGMCHLMKDLARTLLTVGDYDQQVAISEALCRLTIKKSRDELVHKWFDDEVIAEAFKEIKDREFETDSRRFLNHLNNRLGDQRRVYSFPCIAAFADEHEMRKPADEKLEKFWIDFNLGSQSVTFYIDNAENTLWDSVTLPKEAVMNFSITETEKIKIFIIYLKKPMIISYKEVMKIEIHFDLQFNISQVSIQALGEDKQMLPDQTKISSELFSKSDKEDRESPSGLERETEQAEESTNMVEFMSAEDDRCLITLHLNDQSEPPVIGEPASDSHLQPVPPFGVPDFPQQPKSHYRKHLFSESNQDSSTSELSWTSNQKKKSLKSYSSRKKTRTRSNLRILPVFPPSSGSGHEKDQAKLLSPSEKEIPEQNNTTSPKTSEQKFQDSFAFLTAEDSAQKTELQDPHSLSELSSLKHSEDEEKPKIVNQESLTESTSLKHKLRNLEDKDIPEGSFAKSQQSRLEEEVAPGSPFSITEERELPEGISTSSLEVVPENLNGSAILPTFENFTKKRKRKYELRYRKRPFNSENAKKAPDCLIKLLNQMQLFRLNKLERFQNLVLQELSSLKQDIQALEHLEKEVLEFWGKQSADLQSFCDLQVLRFNSTQTS

SEQ ID NO: 85593 - protein, 236 aa, Homo sapiens
  Payload ID: 17009
  Gene Symbol: SYCP3
  Gene Name: synaptonemal complex protein 3
  Uniprot ID: Q8IZU3
  ENSP ID: ENSP00000266743
MVSSGKKYSRKSGKPSVEDQFTRAYDFETEDKKDLSGSEEDVIEGKTAVIEKRRKKRSSAGVVEDMGGEVQNMLEGVGVDINKALLAKRKRLEMYTKASLKTSNQKIEHVWKTQQDQRQKLNQEYSQQFLTLFQQWDLDMQKAEEQEEKILNMFRQQQKILQQSRIVQSQRLKTIKQLYEQFIKSMEELEKNHDNLLTGAQNEFKKEMAMLQKKIMMETQQQEIASVRKSLQSMLF

SEQ ID NO: 85594 - protein, 236 aa, Homo sapiens; identical to SEQ ID NO: 85593
  Payload ID: 17009
  Gene Symbol: SYCP3
  Gene Name: synaptonemal complex protein 3
  Uniprot ID: Q8IZU3
  ENSP ID: ENSP00000376655

SEQ ID NO: 85595 - protein, 236 aa, Homo sapiens; identical to SEQ ID NO: 85593
  Payload ID: 17009
  Gene Symbol: SYCP3
  Gene Name: synaptonemal complex protein 3
  Uniprot ID: Q8IZU3
  ENSP ID: ENSP00000376658

SEQ ID NO: 85596 - protein, 313 aa, Homo sapiens
  Payload ID: 17010
  Gene Symbol: SYP
  Gene Name: synaptophysin
  Uniprot ID: P08247
  ENSP ID: ENSP00000263233
MLLLADMDVVNQLVAGGQFRVVKEPLGFVKVLQWVFAIFAFATCGSYSGELQLSVDCANKTESDLSIEVEFEYPFRLHQVYFDAPTCRGGTTKVFLVGDYSSSAEFFVTVAVFAFLYSMGALATYIFLQNKYRENNKGPMLDFLATAVFAFMWLVSSSAWAKGLSDVKMATDPENIIKEMPVCRQTGNTCKELRDPVTSGLNTSVVFGFLNLVLWVGNLWFVFKETGWAAPFLRAPPGAPEKQPAPGDAYGDAGYGQGPGGYGPQDSYGPQGGYQPDYGQPAGSGGSGYGPQGDYGQQGYGPQGAPTSFSNQM

SEQ ID NO: 85597 - protein, 40 aa, Homo sapiens
  Payload ID: 17010
  Gene Symbol: SYP
  Gene Name: synaptophysin
  ENSP ID: ENSP00000365480
MLLLADMDVVNQLVAGGQFRVVKEPLGFVKVLQWAAPSVL

SEQ ID NO: 85598 - protein, 313 aa, Homo sapiens; identical to SEQ ID NO: 85596
  Payload ID: 17010
  Gene Symbol: SYP
  Gene Name: synaptophysin
  Uniprot ID: P08247
  ENSP ID: ENSP00000418169

SEQ ID NO: 85599 - protein, 203 aa, Homo sapiens
  Payload ID: 17010
  Gene Symbol: SYP
  Gene Name: synaptophysin
  ENSP ID: ENSP00000418387
  MOD_RES (1)..(1): Any amino acid
XADMDVVNQLVAGGQFRVVKEPLGFVKVLQWDFLATAVFAFMWLVSSSAWAKGLSDVKMATDPENIIKEMPVCRQTGNTCKELRDPVTSGLNTSVVFGFLNLVLWVGNLWFVFKETGWAAPFLRAPPGAPEKQPAPGDAYGDAGYGQGPGGYGPQDSYGPQGGYQPDYGQPAGSGGSGYGPQGDYGQQGYGPQGAPTSFSNQM

SEQ ID NO: 85600 - protein, 118 aa, Homo sapiens
  Payload ID: 17010
  Gene Symbol: SYP
  Gene Name: synaptophysin
  ENSP ID: ENSP00000418987
MLLLADMDVVNQLVAGGQFRVVKEPLGFVKVLQWVFAIFAFATCGSYSGELQLSVDCANKTESDLSIEVEFEYPFRCAPTLGYQQTWERKGQGGTGQYLPPQVAPAQLPPRGYIHWDH

SEQ ID NO: 85601 - protein, 118 aa, Homo sapiens; identical to SEQ ID NO: 85600
  Payload ID: 17010
  Gene Symbol: SYP
  Gene Name: synaptophysin
  ENSP ID: ENSP00000420774

SEQ ID NO: 85602 - protein, 259 aa, Homo sapiens
  Payload ID: 17011
  Gene Symbol: SYPL1
  Gene Name: synaptophysin-like 1
  Uniprot ID: Q16563
  ENSP ID: ENSP00000011473
MAPNIYLVRQRISRLGQRMSGFQINLNPLKEPLGFIKVLEWIASIFAFATCGGFKGQTEIQVNCPPAVTENKTVTATFGYPFRLNEASFQPPPGVNICDVNWKDYVLIGDYSSSAQFYVTFAVFVFLYCIAALLLYVGYTSLYLDSRKLPMIDFVVTLVATFLWLVSTSAWAKALTDIKIATGHNIIDELPPCKKKAVLCYFGSVTSMGSLNVSVIFGFLNMILWGGNAWFVYKETSLHSPSNTSAPHSQGGIPPPTGI

SEQ ID NO: 85603 - protein, 241 aa, Homo sapiens
  Payload ID: 17011
  Gene Symbol: SYPL1
  Gene Name: synaptophysin-like 1
  Uniprot ID: Q16563
  ENSP ID: ENSP00000388336
MSGFQINLNPLKEPLGFIKVLEWIASIFAFATCGGFKGQTEIQVNCPPAVTENKTVTATFGYPFRLNEASFQPPPGVNICDVNWKDYVLIGDYSSSAQFYVTFAVFVFLYCIAALLLYVGYTSLYLDSRKLPMIDFVVTLVATFLWLVSTSAWAKALTDIKIATGHNIIDELPPCKKKAVLCYFGSVTSMGSLNVSVIFGFLNMILWGGNAWFVYKETSLHSPSNTSAPHSQGGIPPPTGI

SEQ ID NO: 85604 - protein, 148 aa, Homo sapiens
  Payload ID: 17011
  Gene Symbol: SYPL1
  Gene Name: synaptophysin-like 1
  ENSP ID: ENSP00000417473
  MOD_RES (1)..(1): Any amino acid
XNICDVNWKDYVLIGDYSSSAQFYVTFAVFVFLYCIAALLLYVGYTSLYLDSRKLPMIDFVVTLVATFLWLVSTSAWAKALTDIKIATGHNIIDELPPCKKKAVLCYFGSVTSMGSLNVSVMEFRYVAQTGVQWHDLGTLQPPPPGFK

SEQ ID NO: 85605 - protein, 224 aa, Homo sapiens
  Payload ID: 17011
  Gene Symbol: SYPL1
  Gene Name: synaptophysin-like 1
  ENSP ID: ENSP00000419070
MSGFQINLNPLKEPLGFIKVLEWIASIFAFATCGGFKGQTEIQVNCPPAVTENKTVTATFGYPFRLNEASFQPPPGVNICDVNWKDYVLIGDYSSSAQFYVTFAVFVFLYCIAALLLYVGYTSLYLDSRKLPMIDFVVTLVATFLWLVSTSAWAKALTDIKIATGHNIIDELPPCKKKAVLCYFGSVTSMGSLNVSVMEFRYVAQTGVQWHDLGTLQPPPPGFK

SEQ ID NO: 85606 - protein, 135 aa, Homo sapiens
  Payload ID: 17011
  Gene Symbol: SYPL1
  Gene Name: synaptophysin-like 1
  ENSP ID: ENSP00000489167
WIASIFAFATCGGFKGQTEIQVNCPPAVTENKTVTATFGYPFRLNEASFQPPPGVNICDVNWKDYVLIGDYSSSAQFYVTFAVFVFLYCIAALLLYVGYTSLYLDSRKLPMINGNGLCCYTCCHFFVVGEHFSLG

SEQ ID NO: 85607 - protein, 272 aa, Homo sapiens
  Payload ID: 17012
  Gene Symbol: SYPL2
  Gene Name: synaptophysin-like 2
  Uniprot ID: Q5VXT5
  ENSP ID: ENSP00000358888
MSSTESAGRTADKSPRQQVDRLLVGLRWRRLEEPLGFIKVLQWLFAIFAFGSCGSYSGETGAMVRCNNEAKDVSSIIVAFGYPFRLHRIQYEMPLCDEESSSKTMHLMGDFSAPAEFFVTLGIFSFFYTMAALVIYLRFHNLYTENKRFPLVDFCVTVSFTFFWLVAAAAWGKGLTDVKGATRPSSLTAAMSVCHGEEAVCSAGATPSMGLANISVLFGFINFFLWAGNCWFVFKETPWHGQGQGQDQDQDQDQGQGPSQESAAEQGAVEKQ

SEQ ID NO: 85608 - protein, 903 aa, Homo sapiens
  Payload ID: 17013
  Gene Symbol: SYNPO
  Gene Name: synaptopodin
  Uniprot ID: Q8N3V7
  ENSP ID: ENSP00000302139
MEGYSEEASLLRHLEKVASEEEEVPLVVYLKENAALLTANGLHLSQNREAQQSSPAPPPAEVHSPAADVNQNLASPSATLTTPTSNSSHNPPATDVNQNPPATVVPQSLPLSSIQQNSSEAQLPSNGTGPASKPSTLCADGQPQAPAEEVRCSTLLIDKVSTPATTTSTFSREATLIPSSRPPASDFMSSSLLIDIQPNTLVVSADQEMSGRAAATTPTKVYSEVHFTLAKPPSVVNRTARPFGIQAPGGTSQMERSPMLERRHFGEKAPAPQPPSLPDRSPRPQRHIMSRSPMVERRMMGQRSPASERRPLGNFTAPPTYTETLSTAPLASWVRSPPSYSVLYPSSDPKSSHLKGQAVPASKTGILEESMARRGSRKSMFTFVEKPKVTPNPDLLDLVQTADEKRRQRDQGEVGVEEEPFALGAEASNFQQEPAPRDRASPAAAEEVVPEWASCLKSPRIQAKPKPKPNQNLSEASGKGAELYARRQSRMEKYVIESSSHTPELARCPSPTMSLPSSWKYPTNAPGAFRVASRSPARTPPASLYHGYLPENGVLRPEPTKQPPYQLRPSLFVLSPIKEPAKVSPRAASPAKPSSLDLVPNLPKGALPPSPALPRPSRSSPGLYTSPGQDSLQPTAVSPPYGGDISPVSPSRAWSPRAKQAPRPSFSTRNAGIEAQDRRESLPTSPPWTPGASRPPSSLDGWVSPGPWEPGRGSSMSSPPPLPPPPPMSPSWSERSVSPLRPETEARPPSRQLQALLARNIINAARRKSASPRSAGAENPRPFSPPRAPPPPPPPPPPPPRMRSPQPARPGSAAVPGAAFAPIPRSPLPAGPSSCTSPRSPLPAPPRPFLYRRSPTDSDVSLDSEDSGAKSPGILGYNICPRGWNGSLRLKRGSLPAEASCTT

SEQ ID NO: 85609 - protein, 929 aa, Homo sapiens
  Payload ID: 17013
  Gene Symbol: SYNPO
  Gene Name: synaptopodin
  Uniprot ID: Q8N3V7
  ENSP ID: ENSP00000377789
MLGPHLPPPPLAPSEGRPTPCAFQIPDGSYRCLALEAEESSGEEGLQGEVGPTDLEEDEGVSRSGDDSACRVTQGTPQLPKALGIQPPSCSREEQGASQHDDRASQDWDVVKAGQMMTASPSPGPGPRVAQKPALGRSTSLTEKDLKEAKARSQQIAAQLTTPPSSNSRGVQLFNRRRQRVNEFTLESHGQRGQKPSQESLRVLPSSLPGHAPGLSLSSTSLPEPGPPRHPSPQSPDRGVPGHSMEGYSEEASLLRHLEKVASEEEEVPLVVYLKENAALLTANGLHLSQNREAQQSSPAPPPAEVHSPAADVNQNLASPSATLTTPTSNSSHNPPATDVNQNPPATVVPQSLPLSSIQQNSSEAQLPSNGTGPASKPSTLCADGQPQAPAEEVRCSTLLIDKVSTPATTTSTFSREATLIPSSRPPASDFMSSSLLIDIQPNTLVVSADQEMSGRAAATTPTKVYSEVHFTLAKPPSVVNRTARPFGIQAPGGTSQMERSPMLERRHFGEKAPAPQPPSLPDRSPRPQRHIMSRSPMVERRMMGQRSPASERRPLGNFTAPPTYTETLSTAPLASWVRSPPSYSVLYPSSDPKSSHLKGQAVPASKTGILEESMARRGSRKSMFTFVEKPKVTPNPDLLDLVQTADEKRRQRDQGEVGVEEEPFALGAEASNFQQEPAPRDRASPAAAEEVVPEWASCLKSPRIQAKPKPKPNQNLSEASGKGAELYARRQSRMEKYVIESSSHTPELARCPSPTMSLPSSWKYPTNAPGAFRVASRSPARTPPASLYHGYLPENGVLRPEPTKQPPYQLRPSLFVLSPIKEPAKVSPRAASPAKPSSLDLVPNLPKGALPPSPALPRPSRSSPGLYTSPGQDSLQPTAVSPPYGGDISPVSPSRAWSPRAKQAPRPSFSTRNAGIEAQVWKPSFCFK

SEQ ID NO: 85610 - protein, 929 aa, Homo sapiens; identical to SEQ ID NO: 85609
  Payload ID: 17013
  Gene Symbol: SYNPO
  Gene Name: synaptopodin
  Uniprot ID: Q8N3V7
  ENSP ID: ENSP00000428378

SEQ ID NO: 85611 - protein, 685 aa, Homo sapiens
  Payload ID: 17013
  Gene Symbol: SYNPO
  Gene Name: synaptopodin
  Uniprot ID: Q8N3V7
  ENSP ID: ENSP00000429268
MEGYSEEASLLRHLEKVASEEEEVPLVVYLKENAALLTANGLHLSQNREAQQSSPAPPPAEVHSPAADVNQNLASPSATLTTPTSNSSHNPPATDVNQNPPATVVPQSLPLSSIQQNSSEAQLPSNGTGPASKPSTLCADGQPQAPAEEVRCSTLLIDKVSTPATTTSTFSREATLIPSSRPPASDFMSSSLLIDIQPNTLVVSADQEMSGRAAATTPTKVYSEVHFTLAKPPSVVNRTARPFGIQAPGGTSQMERSPMLERRHFGEKAPAPQPPSLPDRSPRPQRHIMSRSPMVERRMMGQRSPASERRPLGNFTAPPTYTETLSTAPLASWVRSPPSYSVLYPSSDPKSSHLKGQAVPASKTGILEESMARRGSRKSMFTFVEKPKVTPNPDLLDLVQTADEKRRQRDQGEVGVEEEPFALGAEASNFQQEPAPRDRASPAAAEEVVPEWASCLKSPRIQAKPKPKPNQNLSEASGKGAELYARRQSRMEKYVIESSSHTPELARCPSPTMSLPSSWKYPTNAPGAFRVASRSPARTPPASLYHGYLPENGVLRPEPTKQPPYQLRPSLFVLSPIKEPAKVSPRAASPAKPSSLDLVPNLPKGALPPSPALPRPSRSSPGLYTSPGQDSLQPTAVSPPYGGDISPVSPSRAWSPRAKQAPRPSFSTRNAGIEAQVWKPSFCFK

SEQ ID NO: 85612 - protein, 1261 aa, Homo sapiens
  Payload ID: 17014
  Gene Symbol: SYNPO2
  Gene Name: synaptopodin 2
  Uniprot ID: Q9UMS6
  ENSP ID: ENSP00000306015
MGTGDFICISMTGGAPWGFRLQGGKEQKQPLQVAKIRNQSKASGSGLCEGDEVVSINGNPCADLTYPEVIKLMESITDSLQMLIKRPSSGISEALISENENKNLEHLTHGGYVESTTLQIRPATKTQCTEFFLAPVKTEVPLAENQRSGPDCAGSLKEETGPSYQRAPQMPDSQRGRVAEELILREKVEAVQPGPVVELQLSLSQERHKGASGPLVALPGAEKSKSPDPDPNLSHDRIVHINSIPTNEKADPFLRSSKIIQISSGRELRVIQESEAGDAGLPRVEVILDCSDRQKTEGCRLQAGKECVDSPVEGGQSEAPPSLVSFAVSSEGTEQGEDPRSEKDHSRPHKHRARHARLRRSESLSEKQVKEAKSKCKSIALLLTDAPNPNSKGVLMFKKRRRRARKYTLVSYGTGELEREADEEEEGDKEDTCEVAFLGASESEVDEELLSDVDDNTQVVNFDWDSGLVDIEKKLNRGDKMEMLPDTTGKGALMFAKRRERMDQITAQKEEDKVGGTPSREQDAAQTDGLRTTTSYQRKEEESVRTQSSVSKSYIEVSHGLGHVPQQNGFSGTSETANIQRMVPMNRTAKPFPGSVNQPATPFSPTRNMTSPIADFPAPPPYSAVTPPPDAFSRGVSSPIAGPAQPPPWPQPAPWSQPAFYDSSERIASRDERISVPAKRTGILQEAKRRSTTKPMFTFKEPKVSPNPELLSLLQNSEGKRGTGAGGDSGPEEDYLSLGAEACNFMQSSSAKQKTPPPVAPKPAVKSSSSQPVTPVSPVWSPGVAPTQPPAFPTSNPSKGTVVSSIKIAQPSYPPARPASTLNVAGPFKGPQAAVASQNYTPKPTVSTPTVNAVQPGAVGPSNELPGMSGRGAQLFAKRQSRMEKYVVDSDTVQAHAARAQSPTPSLPASWKYSSNVRAPPPVAYNPIHSPSYPLAALKSQPSAAQPSKMGKKKGKKPLNALDVMKHQPYQLNASLFTFQPPDAKDGLPQKSSVKVNSALAMKQALPPRPVNAASPTNVQASSVYSVPAYTSPPSFFAEASSPVSASPVPVGIPTSPKQESASSSYFVAPRPKFSAKKSGVTIQESGRSLSLPGRSVPPPISTSPWVYQPTYSYSSKPTDGLEKANKRPTPWEAAAKSPLGLVDDAFQPRNIQESIVANVVSAARRKVLPGPPEDWNERLSYIPQTQKAYMGSCGRQEYNVTANNNMSTTSQYGSQLPYAYYRQASRNDSAIMSMETRSDYCLPVADYNYNPHPRGWRRQT

SEQ ID NO: 85613 - protein, 1109 aa, Homo sapiens
  Payload ID: 17014
  Gene Symbol: SYNPO2
  Gene Name: synaptopodin 2
  Uniprot ID: Q9UMS6
  ENSP ID: ENSP00000390965
MGTGDFICISMTGGAPWGFRLQGGKEQKQPLQVAKIRNQSKASGSGLCEGDEVVSINGNPCADLTYPEVIKLMESITDSLQMLIKRPSSGISEALISENENKNLEHLTHGGYVESTTLQIRPATKTQCTEFFLAPVKTEVPLAENQRSGPDCAGSLKEETGPSYQRAPQMPDSQRGRVAEELILREKVEAVQPGPVVELQLSLSQERHKGASGPLVALPGAEKSKSPDPDPNLSHDRIVHINSIPTNEKADPFLRSSKIIQISSGRELRVIQESEAGDAGLPRVEVILDCSDRQKTEGCRLQAGKECVDSPVEGGQSEAPPSLVSFAVSSEGTEQGEDPRSEKDHSRPHKHRARHARLRRSESLSEKQVKEAKSKCKSIALLLTDAPNPNSKGVLMFKKRRRRARKYTLVSYGTGELEREADEEEEGDKEDTCEVAFLGASESEVDEELLSDVDDNTQVVNFDWDSGLVDIEKKLNRGDKMEMLPDTTGKGALMFAKRRERMDQITAQKEEDKVGGTPSREQDAAQTDGLRTTTSYQRKEEESVRTQSSVSKSYIEVSHGLGHVPQQNGFSGTSETANIQRMVPMNRTAKPFPGSVNQPATPFSPTRNMTSPIADFPAPPPYSAVTPPPDAFSRGVSSPIAGPAQPPPWPQPAPWSQPAFYDSSERIASRDERISVPAKRTGILQEAKRRSTTKPMFTFKEPKVSPNPELLSLLQNSEGKRGTGAGGDSGPEEDYLSLGAEACNFMQSSSAKQKTPPPVAPKPAVKSSSSQPVTPVSPVWSPGVAPTQPPAFPTSNPSKGTVVSSIKIAQPSYPPARPASTLNVAGPFKGPQAAVASQNYTPKPTVSTPTVNAVQPGAVGPSNELPGMSGRGAQLFAKRQSRMEKYVVDSDTVQAHAARAQSPTPSLPASWKYSSNVRAPPPVAYNPIHSPSYPLAALKSQPSAAQPSKMGKKKGKKPLNALDVMKHQPYQLNASLFTFQPPDAKDGLPQKSSVKVNSALAMKQALPPRPVNAASPTNVQASSVYSVPAYTSPPSFFAEASSPVSASPVPVGIPTSPKQESASSSYFVAPRPKFSAKKSGVTIQVKCKSGIHSQDIIRTYFPAYLSSST

SEQ ID NO: 85614 - protein, 1093 aa, Homo sapiens
  Payload ID: 17014
  Gene Symbol: SYNPO2
  Gene Name: synaptopodin 2
  Uniprot ID: Q9UMS6
  ENSP ID: ENSP00000395143
MGTGDFICISMTGGAPWGFRLQGGKEQKQPLQVAKIRNQSKASGSGLCEGDEVVSINGNPCADLTYPEVIKLMESITDSLQMLIKRPSSGISEALISENENKNLEHLTHGGYVESTTLQIRPATKTQCTEFFLAPVKTEVPLAENQRSGPDCAGSLKEETGPSYQRAPQMPDSQRGRVAEELILREKVEAVQPGPVVELQLSLSQERHKGASGPLVALPGAEKSKSPDPDPNLSHDRIVHINSIPTNEKADPFLRSSKIIQISSGRELRVIQESEAGDAGLPRVEVILDCSDRQKTEGCRLQAGKECVDSPVEGGQSEAPPSLVSFAVSSEGTEQGEDPRSEKDHSRPHKHRARHARLRRSESLSEKQVKEAKSKCKSIALLLTDAPNPNSKGVLMFKKRRRRARKYTLVSYGTGELEREADEEEEGDKEDTCEVAFLGASESEVDEELLSDVDDNTQVVNFDWDSGLVDIEKKLNRGDKMEMLPDTTGKGALMFAKRRERMDQITAQKEEDKVGGTPSREQDAAQTDGLRTTTSYQRKEEESVRTQSSVSKSYIEVSHGLGHVPQQNGFSGTSETANIQRMVPMNRTAKPFPGSVNQPATPFSPTRNMTSPIADFPAPPPYSAVTPPPDAFSRGVSSPIAGPAQPPPWPQPAPWSQPAFYDSSERIASRDERISVPAKRTGILQEAKRRSTTKPMFTFKEPKVSPNPELLSLLQNSEGKRGTGAGGDSGPEEDYLSLGAEACNFMQSSSAKQKTPPPVAPKPAVKSSSSQPVTPVSPVWSPGVAPTQPPAFPTSNPSKGTVVSSIKIAQPSYPPARPASTLNVAGPFKGPQAAVASQNYTPKPTVSTPTVNAVQPGAVGPSNELPGMSGRGAQLFAKRQSRMEKYVVDSDTVQAHAARAQSPTPSLPASWKYSSNVRAPPPVAYNPIHSPSYPLAALKSQPSAAQPSKMGKKKGKKPLNALDVMKHQPYQLNASLFTFQPPDAKDGLPQKSSVKVNSALAMKQALPPRPVNAASPTNVQASSVYSVPAYTSPPSFFAEASSPVSASPVPVGIPTSPKQESASSSYFVAPRPKFSAKKSGVTIQVWKPSVVEE

SEQ ID NO: 85615 - protein, 123 aa, Homo sapiens
  Payload ID: 17014
  Gene Symbol: SYNPO2
  Gene Name: synaptopodin 2
  ENSP ID: ENSP00000412623
MGTGDFICISMTGGAPWGFRLQGGKEQKQPLQVAKIRNQSKASGSGLCEGDEVVSINGNPCADLTYPEVIKLMESITDSLQMLIKRRVGAPFLFLEDQSHPPFLHLLGYTSLLIVTLVNQPMD

SEQ ID NO: 85616 - protein, 1155 aa, Homo sapiens
  Payload ID: 17014
  Gene Symbol: SYNPO2
  Gene Name: synaptopodin 2
  ENSP ID: ENSP00000425496
  MOD_RES (1)..(1): Any amino acid
XGDEVVSINGNPCADLTYPEVIKLMESITDSLQMLIKRPSSGISEALISENENKNLEHLTHGGYVESTTLQIRPATKTQCTEFFLAPVKTEVPLAENQRSGPDCAGSLKEETGPSYQRAPQMPDSQRGRVAEELILREKVEAVQPGPVVELQLSLSQERHKGASGPLVALPGAEKSKSPDPDPNLSHDRIVHINSIPTNEKADPFLRSSKIIQISSGRELRVIQESEAGDAGLPRVEVILDCSDRQKTEGCRLQAGKECVDSPVEGGQSEAPPSLVSFAVSSEGTEQGEDPRSEKDHSRPHKHRARHARLRRSESLSEKQVKEAKSKCKSIALLLTDAPNPNSKGVLMFKKRRRRARKYTLVSYGTGELEREADEEEEGDKEDTCEVAFLGASESEVDEELLSDVDDNTQVVNFDWDSGLVDIEKKLNRGDKMEMLPDTTGKGALMFAKRRERMDQITAQKEEDKVGGTPSREQDAAQTDGLRTTTSYQRKEEESVRTQSSVSKSYIEVSHGLGHVPQQNGFSGTSETANIQRMVPMNRTAKPFPGSVNQPATPFSPTRNMTSPIADFPAPPPYSAVTPPPDAFSRGVSSPIAGPAQPPPWPQPAPWSQPAFYDSSERIASRDERISVPAKRTGILQEAKRRSTTKPMFTFKEPKVSPNPELLSLLQNSEGKRGTGAGGDSGPEEDYLSLGAEACNFMQSSSAKQKTPPPVAPKPAVKSSSSQPVTPVSPVWSPGVAPTQPPAFPTSNPSKGTVVSSIKIAQPSYPPARPASTLNVAGPFKGPQAAVASQNYTPKPTVSTPTVNAVQPGAVGPSNELPGMSGRGAQLFAKRQSRMEKYVVDSDTVQAHAARAQSPTPSLPASWKYSSNVRAPPPVAYNPIHSPSYPLAALKSQPSAAQPSKMGKKKGKKPLNALDVMKHQPYQLNASLFTFQPPDAKDGLPQKSSVKVNSALAMKQALPPRPVNAASPTNVQASSVYSESGRSLSLPGRSVPPPISTSPWVYQPTYSYSSKPTDGLEKANKRPTPWEAAAKSPLGLVDDAFQPRNIQESIVANVVSAARRKVLPGPPEDWNERLSYIPQTQKAYMGSCGRQEYNVTANNNMSTTSQYGSQLPYAYYRQASRNDSAIMSMETRSDYCLPVADYNYNPHPRGWRRQT

SEQ ID NO: 85617 - protein, 1230 aa, Homo sapiens
  Payload ID: 17014
  Gene Symbol: SYNPO2
  Gene Name: synaptopodin 2
  Uniprot ID: Q9UMS6
  ENSP ID: ENSP00000484885
MVTQIRNQSKASGSGLCEGDEVVSINGNPCADLTYPEVIKLMESITDSLQMLIKRPSSGISEALISENENKNLEHLTHGGYVESTTLQIRPATKTQCTEFFLAPVKTEVPLAENQRSGPDCAGSLKEETGPSYQRAPQMPDSQRGRVAEELILREKVEAVQPGPVVELQLSLSQERHKGASGPLVALPGAEKSKSPDPDPNLSHDRIVHINSIPTNEKADPFLRSSKIIQISSGRELRVIQESEAGDAGLPRVEVILDCSDRQKTEGCRLQAGKECVDSPVEGGQSEAPPSLVSFAVSSEGTEQGEDPRSEKDHSRPHKHRARHARLRRSESLSEKQVKEAKSKCKSIALLLTDAPNPNSKGVLMFKKRRRRARKYTLVSYGTGELEREADEEEEGDKEDTCEVAFLGASESEVDEELLSDVDDNTQVVNFDWDSGLVDIEKKLNRGDKMEMLPDTTGKGALMFAKRRERMDQITAQKEEDKVGGTPSREQDAAQTDGLRTTTSYQRKEEESVRTQSSVSKSYIEVSHGLGHVPQQNGFSGTSETANIQRMVPMNRTAKPFPGSVNQPATPFSPTRNMTSPIADFPAPPPYSAVTPPPDAFSRGVSSPIAGPAQPPPWPQPAPWSQPAFYDSSERIASRDERISVPAKRTGILQEAKRRSTTKPMFTFKEPKVSPNPELLSLLQNSEGKRGTGAGGDSGPEEDYLSLGAEACNFMQSSSAKQKTPPPVAPKPAVKSSSSQPVTPVSPVWSPGVAPTQPPAFPTSNPSKGTVVSSIKIAQPSYPPARPASTLNVAGPFKGPQAAVASQNYTPKPTVSTPTVNAVQPGAVGPSNELPGMSGRGAQLFAKRQSRMEKYVVDSDTVQAHAARAQSPTPSLPASWKYSSNVRAPPPVAYNPIHSPSYPLAALKSQPSAAQPSKMGKKKGKKPLNALDVMKHQPYQLNASLFTFQPPDAKDGLPQKSSVKVNSALAMKQALPPRPVNAASPTNVQASSVYSVPAYTSPPSFFAEASSPVSASPVPVGIPTSPKQESASSSYFVAPRPKFSAKKSGVTIQESGRSLSLPGRSVPPPISTSPWVYQPTYSYSSKPTDGLEKANKRPTPWEAAAKSPLGLVDDAFQPRNIQESIVANVVSAARRKVLPGPPEDWNERLSYIPQTQKAYMGSCGRQEYNVTANNNMSTTSQYGSQLPYAYYRQASRNDSAIMSMETRSDYCLPVADYNYNPHPRGWRRQT

SEQ ID NO: 85618 - protein, 753 aa, Homo sapiens
  Payload ID: 17015
  Gene Symbol: SYNPO2L
  Gene Name: synaptopodin 2-like
  Uniprot ID: Q9H987
  ENSP ID: ENSP00000361964
METFEPISQEPLSQASYDKAPDPVPELQDSFYAELQRAESLQEKSIKEAKTKCRTIASLLTAAPNPHSKGVLMFKKRRQRAKKYTLVSFGAAAGTGAEEEDGVPPTSESELDEEAFSDARSLTNQSDWDSPYLDMELARAGSRASEGQGSGLGGQLSEVSGRGVQLFEQQRQRADSSTQELARVEPAAMLNGEGLQSPPRAQSAPPEAAVLPPSPLPAPVASPRPFQPGGGAPTPAPSIFNRSARPFTPGLQGQRPTTTSVIFRPLAPKRANDSLGGLSPAPPPFLSSQGPTPLPSFTSGVPSHAPVSGSPSTPRSSGPVTATSSLYIPAPSRPVTPGGAPEPPAPPSAAAMTSTASIFLSAPLRPSARPEAPAPGPGAPEPPSAREQRISVPAARTGILQEARRRGTRKQMFRPGKEETKNSPNPELLSLVQNLDEKPRAGGAESGPEEDALSLGAEACNFMQPVGARSYKTLPHVTPKTPPPMAPKTPPPMTPKTPPPVAPKPPSRGLLDGLVNGAASSAGIPEPPRLQGRGGELFAKRQSRADRYVVEGTPGPGLGPRPRSPSPTPSLPPSWKYSPNIRAPPPIAYNPLLSPFFPQAARTLPKAQSQGPRATPKQGIKALDFMRHQPYQLKTAMFCFDEVPPTPGPIASGSPKTARVQEIRRFSTPAPQPTAEPLAPTVLAPRAATTLDEPIWRTELASAPVPSPAPPPEAPRGLGASPSSCGFQVARPRFSATRTGLQAHVWRPGAGHQ

SEQ ID NO: 85619 - protein, 977 aa, Homo sapiens
  Payload ID: 17015
  Gene Symbol: SYNPO2L
  Gene Name: synaptopodin 2-like
  Uniprot ID: Q9H987
  ENSP ID: ENSP00000378289
MGAEEEVLVTLSGGAPWGFRLHGGAEQRKPLQVSKIRRRSQAGRAGLRERDQLLAINGVSCTNLSHASAMSLIDASGNQLVLTVQRLADEGPVQSPSPHELQVLSPLSPLSPEPPGAPVPQPLQPGSLRSPPDSEAYYGETDSDADGPATQEKPRRPRRRGPTRPTPPGAPPDEVYLSDSPAEPAPTIPGPPSQGDSRVSSPSWEDGAALQPPPAEALLLPHGPLRPGPHLIPMVGPVPHPVAEDLTTTYTQKAKQAKLQRAESLQEKSIKEAKTKCRTIASLLTAAPNPHSKGVLMFKKRRQRAKKYTLVSFGAAAGTGAEEEDGVPPTSESELDEEAFSDARSLTNQSDWDSPYLDMELARAGSRASEGQGSGLGGQLSEVSGRGVQLFEQQRQRADSSTQELARVEPAAMLNGEGLQSPPRAQSAPPEAAVLPPSPLPAPVASPRPFQPGGGAPTPAPSIFNRSARPFTPGLQGQRPTTTSVIFRPLAPKRANDSLGGLSPAPPPFLSSQGPTPLPSFTSGVPSHAPVSGSPSTPRSSGPVTATSSLYIPAPSRPVTPGGAPEPPAPPSAAAMTSTASIFLSAPLRPSARPEAPAPGPGAPEPPSAREQRISVPAARTGILQEARRRGTRKQMFRPGKEETKNSPNPELLSLVQNLDEKPRAGGAESGPEEDALSLGAEACNFMQPVGARSYKTLPHVTPKTPPPMAPKTPPPMTPKTPPPVAPKPPSRGLLDGLVNGAASSAGIPEPPRLQGRGGELFAKRQSRADRYVVEGTPGPGLGPRPRSPSPTPSLPPSWKYSPNIRAPPPIAYNPLLSPFFPQAARTLPKAQSQGPRATPKQGIKALDFMRHQPYQLKTAMFCFDEVPPTPGPIASGSPKTARVQEIRRFSTPAPQPTAEPLAPTVLAPRAATTLDEPIWRTELASAPVPSPAPPPEAPRGLGASPSSCGFQVARPRFSATRTGLQAHVWRPGAGHQ

SEQ ID NO: 85620 - protein, 115 aa, Homo sapiens
  Payload ID: 17015
  Gene Symbol: SYNPO2L
  Gene Name: synaptopodin 2-like
  ENSP ID: ENSP00000475768
MSLIDASGNQLVLTVQRLADEGPVQSPSPHELQVLSPLSPLSPEPPGAPVPQPLQPGSLRSPPDSEAYYGETDSDADGPATQEKPRRPRRRGPTRPTPPGAPPDEVYLSDSPAEP

SEQ ID NO: 85621 - protein, 265 aa, Homo sapiens
  Payload ID: 17016
  Gene Symbol: SYNPR
  Gene Name: synaptoporin
  Uniprot ID: Q8TBG9
  ENSP ID: ENSP00000295894
MCMVIFAPLFAIFAFATCGGYSGGLRLSVDCVNKTESNLSIDIAFAYPFRLHQVTFEVPTCEGKERQKLALIGDSSSSAEFFVTVAVFAFLYSLAATVVYIFFQNKYRENNRGPLIDFIVTVVFSFLWLVGSSAWAKGLSDVKVATDPKEVLLLMSACKQPSNKCMAIHSPVMSSLNTSVVFGFLNFILWAGNIWFVFKETGWHSSGQRYLSDPMEKHSSSYNQGGYNQDSYGSSSGYSQQASLGPTSDEFGQQPTGPTSFTNQI

SEQ ID NO: 85622 - protein, 34 aa, Homo sapiens
  Payload ID: 17016
  Gene Symbol: SYNPR
  Gene Name: synaptoporin
  ENSP ID: ENSP00000402121
MDPVSQLASAGTFRVLKEPLAFLRALELVAPGDV

SEQ ID NO: 85623 - protein, 201 aa, Homo sapiens
  Payload ID: 17016
  Gene Symbol: SYNPR
  Gene Name: synaptoporin
  ENSP ID: ENSP00000418123
MCMVIFAPLFAIFAFATCGGYSGGLRLSVDCVNKTESNLSIDIAFAYPFRLHQVTFEVPTCEGKERQKLALIGDSSSSAEFFVTVAVFAFLYSLAATVVYIFFQNKYRENNRGPLIVFGFLNFILWAGNIWFVFKETGWHSSGQRYLSDPMEKHSSSYNQGGYNQDSYGSSSGYSQQASLGPTSDEFGQQPTGPTSFTNQI

SEQ ID NO: 85624 - protein, 276 aa, Homo sapiens
  Payload ID: 17016
  Gene Symbol: SYNPR
  Gene Name: synaptoporin
  ENSP ID: ENSP00000418701
MCMVIFAPHNEECKSHFHLLFAIFAFATCGGYSGGLRLSVDCVNKTESNLSIDIAFAYPFRLHQVTFEVPTCEGKERQKLALIGDSSSSAEFFVTVAVFAFLYSLAATVVYIFFQNKYRENNRGPLIDFIVTVVFSFLWLVGSSAWAKGLSDVKVATDPKEVLLLMSACKQPSNKCMAIHSPVMSSLNTSVVFGFLNFILWAGNIWFVFKETGWHSSGQRYLSDPMEKHSSSYNQGGYNQDSYGSSSGYSQQASLGPTSDEFGQQPTGPTSFTNQI

SEQ ID NO: 85625 - protein, 202 aa, Homo sapiens
  Payload ID: 17016
  Gene Symbol: SYNPR
  Gene Name: synaptoporin
  ENSP ID: ENSP00000418929
MCMVIFAPLFAIFAFATCGGYSGGLRLSVDCVNKTESNLSIDIAFAYPFRLHQVTFEVPTCEGKERQKLALIGDSSSSAEFFVTVAVFAFLYSLAATVVYIFFQNKYRENNRGPLIDFIVTVVFSFLWLVGSSAWAKGLSDVKVATDPKEVLLLMSACKQPSNKCMAIHSPVMSSLNTSVLSEIQSAKALKKRERVATLTGL

SEQ ID NO: 85626 - protein, 285 aa, Homo sapiens
  Payload ID: 17016
  Gene Symbol: SYNPR
  Gene Name: synaptoporin
  Uniprot ID: Q8TBG9
  ENSP ID: ENSP00000418994
MDPVSQLASAGTFRVLKEPLAFLRALELLFAIFAFATCGGYSGGLRLSVDCVNKTESNLSIDIAFAYPFRLHQVTFEVPTCEGKERQKLALIGDSSSSAEFFVTVAVFAFLYSLAATVVYIFFQNKYRENNRGPLIDFIVTVVFSFLWLVGSSAWAKGLSDVKVATDPKEVLLLMSACKQPSNKCMAIHSPVMSSLNTSVVFGFLNFILWAGNIWFVFKETGWHSSGQRYLSDPMEKHSSSYNQGGYNQDSYGSSSGYSQQASLGPTSDEFGQQPTGPTSFTNQI

SEQ ID NO: 85627 - protein, 75 aa, Homo sapiens
  Payload ID: 17016
  Gene Symbol: SYNPR
  Gene Name: synaptoporin
  ENSP ID: ENSP00000419441
MDPVSQLASAGTFRVLKEPLAFLRALELLFAIFAFATCGGYSGGLRLSVDCVNKTESNLSIDIAFAYPFRTSLSL

SEQ ID NO: 85628 - protein, 55 aa, Homo sapiens
  Payload ID: 17016
  Gene Symbol: SYNPR
  Gene Name: synaptoporin
  ENSP ID: ENSP00000420383
MCMVIFAPLFAIFAFATCGGYSGGLRLSVDCVNKTESNLSIDIAFAYPFRTSLSL

SEQ ID NO: 85629 - protein, 51 aa, Homo sapiens
  Payload ID: 17016
  Gene Symbol: SYNPR
  Gene Name: synaptoporin
  ENSP ID: ENSP00000420623
MCMVIFAPKGFLKRFFSGSLQKAFCNLCICNMRWLFWRPAAECGLRQQDRK

SEQ ID NO: 85630 - protein, 158 aa, Homo sapiens
  Payload ID: 17017
  Gene Symbol: SNAP23
  Gene Name: synaptosomal-associated protein, 23kDa
  Uniprot ID: O00161
  ENSP ID: ENSP00000207062
MDNLSSEEIQQRAHQITDESLESTRRILGLAIESQDAGIKTITMLDEQKEQLNRIEEGLDQINKDMRETEKTLTELNKCCGLCVCPCNSITNDAREDEMEENLTQVGSILGNLKDMALNIGNEIDAQNPQIKRITDKADTNRDRIDIANARAKKLIDS

SEQ ID NO: 85631 - protein, 211 aa, Homo sapiens
  Payload ID: 17017
  Gene Symbol: SNAP23
  Gene Name: synaptosomal-associated protein, 23kDa
  Uniprot ID: O00161
  ENSP ID: ENSP00000249647
MDNLSSEEIQQRAHQITDESLESTRRILGLAIESQDAGIKTITMLDEQKEQLNRIEEGLDQINKDMRETEKTLTELNKCCGLCVCPCNRTKNFESGKAYKTTWGDGGENSPCNVVSKQPGPVTNGQLQQPTTGAASGGYIKRITNDAREDEMEENLTQVGSILGNLKDMALNIGNEIDAQNPQIKRITDKADTNRDRIDIANARAKKLIDS

SEQ ID NO: 85632 - protein, 158 aa, Homo sapiens; identical to SEQ ID NO: 85630
  Payload ID: 17017
  Gene Symbol: SNAP23
  Gene Name: synaptosomal-associated protein, 23kDa
  Uniprot ID: O00161
  ENSP ID: ENSP00000380327

SEQ ID NO: 85633 - protein, 125 aa, Homo sapiens
  Payload ID: 17017
  Gene Symbol: SNAP23
  Gene Name: synaptosomal-associated protein, 23kDa
  ENSP ID: ENSP00000454214
MDNLSSEEIQQRAHQITDESLESTRRILGLAIESQDAGIKTITMLDEQKEQLNRIEEGLDQINKDMRETEKTLTELNKCCGLCVCPCNRTKNFESGKAYKTTWGDGGENSPCNVVSKQPGPVTNG

SEQ ID NO: 85634 - protein, 97 aa, Homo sapiens
  Payload ID: 17017
  Gene Symbol: SNAP23
  Gene Name: synaptosomal-associated protein, 23kDa
  ENSP ID: ENSP00000454799
MDNLSSEEIQQRAHQITDESLESTRRILGLAIESQDAGIKTITMLDEQKEQLNRIEEGLDQINKDMRETEKTLTELNKCCGLCVCPCNRFNIRSRAQ

SEQ ID NO: 85635 - protein, 44 aa, Homo sapiens
  Payload ID: 17017
  Gene Symbol: SNAP23
  Gene Name: synaptosomal-associated protein, 23kDa
  ENSP ID: ENSP00000454842
MDNLSSEEIQQRAHQITDESLESTRRILGLAIEYWNMTGKMNSL

SEQ ID NO: 85636 - protein, 149 aa, Homo sapiens
  Payload ID: 17017
  Gene Symbol: SNAP23
  Gene Name: synaptosomal-associated protein, 23kDa
  ENSP ID: ENSP00000455102
  MOD_RES (1)..(1): Any amino acid
XQLNRIEEGLDQINKDMRETEKTLTELNKCCGLCVCPCNRTKNFESGKAYKTTWGDGGENSPCNVVSKQPGPVTNGQLQQPTTGAASGGYIKRITNDAREDEMEENLTQVGSILGNLKDMALNIGNEIDAQNPQIKRITDKQADRSGNH

SEQ ID NO: 85637 - protein, 127 aa, Homo sapiens
  Payload ID: 17017
  Gene Symbol: SNAP23
  Gene Name: synaptosomal-associated protein, 23kDa
  ENSP ID: ENSP00000455339
MDNLSSEEIQQRAHQITDESLESTRRILGLAIESQDAGIKTITMLDEQKEQLNRIEEGLDQINKDMRETEKTLTELNKCCGLCVCPCNRLTPTEIVLILPMPEQRNSLTAKATAVLLYHLFTSVAPP

SEQ ID NO: 85638 - protein, 97 aa, Homo sapiens; identical to SEQ ID NO: 85634
  Payload ID: 17017
  Gene Symbol: SNAP23
  Gene Name: synaptosomal-associated protein, 23kDa
  ENSP ID: ENSP00000455472

SEQ ID NO: 85639 - protein, 97 aa, Homo sapiens; identical to SEQ ID NO: 85634
  Payload ID: 17017
  Gene Symbol: SNAP23
  Gene Name: synaptosomal-associated protein, 23kDa
  ENSP ID: ENSP00000455652

SEQ ID NO: 85640 - protein, 154 aa, Homo sapiens
  Payload ID: 17017
  Gene Symbol: SNAP23
  Gene Name: synaptosomal-associated protein, 23kDa
  ENSP ID: ENSP00000456000
  MOD_RES (1)..(1): Any amino acid
XQLNRIEEGLDQINKDMRETEKTLTELNKCCGLCVCPCNRTKNFESGKAYKTTWGDGGENSPCNVVSKQPGPVTNGQLQQPTTGAASGGYIKRITNDAREDEMEENLTQVGSILGNLKDMALNIGNEIDAQNPQIKRITDKAKNFKAWTARYLH

SEQ ID NO: 85641 - protein, 109 aa, Homo sapiens
  Payload ID: 17017
  Gene Symbol: SNAP23
  Gene Name: synaptosomal-associated protein, 23kDa
  ENSP ID: ENSP00000456035
MDNLSSEEIQQRAHQITDESLESTRRILGLAIESQDAGIKTITMLDEQKEQLNRIEEGLDQINKDMRETEKTLTELNKCCGLCVCPCNRTKNFESGKAYKTTWGDGGEN

SEQ ID NO: 85642 - protein, 90 aa, Homo sapiens
  Payload ID: 17017
  Gene Symbol: SNAP23
  Gene Name: synaptosomal-associated protein, 23kDa
  ENSP ID: ENSP00000456144
  MOD_RES (1)..(1): Any amino acid
XGIKTITMLDEQKEQLNRIEEGLDQINKDMRETEKTLTELNKCCGLCVCPCNSKQTDLGITEDALGKHAELKTILFQAKNFKAWTARYLH

SEQ ID NO: 85643 - protein, 53 aa, Homo sapiens
  Payload ID: 17017
  Gene Symbol: SNAP23
  Gene Name: synaptosomal-associated protein, 23kDa
  ENSP ID: ENSP00000457535
MDNLSSEEIQQRAHQITDESLESTRRILGLAIEVLFLLFLVCFVVLSAFPPLS

SEQ ID NO: 85644 - protein, 142 aa, Homo sapiens
  Payload ID: 17017
  Gene Symbol: SNAP23
  Gene Name: synaptosomal-associated protein, 23kDa
  ENSP ID: ENSP00000458012
MLDEQKEQLNRIEEGLDQINKDMRETEKTLTELNKCCGLCVCPCNRTKNFESGKAYKTTWGDGGENSPCNVVSKQPGPVTNGQLQQPTTGAASGGYIKRITNDAREDEMEENLTQVGSILGNLKDMALNIGNEIDAQNPQIK

SEQ ID NO: 85645 - protein, 44 aa, Homo sapiens; identical to SEQ ID NO: 85635
  Payload ID: 17017
  Gene Symbol: SNAP23
  Gene Name: synaptosomal-associated protein, 23kDa
  ENSP ID: ENSP00000485888

SEQ ID NO: 85646 - protein, 53 aa, Homo sapiens; identical to SEQ ID NO: 85643
  Payload ID: 17017
  Gene Symbol: SNAP23
  Gene Name: synaptosomal-associated protein, 23kDa
  ENSP ID: ENSP00000486335

SEQ ID NO: 85647 - protein, 206 aa, Homo sapiens
  Payload ID: 17018
  Gene Symbol: SNAP25
  Gene Name: synaptosomal-associated protein, 25kDa
  Uniprot ID: P60880
  ENSP ID: ENSP00000254976
MAEDADMRNELEEMQRRADQLADESLESTRRMLQLVEESKDAGIRTLVMLDEQGEQLERIEEGMDQINKDMKEAEKNLTDLGKFCGLCVCPCNKLKSSDAYKKAWGNNQDGVVASQPARVVDEREQMAISGGFIRRVTNDARENEMDENLEQVSGIIGNLRHMALDMGNEIDTQNRQIDRIMEKADSNKTRIDEANQRATKMLGSG

SEQ ID NO: 85648 - protein, 206 aa, Homo sapiens
  Payload ID: 17018
  Gene Symbol: SNAP25
  Gene Name: synaptosomal-associated protein, 25kDa
  Uniprot ID: P60880
  ENSP ID: ENSP00000307341
MAEDADMRNELEEMQRRADQLADESLESTRRMLQLVEESKDAGIRTLVMLDEQGEQLDRVEEGMNHINQDMKEAEKNLKDLGKCCGLFICPCNKLKSSDAYKKAWGNNQDGVVASQPARVVDEREQMAISGGFIRRVTNDARENEMDENLEQVSGIIGNLRHMALDMGNEIDTQNRQIDRIMEKADSNKTRIDEANQRATKMLGSG

SEQ ID NO: 85649 - protein, 93 aa, Homo sapiens
  Payload ID: 17018
  Gene Symbol: SNAP25
  Gene Name: synaptosomal-associated protein, 25kDa
  ENSP ID: ENSP00000400720
MAEDADMRNELEEMQRRADQLADESLESTRRMLQLVEESKDAGIRTLVMLDEQGEQLERIEEGMDQINKDMKEAEKNLTDLGKFCGLCVCPCN

SEQ ID NO: 85650 - protein, 258 aa, Homo sapiens
  Payload ID: 17019
  Gene Symbol: SNAP29
  Gene Name: synaptosomal-associated protein, 29kDa
  Uniprot ID: O95721
  ENSP ID: ENSP00000215730
MSAYPKSYNPFDDDGEDEGARPAPWRDARDLPDGPDAPADRQQYLRQEVLRRAEATAASTSRSLALMYESEKVGVASSEELARQRGVLERTEKMVDKMDQDLKISQKHINSIKSVFGGLVNYFKSKPVETPPEQNGTLTSQPNNRLKEAISTSKEQEAKYQASHPNLRKLDDTDPVPRGAGSAMSTDAYPKNPHLRAYHQKIDSNLDELSMGLGRLKDIALGMQTEIEEQDDILDRLTTKVDKLDVNIKSTERKVRQL

SEQ ID NO: 85651 - protein, 160 aa, Homo sapiens
  Payload ID: 17019
  Gene Symbol: SNAP29
  Gene Name: synaptosomal-associated protein, 29kDa
  ENSP ID: ENSP00000411095
MVDKMDQDLKISQKHINSIKSVFGGLVNYFKSKPVETPPEQNGTLTSQPNNRLKEAISTSKEQEAKYQASHPNLRKLDDTDPVPRGAGSAMSTDAYPKNPHLRAYHQKIDSNLDELSMGLGRLKDIALGMQTEIEEQDDILDRLTTKVDKLDVNIKSTER

SEQ ID NO: 85652 - protein, 464 aa, Homo sapiens
  Payload ID: 17020
  Gene Symbol: SNAP47
  Gene Name: synaptosomal-associated protein, 47kDa
  Uniprot ID: Q5SQN1
  ENSP ID: ENSP00000314157
MRAARRGLHCAGAERPRRRGRLWDSSGVPQRQKRPGPWRTQTQEQMSRDVCIHTWPCTYYLEPKRRWVTGQLSLTSLSLRFMTDSTGEILVSFPLSSIVEIKKEASHFIFSSITILEKGHAKHWFSSLRPSRNVVFSIIEHFWRELLLSQPGAVADASVPRTRGEELTGLMAGSQKRLEDTARVLHHQGQQLDSVMRGLDKMESDLEVADRLLTELESPAWWPFSSKLWKTPPETKPREDVSMTSCEPFGKEGILIKIPAVISHRTESHVKPGRLTVLVSGLEIHDSSSLLMHRFEREDVDDIKVHSPYEISIRQRFIGKPDMAYRLISAKMPEVIPILEVQFSKKMELLEDALVLRSARTSSPAEKSCSVWHAASGLMGRTLHREPPAGDQEGTALHLQTSLPALSEADTQELTQILRRMKGLALEAESELERQDEALDGVAAAVDRATLTIDKHNRRMKRLT

SEQ ID NO: 85653 - protein, 464 aa, Homo sapiens; identical to SEQ ID NO: 85652
  Payload ID: 17020
  Gene Symbol: SNAP47
  Gene Name: synaptosomal-associated protein, 47kDa
  Uniprot ID: Q5SQN1
  ENSP ID: ENSP00000355721

SEQ ID NO: 85654 - protein, 222 aa, Homo sapiens
  Payload ID: 17020
  Gene Symbol: SNAP47
  Gene Name: synaptosomal-associated protein, 47kDa
  Uniprot ID: Q5SQN1
  ENSP ID: ENSP00000355722
MTSCEPFGKEGILIKIPAVISHRTESHVKPGRLTVLVSGLEIHDSSSLLMHRFEREDVDDIKVHSPYEISIRQRFIGKPDMAYRLISAKMPEVIPILEVQFSKKMELLEDALVLRSARTSSPAEKSCSVWHAASGLMGRTLHREPPAGDQEGTALHLQTSLPALSEADTQELTQILRRMKGLALEAESELERQDEALDGVAAAVDRATLTIDKHNRRMKRLT

SEQ ID NO: 85655 - protein, 259 aa, Homo sapiens
  Payload ID: 17020
  Gene Symbol: SNAP47
  Gene Name: synaptosomal-associated protein, 47kDa
  ENSP ID: ENSP00000402730
  MOD_RES (1)..(1): Any amino acid
XFTAQAPSGRGAAVGSGTRLASLRLLTELESPAWWPFSSKLWKTPPETKPREDVSMTSCEPFGKEGILIKIPAVISHRTESHVKPGRLTVLVSGLEIHDSSSLLMHRFEREDVDDIKVHSPYEISIRQRFIGKPDMAYRLISAKMPEVIPILEVQFSKKMELLEDALVLRSARTSSPAEKSCSVWHAASGLMGRTLHREPPAGDQEGTALHLQTSLPALSEADTQELTQGFRPMSLSTQTVLVMLCSESAGALWRQRLS

SEQ ID NO: 85656 - protein, 438 aa, Homo sapiens
  Payload ID: 17020
  Gene Symbol: SNAP47
  Gene Name: synaptosomal-associated protein, 47kDa
  ENSP ID: ENSP00000411128
  MOD_RES (1)..(1): Any amino acid
XCAGAERPRRRGRLWDSSGVPQRQKRPGPWRTQTQEQMSRDVCIHTWPCTYYLEPKRRWVTGQLSLTSLSLRFMTDSTGEILVSFPLSSIVEIKKEASHFIFSSITILEKGHAKHWFSSLRPSRNVVFSIIEHFWRELLLSQPGAVADASVPRTRGEELTGLMAGSQKRLEDTARVLHHQGQQLDSVMRGLDKMESDLEVADRLLTELESPAWWPFSSKLWKTPPETKPREDVSMTSCEPFGKEGILIKIPAVISHRTESHVKPGRLTVLVSGLEIHDSSSLLMHRFEREDVDDIKVHSPYEISIRQRFIGKPDMAYRLISAKMPEVIPILEVQFSKKMELLEDALVLRSARTSSPAEKSCSVWHAASGLMGRTLHREPPAGDQEGTALHLQTSLPALSEADTQELTQGFRPMSLSTQTVLVMLCSESAGALWRQRLS

SEQ ID NO: 85657 - protein, 222 aa, Homo sapiens
  Payload ID: 17020
  Gene Symbol: SNAP47
  Gene Name: synaptosomal-associated protein, 47kDa
  ENSP ID: ENSP00000475207
  MOD_RES (1)..(1): Any amino acid
XADASVPRTRGEELTGLMAGSQKRLEDTARVLHHQGQQLDSVMRGLDKMESDLEVADRLLTELESPAWWPFSSKLWKTPPETKPREDVSMTSCEPFGKEGILIKIPAVISHRTESHVKPGRLTVLVSGLEIHDSSSLLMHRFEREDVDDIKVHSPYEISIRQRFIGKPDMAYRLISAKMPEVIPILEVQFSKKMELLEDALVLRSARTSSPAEKSCSVWHAG

SEQ ID NO: 85658 - protein, 419 aa, Homo sapiens
  Payload ID: 17020
  Gene Symbol: SNAP47
  Gene Name: synaptosomal-associated protein, 47kDa
  ENSP ID: ENSP00000483253
MSRDVCIHTWPCTYYLEPKRRWVTGQLSLTSLSLRFMTDSTGEILVSFPLSSIVEIKKEASHFIFSSITILEKGHAKHWFSSLRPSRNVVFSIIEHFWRELLLSQPGAVADASVPRTRGEELTGLMAGSQKRLEDTARVLHHQGQQLDSVMRGLDKMESDLEVADRLLTELESPAWWPFSSKLWKTPPETKPREDVSMTSCEPFGKEGILIKIPAVISHRTESHVKPGRLTVLVSGLEIHDSSSLLMHRFEREDVDDIKVHSPYEISIRQRFIGKPDMAYRLISAKMPEVIPILEVQFSKKMELLEDALVLRSARTSSPAEKSCSVWHAASGLMGRTLHREPPAGDQEGTALHLQTSLPALSEADTQELTQILRRMKGLALEAESELERQDEALDGVAAAVDRATLTIDKHNRRMKRLT

SEQ ID NO: 85659 - protein, 256 aa, Homo sapiens
  Payload ID: 17020
  Gene Symbol: SNAP47
  Gene Name: synaptosomal-associated protein, 47kDa
  ENSP ID: ENSP00000485027
LHHQGQQLDSVMRGLDKMESDLEVADRLLTELESPAWWPFSSKLWKTPPETKPREDVSMTSCEPFGKEGILIKIPAVISHRTESHVKPGRLTVLVSGLEIHDSSSLLMHRFEREDVDDIKVHSPYEISIRQRFIGKPDMAYRLISAKMPEVIPILEVQFSKKMELLEDALVLRSARTSSPAEKSCSVWHAASGLMGRTLHREPPAGDQEGTALHLQTSLPALSEADTQELTQELENALHLPQGPPFLVWLPSLPYP

SEQ ID NO: 85660 - protein, 902 aa, Homo sapiens
  Payload ID: 17021
  Gene Symbol: SNAP91
  Gene Name: synaptosomal-associated protein, 91kDa
  ENSP ID: ENSP00000195649
MSGQTLTDRIAAAQYSVTGSAVARAVCKATTHEVMGPKKKHLDYLIQATNETNVNIPQMADTLFERATNSSWVVVFKALVTTHHLMVHGNERFIQYLASRNTLFNLSNFLDKSGSHGYDMSTFIRRYSRYLNEKAFSYRQMAFDFARVKKGADGVMRTMAPEKLLKSMPILQGQIDALLEFDVHPNELTNGVINAAFMLLFKDLIKLFACYNDGVINLLEKFFEMKKGQCKDALEIYKRFLTRMTRVSEFLKVAEQVGIDKGDIPDLTQAPSSLMETLEQHLNTLEGKKPGNNEGSGAPSPLSKSSPATTVTSPNSTPAKTIDTSPPVDLFATASAAVPVSTSKPSSDLLDLQPDFSSGGAAAAAAPAPPPPAGGATAWGDLLGEDSLAALSSVPSEAQISDPFAPEPTPPTTTAEIATASASASTTTTVTAVTAEVDLFGDAFAASPGEAPAASEGAAAPATPTPVAAALDACSGNDPFAPSEGSAEAAPELDLFAMKPPETSVPVVTPTASTAPPVPATAPSPAPAVAAAAAATTAATAAATTTTTTSAATATTAPPALDIFGDLFESTPEVAAAPKPDAAPSIDLFSTDAFSSPPQGASPVPESSLTADLLSVDAFAAPSPATTASPAKVDSSGVIDLFGDAFGSSASEPQPASQAASSSSASADLLAGFGGSFMAPSPSPVTPAQNNLLQPNFEAAFGTTPSTSSSSSFDPSGDLLMPTMAPAGQPAPVSMVPPSPAMAASKALGSDLDSSLASLVGNLGISGTTTKKGDLQWNAGEKKLTGGANWQPKVAPATWSAGVPPSAPLQGAVPPTSSVPPVAGAPSVGQPGAGFGMPPAGTGMPMMPQQPVMFAQPMMRPPFGAAAVPGTQLSPSPTPASQSPKKPPAKDPLADLNIKDFL

SEQ ID NO: 85661 - protein, 149 aa, Homo sapiens
  Payload ID: 17021
  Gene Symbol: SNAP91
  Gene Name: synaptosomal-associated protein, 91kDa
  ENSP ID: ENSP00000358704
MSGQTLTDRIAAAQYSVTGSAVARAVCKATTHEVMGPKKKHLDYLIQATNETNVNIPQMADTLFERATNSSWVVVFKALVTTHHLMVHGNERFIQYLASRNTLFNLSNFLDKSGSHGYDMSTFIRRYSRYLNEKAFSYRQMAFDFARVK

SEQ ID NO: 85662 - protein, 143 aa, Homo sapiens
  Payload ID: 17021
  Gene Symbol: SNAP91
  Gene Name: synaptosomal-associated protein, 91kDa
  ENSP ID: ENSP00000358705
  MOD_RES (1)..(1): Any amino acid
XTSKPSSDLLDLQPDFSSGGAAAAAAPAPPPPAGGATAWGDLLGEDSLAALSSVPSEAQISDPFAPEPTPPTTTAEIATASASASTTTTVTAVTAEVDLFGGSAEAAPELDLFAMKPPETSVPVVTPTASTAPPVPATAPSPA

SEQ ID NO: 85663 - protein, 907 aa, Homo sapiens
  Payload ID: 17021
  Gene Symbol: SNAP91
  Gene Name: synaptosomal-associated protein, 91kDa
  Uniprot ID: O60641
  ENSP ID: ENSP00000358708
MSGQTLTDRIAAAQYSVTGSAVARAVCKATTHEVMGPKKKHLDYLIQATNETNVNIPQMADTLFERATNSSWVVVFKALVTTHHLMVHGNERFIQYLASRNTLFNLSNFLDKSGSHGYDMSTFIRRYSRYLNEKAFSYRQMAFDFARVKKGADGVMRTMAPEKLLKSMPILQGQIDALLEFDVHPNELTNGVINAAFMLLFKDLIKLFACYNDGVINLLEKFFEMKKGQCKDALEIYKRFLTRMTRVSEFLKVAEQVGIDKGDIPDLTQAPSSLMETLEQHLNTLEGKKPGNNEGSGAPSPLSKSSPATTVTSPNSTPAKTIDTSPPVDLFATASAAVPVSTSKPSSDLLDLQPDFSSGGAAAAAAPAPPPPAGGATAWGDLLGEDSLAALSSVPSEAQISDPFAPEPTPPTTTAEIATASASASTTTTVTAVTAEVDLFGDAFAASPGEAPAASEGAAAPATPTPVAAALDACSGNDPFAPSEGSAEAAPELDLFAMKPPETSVPVVTPTASTAPPVPATAPSPAPAVAAAAAATTAATAAATTTTTTSAATATTAPPALDIFGDLFESTPEVAAAPKPDAAPSIDLFSTDAFSSPPQGASPVPESSLTADLLSVDAFAAPSPATTASPAKVDSSGVIDLFGDAFGSSASEPQPASQAASSSSASADLLAGFGGSFMAPSPSPVTPAQNNLLQPNFEAAFGTTPSTSSSSSFDPSVFDGLGDLLMPTMAPAGQPAPVSMVPPSPAMAASKALGSDLDSSLASLVGNLGISGTTTKKGDLQWNAGEKKLTGGANWQPKVAPATWSAGVPPSAPLQGAVPPTSSVPPVAGAPSVGQPGAGFGMPPAGTGMPMMPQQPVMFAQPMMRPPFGAAAVPGTQLSPSPTPASQSPKKPPAKDPLADLNIKDFL

SEQ ID NO: 85664 - protein, 907 aa, Homo sapiens; identical to SEQ ID NO: 85663
  Payload ID: 17021
  Gene Symbol: SNAP91
  Gene Name: synaptosomal-associated protein, 91kDa
  Uniprot ID: O60641
  ENSP ID: ENSP00000400459

SEQ ID NO: 85665 - protein, 116 aa, Homo sapiens
  Payload ID: 17021
  Gene Symbol: SNAP91
  Gene Name: synaptosomal-associated protein, 91kDa
  ENSP ID: ENSP00000427959
MSGQTLTDRIAAAQYSVTGSAVARAVCKATTHEVMGPKKKHLDYLIQATNETNVNIPQMADTLFERATNSSWVVVFKALVTTHHLMVHGNERFIQYLASRNTLFNLSNFLDKSGSH

SEQ ID NO: 85666 - protein, 600 aa, Homo sapiens
  Payload ID: 17021
  Gene Symbol: SNAP91
  Gene Name: synaptosomal-associated protein, 91kDa
  Uniprot ID: O60641
  ENSP ID: ENSP00000428026
MSGQTLTDRIAAAQYSVTGSAVARAVCKATTHEVMGPKKKHLDYLIQATNETNVNIPQMADTLFERATNSSWVVVFKALVTTHHLMVHGNERFIQYLASRNTLFNLSNFLDKSGSHGYDMSTFIRRYSRYLNEKAFSYRQMAFDFARVKKGADGVMRTMAPEKLLKSMPILQGQIDALLEFDVHPNELTNGVINAAFMLLFKDLIKLFACYNDGVINLLEKFFEMKKGQCKDALEIYKRFLTRMTRVSEFLKVAEAPSSLMETLEQHLNTLEGKKPGNKSGAPSPLSKSSPATTVTSPNSTPAKTIDTSPPVDLFATASAAVPVSTSKPSSDLLDLQPDFSSGGAAAAAAPAPPPPAGGATAWGGFGGSFMAPSPSPVTPAQNNLLQPNFEAAFGTTPSTSSSSSFDPSVFDGLGDLLMPTMAPAGQPAPVSMVPPSPAMAASKALGSDLDSSLASLVGNLGISGTTTKKGDLQWNAGEKKLTGGANWQPKVAPATWSAGVPPSAPLQGAVPPTSSVPPVAGAPSVGQPGAGFGMPPAGTGMPMMPQQPVMFAQPMMRPPFGAAAVPGTQLSPSPTPASQSPKKPPAKDPLADLNIKDFL

SEQ ID NO: 85667 - protein, 43 aa, Homo sapiens
  Payload ID: 17021
  Gene Symbol: SNAP91
  Gene Name: synaptosomal-associated protein, 91kDa
  ENSP ID: ENSP00000428127
MSGQTLTDRIAAAQYSVTGSAVARAVCKATTHEVMGPKKKHLD

SEQ ID NO: 85668 - protein, 907 aa, Homo sapiens; identical to SEQ ID NO: 85663
  Payload ID: 17021
  Gene Symbol: SNAP91
  Gene Name: synaptosomal-associated protein, 91kDa
  Uniprot ID: O60641
  ENSP ID: ENSP00000428215

SEQ ID NO: 85669 - protein, 877 aa, Homo sapiens
  Payload ID: 17021
  Gene Symbol: SNAP91
  Gene Name: synaptosomal-associated protein, 91kDa
  Uniprot ID: O60641
  ENSP ID: ENSP00000428511
MSGQTLTDRIAAAQYSVTGSAVARAVCKATTHEVMGPKKKHLDYLIQATNETNVNIPQMADTLFERATNSSWVVVFKALVTTHHLMVHGNERFIQYLASRNTLFNLSNFLDKSGSHGYDMSTFIRRYSRYLNEKAFSYRQMAFDFARVKKGADGVMRTMAPEKLLKSMPILQGQIDALLEFDVHPNELTNGVINAAFMLLFKDLIKLFACYNDGVINLLEKFFEMKKGQCKDALEIYKRFLTRMTRVSEFLKVAEQVGIDKGDIPDLTQAPSSLMETLEQHLNTLEGKKPGNKSGAPSPLSKSSPATTVTSPNSTPAKTIDTSPPVDLFATASAAVPVSTSKPSSDLLDLQPDFSSGGAAAAAAPAPPPPAGGATAWGDLLGEDSLAALSSVPSEAQISDPFAPEPTPPTTTAEIATASASASTTTTVTAVTAEVDLFGDAFAASPGEAPAASEGAAAPATPTPVAAALDACSGNDPFAPSEGSAEAAPELDLFAMKPPETSVPVVTPTASTAPPVPATAPSPAPAVAAAAAATTAATAAATTTTTTSAATATTAPPALDIFGDLFESTPEVAAAPKPDAAPSIDLFSTDAFSSPPQGASPVPESSLTADLLSDAFGSSASEPQPASQAASSSSASADLLAGFGGSFMAPSPSPVTPAQNNLLQPNFEAAFGTTPSTSSSSSFDPSVFDGLGDLLMPTMAPAGQPAPVSMVPPSPAMAASKALGSDLDSSLASLVGNLGISGTTTKKGDLQWNAGEKKLTGGANWQPKVAPATWSAGVPPSAPLQGAVPPTSSVPPVAGAPSVGQPGAGFGMPPAGTGMPMMPQQPVMFAQPMMRPPFGAAAVPGTQLSPSPTPASQSPKKPPAKDPLADLNIKDFL

SEQ ID NO: 85670 - protein, 58 aa, Homo sapiens
  Payload ID: 17021
  Gene Symbol: SNAP91
  Gene Name: synaptosomal-associated protein, 91kDa
  ENSP ID: ENSP00000428592
MSGQTLTDRIAAAQYSVTGSAVARAVCKATTHEVMGPKKKHLDYLQTFFQQVLPNFEI

SEQ ID NO: 85671 - protein, 152 aa, Homo sapiens
  Payload ID: 17021
  Gene Symbol: SNAP91
  Gene Name: synaptosomal-associated protein, 91kDa
  ENSP ID: ENSP00000429429
MSGQTLTDRIAAAQYSVTGSAVARAVCKATTHEVMGPKKKHLDYLIQATNETNVNIPQMADTLFERATNSSWVVVFKALVTTHHLMVHGNERFIQYLASRNTLFNLSNFLDKSGSHGYDMSTFIRRYSRYLNEKAFSYRQMAFDFARVKKGA

SEQ ID NO: 85672 - protein, 120 aa, Homo sapiens
  Payload ID: 17021
  Gene Symbol: SNAP91
  Gene Name: synaptosomal-associated protein, 91kDa
  ENSP ID: ENSP00000429700
MSGQTLTDRIAAAQYSVTGSAVARAVCKATTHEVMGPKKKHLDYLIQATNETNVNIPQMADTLFERATNSSWVVVFKALVTTHHLMVHGNERFIQYLASRNTLFNLSNFLDKSGSHGPMV

SEQ ID NO: 85673 - protein, 902 aa, Homo sapiens; identical to SEQ ID NO: 85660
  Payload ID: 17021
  Gene Symbol: SNAP91
  Gene Name: synaptosomal-associated protein, 91kDa
  ENSP ID: ENSP00000429776

SEQ ID NO: 85674 - protein, 58 aa, Homo sapiens; identical to SEQ ID NO: 85670
  Payload ID: 17021
  Gene Symbol: SNAP91
  Gene Name: synaptosomal-associated protein, 91kDa
  ENSP ID: ENSP00000429937

SEQ ID NO: 85675 - protein, 58 aa, Homo sapiens; identical to SEQ ID NO: 85670
  Payload ID: 17021
  Gene Symbol: SNAP91
  Gene Name: synaptosomal-associated protein, 91kDa
  ENSP ID: ENSP00000429950

SEQ ID NO: 85676 - protein, 581 aa, Homo sapiens
  Payload ID: 17021
  Gene Symbol: SNAP91
  Gene Name: synaptosomal-associated protein, 91kDa
  ENSP ID: ENSP00000430071
MSGQTLTDRIAAAQYSVTGSAVARAVCKATTHEVMGPKKKHLDYLIQATNETNVNIPQMADTLFERATNSSWVVVFKALVTTHHLMVHGNERFIQYLASRNTLFNLSNFLDKSGSHGYDMSTFIRRYSRYLNEKAFSYRQMAFDFARVKKGADGVMRTMAPEKLLKSMPILQGQIDALLEFDVHPNELTNGVINAAFMLLFKDLIKLFACYNDGVINLLEKFFEMKKGQCKDALEIYKRFLTRMTRVSEFLKVAEQVGIDKGDIPDLTQAPSSLMETLEQHLNTLEGKKPGNKSGAPSPLSKSSPATTVTSPNSTPAKTIDTSPPVDLFATASAAVPVSTSKPSSDLLDLQPDFSSGGAAAAAAPAPPPPAGGATAWGDLFESTPEVAAAPKPDAAPSIDLFSTDAFSSPPQGASPVPESSLTADLLSVDAFAAPSPATTASPAKVDSSGVIDLFGDAFGSSASEPQPASQAASSSSASADLLAGFGGSFMAPSPSPVTPAQNNLLQPNFEAAFGTTPSTSSSSSFDPSVFDGLGDLLMPTMAPAGQPAPVSMVPPSPAMAASKALGSDLDSSLASLVGNL

SEQ ID NO: 85677 - protein, 222 aa, Homo sapiens
  Payload ID: 17021
  Gene Symbol: SNAP91
  Gene Name: synaptosomal-associated protein, 91kDa
  ENSP ID: ENSP00000430255
VPESSLTADLLSGFGGSFMAPSPSPVTPAQNNLLQPNFEAAFGTTPSTSSSSSFDPSVFDGLGDLLMPTMAPAGQPAPVSMVPPSPAMAASKALGSDLDSSLASLVGNLGISGTTTKKGDLQWNAGEKKLTGGANWQPKVAPATWSAGVPPSAPLQGAVPPTSSVPPVAGAPSVGQPGAGFGMPPAGTGMPMMPQQPVMFAQPMMRPPFGAAAVPGTQLQYL

SEQ ID NO: 85678 - protein, 150 aa, Homo sapiens
  Payload ID: 17021
  Gene Symbol: SNAP91
  Gene Name: synaptosomal-associated protein, 91kDa
  ENSP ID: ENSP00000430441
MSGQTLTDRIAAAQYSVTGSAVARAVCKATTHEVMGPKKKHLDYLIQATNETNVNIPQMADTLFERATNSSWVVVFKALVTTHHLMVHGNERFIQYLASRNTLFNLSNFLDKSGSHGYDMSTFIRRYSRYLNEKAFSYRQMAFDFARVKK

SEQ ID NO: 85679 - protein, 66 aa, Homo sapiens
  Payload ID: 17021
  Gene Symbol: SNAP91
  Gene Name: synaptosomal-associated protein, 91kDa
  ENSP ID: ENSP00000431055
MSGQTLTDRIAAAQYSVTGSAVARAVCKATTHEVMGPKKKHLDYLIQATNETNVNIPQMADTLFER

SEQ ID NO: 85680 - protein, 562 aa, Homo sapiens
  Payload ID: 17022
  Gene Symbol: SYNCRIP
  Gene Name: synaptotagmin binding, cytoplasmic RNA interacting protein
  Uniprot ID: O60506
  ENSP ID: ENSP00000347380
MATEHVNGNGTEEPMDTTSAVIHSENFQTLLDAGLPQKVAEKLDEIYVAGLVAHSDLDERAIEALKEFNEDGALAVLQQFKDSDLSHVQNKSAFLCGVMKTYRQREKQGTKVADSSKGPDEAKIKALLERTGYTLDVTTGQRKYGGPPPDSVYSGQQPSVGTEIFVGKIPRDLFEDELVPLFEKAGPIWDLRLMMDPLTGLNRGYAFVTFCTKEAAQEAVKLYNNHEIRSGKHIGVCISVANNRLFVGSIPKSKTKEQILEEFSKVTEGLTDVILYHQPDDKKKNRGFCFLEYEDHKTAAQARRRLMSGKVKVWGNVGTVEWADPIEDPDPEVMAKVKVLFVRNLANTVTEEILEKAFSQFGKLERVKKLKDYAFIHFDERDGAVKAMEEMNGKDLEGENIEIVFAKPPDQKRKERKAQRQAAKNQMYDDYYYYGPPHMPPPTRGRGRGGRGGYGYPPDYYGYEDYYDYYGYDYHNYRGGYEDPYYGYEDFQVGARGRGGRGARGAAPSRGRGAAPPRGRAGYSQRGGPGSARGVRGARGGAQQQRGRGQGKGVEAGPDLLQ

SEQ ID NO: 85681 - protein, 623 aa, Homo sapiens
  Payload ID: 17022
  Gene Symbol: SYNCRIP
  Gene Name: synaptotagmin binding, cytoplasmic RNA interacting protein
  Uniprot ID: O60506
  ENSP ID: ENSP00000358635
MATEHVNGNGTEEPMDTTSAVIHSENFQTLLDAGLPQKVAEKLDEIYVAGLVAHSDLDERAIEALKEFNEDGALAVLQQFKDSDLSHVQNKSAFLCGVMKTYRQREKQGTKVADSSKGPDEAKIKALLERTGYTLDVTTGQRKYGGPPPDSVYSGQQPSVGTEIFVGKIPRDLFEDELVPLFEKAGPIWDLRLMMDPLTGLNRGYAFVTFCTKEAAQEAVKLYNNHEIRSGKHIGVCISVANNRLFVGSIPKSKTKEQILEEFSKVTEGLTDVILYHQPDDKKKNRGFCFLEYEDHKTAAQARRRLMSGKVKVWGNVGTVEWADPIEDPDPEVMAKVKVLFVRNLANTVTEEILEKAFSQFGKLERVKKLKDYAFIHFDERDGAVKAMEEMNGKDLEGENIEIVFAKPPDQKRKERKAQRQAAKNQMYDDYYYYGPPHMPPPTRGRGRGGRGGYGYPPDYYGYEDYYDYYGYDYHNYRGGYEDPYYGYEDFQVGARGRGGRGARGAAPSRGRGAAPPRGRAGYSQRGGPGSARGVRGARGGAQQQRGRGVRGARGGRGGNVGGKRKADGYNQPDSKRRQTNNQNWGSQPIAQQPLQGGDHSGNYGYKSENQEFYQDTFGQQWK

SEQ ID NO: 85682 - protein, 185 aa, Homo sapiens
  Payload ID: 17022
  Gene Symbol: SYNCRIP
  Gene Name: synaptotagmin binding, cytoplasmic RNA interacting protein
  ENSP ID: ENSP00000397782
MATEHVNGNGTEEPMDTTSAVIHSENFQTLLDAGLPQKVAEKLDEIYVAGLVAHSDLDERAIEALKEFNEDGALAVLQQFKDSDLSHVQNKSAFLCGVMKTYRQREKQGTKVADSSKGPDEAKIKALLERTGYTLDVTTGQRKYGGPPPDSVYSGQQPSVGTEIFVGKIPRDLFEDELVPLFEKA

SEQ ID NO: 85683 - protein, 464 aa, Homo sapiens
  Payload ID: 17022
  Gene Symbol: SYNCRIP
  Gene Name: synaptotagmin binding, cytoplasmic RNA interacting protein
  ENSP ID: ENSP00000484577
MKTYRQREKQGTKVADSSKGPDEAKIKALLERTGYTLDVTTGQRKYGGPPPDSVYSGQQPSVGTEIFVGKIPRDLFEDELVPLFEKAGPIWDLRLMMDPLTGLNRGYAFVTFCTKEAAQEAVKLYNNHEIRSGKHIGVCISVANNRLFVGSIPKSKTKEQILEEFSKVTEGLTDVILYHQPDDKKKNRGFCFLEYEDHKTAAQARRRLMSGKVKVWGNVGTVEWADPIEDPDPEVMAKVKVLFVRNLANTVTEEILEKAFSQFGKLERVKKLKDYAFIHFDERDGAVKAMEEMNGKDLEGENIEIVFAKPPDQKRKERKAQRQAAKNQMYDDYYYYGPPHMPPPTRGRGRGGRGGYGYPPDYYGYEDYYDYYGYDYHNYRGGYEDPYYGYEDFQVGARGRGGRGARGAAPSRGRGAAPPRGRAGYSQRGGPGSARGVRGARGGAQQQRGRGQGKGVEAGPDLLQ

SEQ ID NO: 85684 - protein, 422 aa, Homo sapiens
  Payload ID: 17023
  Gene Symbol: SYT1
  Gene Name: synaptotagmin I
  Uniprot ID: P21579
  ENSP ID: ENSP00000261205
MVSESHHEALAAPPVTTVATVLPSNATEPASPGEGKEDAFSKLKEKFMNELHKIPLPPWALIAIAIVAVLLVLTCCFCICKKCLFKKKNKKKGKEKGGKNAINMKDVKDLGKTMKDQALKDDDAETGLTDGEEKEEPKEEEKLGKLQYSLDYDFQNNQLLVGIIQAAELPALDMGGTSDPYVKVFLLPDKKKKFETKVHRKTLNPVFNEQFTFKVPYSELGGKTLVMAVYDFDRFSKHDIIGEFKVPMNTVDFGHVTEEWRDLQSAEKEEQEKLGDICFSLRYVPTAGKLTVVILEAKNLKKMDVGGLSDPYVKIHLMQNGKRLKKKKTTIKKNTLNPYYNESFSFEVPFEQIQKVQVVVTVLDYDKIGKNDAIGKVFVGYNSTGAELRHWSDMLANPRRPIAQWHTLQVEEEVDAMLAVKK

SEQ ID NO: 85685 - protein, 422 aa, Homo sapiens; identical to SEQ ID NO: 85684
  Payload ID: 17023
  Gene Symbol: SYT1
  Gene Name: synaptotagmin I
  Uniprot ID: P21579
  ENSP ID: ENSP00000376932

SEQ ID NO: 85686 - protein, 419 aa, Homo sapiens
  Payload ID: 17023
  Gene Symbol: SYT1
  Gene Name: synaptotagmin I
  ENSP ID: ENSP00000391056
MVSESHHEALAAPPVTTVATVLPSNATEPASPGEGKEDAFSKLKEKFMNELHKIPLPPWALIAIAIVAVLLVLTCCFCICKKCLFKKKNKKKGKEKGGKNAINMKDVKDLGKTMKDQDDDAETGLTDGEEKEEPKEEEKLGKLQYSLDYDFQNNQLLVGIIQAAELPALDMGGTSDPYVKVFLLPDKKKKFETKVHRKTLNPVFNEQFTFKVPYSELGGKTLVMAVYDFDRFSKHDIIGEFKVPMNTVDFGHVTEEWRDLQSAEKEEQEKLGDICFSLRYVPTAGKLTVVILEAKNLKKMDVGGLSDPYVKIHLMQNGKRLKKKKTTIKKNTLNPYYNESFSFEVPFEQIQKVQVVVTVLDYDKIGKNDAIGKVFVGYNSTGAELRHWSDMLANPRRPIAQWHTLQVEEEVDAMLAVKK

SEQ ID NO: 85687 - protein, 181 aa, Homo sapiens
  Payload ID: 17023
  Gene Symbol: SYT1
  Gene Name: synaptotagmin I
  ENSP ID: ENSP00000401559
MVSESHHEALAAPPVTTVATVLPSNATEPASPGEGKEDAFSKLKEKFMNELHKIPLPPWALIAIAIVAVLLVLTCCFCICKKCLFKKKNKKKGKEKGGKNAINMKDVKDLGKTMKDQALKDDDAETGLTDGEEKEEPKEEEKLGKLQYSLDYDFQNNQLLVGIIQAAELPALDMGGTSDPY

SEQ ID NO: 85688 - protein, 94 aa, Homo sapiens
  Payload ID: 17023
  Gene Symbol: SYT1
  Gene Name: synaptotagmin I
  ENSP ID: ENSP00000447035
MVSESHHEALAAPPVTTVATVLPSNATEPASPGEGKEDAFSKLKEKFMNELHKIPLPPWALIAIAIVAVLLVLTCCFCICKKCLFKKKNKKKGK

SEQ ID NO: 85689 - protein, 422 aa, Homo sapiens; identical to SEQ ID NO: 85684
  Payload ID: 17023
  Gene Symbol: SYT1
  Gene Name: synaptotagmin I
  Uniprot ID: P21579
  ENSP ID: ENSP00000447575

SEQ ID NO: 85690 - protein, 72 aa, Homo sapiens
  Payload ID: 17023
  Gene Symbol: SYT1
  Gene Name: synaptotagmin I
  ENSP ID: ENSP00000447656
MVSESHHEALAAPPVTTVATVLPSNATEPASPGEGKEDAFSKLKEKFMNELHKIPLPPWALIAIAIVAVLLV

SEQ ID NO: 85691 - protein, 173 aa, Homo sapiens
  Payload ID: 17023
  Gene Symbol: SYT1
  Gene Name: synaptotagmin I
  ENSP ID: ENSP00000448861
MVSESHHEALAAPPVTTVATVLPSNATEPASPGEGKEDAFSKLKEKFMNELHKIPLPPWALIAIAIVAVLLVLTCCFCICKKCLFKKKNKKKGKEKGGKNAINMKDVKDLGKTMKDQDDDAETGLTDGEEKEEPKEEEKLGKLQYSLDYDFQNNQLLVGIIQAAELPALDMGG

SEQ ID NO: 85692 - protein, 58 aa, Homo sapiens
  Payload ID: 17023
  Gene Symbol: SYT1
  Gene Name: synaptotagmin I
  ENSP ID: ENSP00000448964
MVSESHHEALAAPPVTTVATVLPSNATEPASPGEGKEDAFSKLKEKFMNELHKIPLPP

SEQ ID NO: 85693 - protein, 72 aa, Homo sapiens; identical to SEQ ID NO: 85690
  Payload ID: 17023
  Gene Symbol: SYT1
  Gene Name: synaptotagmin I
  ENSP ID: ENSP00000450321

SEQ ID NO: 85694 - protein, 419 aa, Homo sapiens
  Payload ID: 17024
  Gene Symbol: SYT2
  Gene Name: synaptotagmin II
  Uniprot ID: Q8N9I0
  ENSP ID: ENSP00000356236
MRNIFKRNQEPIVAPATTTATMPIGPVDNSTESGGAGESQEDMFAKLKEKLFNEINKIPLPPWALIAIAVVAGLLLLTCCFCICKKCCCKKKKNKKEKGKGMKNAMNMKDMKGGQDDDDAETGLTEGEGEGEEEKEPENLGKLQFSLDYDFQANQLTVGVLQAAELPALDMGGTSDPYVKVFLLPDKKKKYETKVHRKTLNPAFNETFTFKVPYQELGGKTLVMAIYDFDRFSKHDIIGEVKVPMNTVDLGQPIEEWRDLQGGEKEEPEKLGDICTSLRYVPTAGKLTVCILEAKNLKKMDVGGLSDPYVKIHLMQNGKRLKKKKTTVKKKTLNPYFNESFSFEIPFEQIQKVQVVVTVLDYDKLGKNEAIGKIFVGSNATGTELRHWSDMLANPRRPIAQWHSLKPEEEVDALLGKNK

SEQ ID NO: 85695 - protein, 419 aa, Homo sapiens; identical to SEQ ID NO: 85694
  Payload ID: 17024
  Gene Symbol: SYT2
  Gene Name: synaptotagmin II
  Uniprot ID: Q8N9I0
  ENSP ID: ENSP00000356237

SEQ ID NO: 85696 - protein, 590 aa, Homo sapiens
  Payload ID: 17025
  Gene Symbol: SYT3
  Gene Name: synaptotagmin III
  Uniprot ID: Q9BQG1
  ENSP ID: ENSP00000340914
MSGDYEDDLCRRALILVSDLCARVRDADTNDRCQEFNDRIRGYPRGPDADISVSLLSVIVTFCGIVLLGVSLFVSWKLCWVPWRDKGGSAVGGGPLRKDLGPGVGLAGLVGGGGHHLAAGLGGHPLLGGPHHHAHAAHHPPFAELLEPGSLGGSDTPEPSYLDMDSYPEAAAAAVAAGVKPSQTSPELPSEGGAGSGLLLLPPSGGGLPSAQSHQQVTSLAPTTRYPALPRPLTQQTLTSQPDPSSEERPPALPLPLPGGEEKAKLIGQIKPELYQGTGPGGRRSGGGPGSGEAGTGAPCGRISFALRYLYGSDQLVVRILQALDLPAKDSNGFSDPYVKIYLLPDRKKKFQTKVHRKTLNPVFNETFQFSVPLAELAQRKLHFSVYDFDRFSRHDLIGQVVLDNLLELAEQPPDRPLWRDIVEGGSEKADLGELNFSLCYLPTAGRLTVTIIKASNLKAMDLTGFSDPYVKASLISEGRRLKKRKTSIKKNTLNPTYNEALVFDVAPESVENVGLSIAVVDYDCIGHNEVIGVCRVGPDAADPHGREHWAEMLANPRKPVEHWHQLVEEKTVTSFTKGSKGLSEKENSE

SEQ ID NO: 85697 - protein, 590 aa, Homo sapiens; identical to SEQ ID NO: 85696
  Payload ID: 17025
  Gene Symbol: SYT3
  Gene Name: synaptotagmin III
  Uniprot ID: Q9BQG1
  ENSP ID: ENSP00000438883

SEQ ID NO: 85698 - protein, 590 aa, Homo sapiens; identical to SEQ ID NO: 85696
  Payload ID: 17025
  Gene Symbol: SYT3
  Gene Name: synaptotagmin III
  Uniprot ID: Q9BQG1
  ENSP ID: ENSP00000468982

SEQ ID NO: 85699 - protein, 590 aa, Homo sapiens; identical to SEQ ID NO: 85696
  Payload ID: 17025
  Gene Symbol: SYT3
  Gene Name: synaptotagmin III
  Uniprot ID: Q9BQG1
  ENSP ID: ENSP00000469398

SEQ ID NO: 85700 - protein, 96 aa, Homo sapiens
  Payload ID: 17025
  Gene Symbol: SYT3
  Gene Name: synaptotagmin III
  ENSP ID: ENSP00000469637
MSGDYEDDLCRRALILVSDLCARVRDADTNDRCQEFNDRIRGYPRGPDADISVSLLSVIVTFCGIVLLGVSLFVSWKLCWVPWRDKGGSAVGGGPL

SEQ ID NO: 85701 - protein, 79 aa, Homo sapiens
  Payload ID: 17025
  Gene Symbol: SYT3
  Gene Name: synaptotagmin III
  ENSP ID: ENSP00000469834
GHNEVIGVCRVGPDAADPHGREHWAEMLANPRKPVEHWHQLVEVSRGPTPTPDKHPCTLGPFIHATNALHVRESQSQAS

SEQ ID NO: 85702 - protein, 425 aa, Homo sapiens
  Payload ID: 17026
  Gene Symbol: SYT4
  Gene Name: synaptotagmin IV
  Uniprot ID: Q9H2B2
  ENSP ID: ENSP00000255224
MAPITTSREEFDEIPTVVGIFSAFGLVFTVSLFAWICCQRKSSKSNKTPPYKFVHVLKGVDIYPENLNSKKKFGADDKNEVKNKPAVPKNSLHLDLEKRDLNGNFPKTNLKPGSPSDLENATPKLFLEGEKESVSPESLKSSTSLTSEEKQEKLGTLFFSLEYNFERKAFVVNIKEARGLPAMDEQSMTSDPYIKMTILPEKKHKVKTRVLRKTLDPAFDETFTFYGIPYTQIQELALHFTILSFDRFSRDDIIGEVLIPLSGIELSEGKMLMNREIIKRNVRKSSGRGELLISLCYQSTTNTLTVVVLKARHLPKSDVSGLSDPYVKVNLYHAKKRISKKKTHVKKCTPNAVFNELFVFDIPCEGLEDISVEFLVLDSERGSRNEVIGQLVLGAAAEGTGGEHWKEICDYPRRQIAKWHVLCDG

SEQ ID NO: 85703 - protein, 407 aa, Homo sapiens
  Payload ID: 17026
  Gene Symbol: SYT4
  Gene Name: synaptotagmin IV
  Uniprot ID: Q9H2B2
  ENSP ID: ENSP00000466930
MAPITTSREEFVSLFAWICCQRKSSKSNKTPPYKFVHVLKGVDIYPENLNSKKKFGADDKNEVKNKPAVPKNSLHLDLEKRDLNGNFPKTNLKPGSPSDLENATPKLFLEGEKESVSPESLKSSTSLTSEEKQEKLGTLFFSLEYNFERKAFVVNIKEARGLPAMDEQSMTSDPYIKMTILPEKKHKVKTRVLRKTLDPAFDETFTFYGIPYTQIQELALHFTILSFDRFSRDDIIGEVLIPLSGIELSEGKMLMNREIIKRNVRKSSGRGELLISLCYQSTTNTLTVVVLKARHLPKSDVSGLSDPYVKVNLYHAKKRISKKKTHVKKCTPNAVFNELFVFDIPCEGLEDISVEFLVLDSERGSRNEVIGQLVLGAAAEGTGGEHWKEICDYPRRQIAKWHVLCDG

SEQ ID NO: 85704 - protein, 103 aa, Homo sapiens
  Payload ID: 17026
  Gene Symbol: SYT4
  Gene Name: synaptotagmin IV
  ENSP ID: ENSP00000470516
MLMNREIIKRNVRKSSGRGELLISLCYQSTTNTLTVVVLKARHLPKSDVSGLSDPYVKVNLYHAKKRISKKKTHVKKCTPNAVFNELFVFDIPCEGLEDISVE

SEQ ID NO: 85705 - protein, 143 aa, Homo sapiens
  Payload ID: 17026
  Gene Symbol: SYT4
  Gene Name: synaptotagmin IV
  ENSP ID: ENSP00000472583
MKSPQWWGSSVHLAWSSQSLSLHGSAVRENHPMKTRVLRKTLDPAFDETFTFYGIPYTQIQELALHFTILSFDRFSRDDIIGEVLIPLSGIELSEGKMLMNREIIKRNVRKSSGRGELLISLCYQSTTNTLTVVVLKARHLPK

SEQ ID NO: 85706 - protein, 491 aa, Homo sapiens
  Payload ID: 17027
  Gene Symbol: SYT9
  Gene Name: synaptotagmin IX
  Uniprot ID: Q86SS6
  ENSP ID: ENSP00000324419
MPGARDALCHQALQLLAELCARGALEHDSCQDFIYHLRDRARPRLRDPDISVSLLTLVVTACGLALFGVSLFVSWKLCWVPWRERGLPSGSKDNNQEPLNYMDTETNEQENSEDFLDPPTPCPDSSMKISHTSPDIPLSTQTGIQENCAHGVRVQRQVTEPTSSARHNSIRRQLNLSNPDFNIQQLQKQEQLTGIGRIKPELYKQRSLDNDDGRRSNSKACGKLNFILKYDCDLEQLIVKIHKAVNLPAKDFSGTSDPYVKIYLLPDRKTKHQTKVHRKTLNPVFDEVFLFPVPYNDLEARKLHFSVYDFDRFSRHDLIGQVVVDHFLDLADFPRECILWKDIEYVTNDNVDLGELMFSLCYLPTAGRLTITIIKARNLKAMDITGASDPYVKVSLMCDGRRLKKRKTSTKRNTLNPVYNEAIVFDVPPENIDQIHLSIAVMDYDRVGHNEIIGVCQVGNEAERLGRDHWSEMLSYPRKPIAHWHSLVEKR

SEQ ID NO: 85707 - protein, 319 aa, Homo sapiens
  Payload ID: 17027
  Gene Symbol: SYT9
  Gene Name: synaptotagmin IX
  ENSP ID: ENSP00000432141
MLAKVVEGDLAFKGGRDISVSLLTLVVTACGLALFGVSLFVSWKLCWVPWRERGLPSGSKDNNQEPLNYMDTETNEQENSEDFLDPPTPCPDSSMKISHTSPDIPLSTQTGIQENCAHGVRVQRQVTEPTSSARHNSIRRQLNLSNPDFNIQQLQKQEQLTGIGRIKPELYKQRSLDNDDGRRSNSKACGKLNFILKYDCDLEQLIVKIHKAVNLPAKDFSGTSDPYVKIYLLPDRKTKHQTKVHRKTLNPVFDEVFLFPVPYNDLEARKLHFSVYDFDRFSRHDLIGQVVVDHFLDLADFPRECILWKDIEYVTNILS

SEQ ID NO: 85708 - protein, 173 aa, Homo sapiens
  Payload ID: 17027
  Gene Symbol: SYT9
  Gene Name: synaptotagmin IX
  ENSP ID: ENSP00000434558
MPGARDALCHQALQLLAELCARGALEHDSCQDFIYHLRDRARPRLRDPDISVSLLTLVVTACGLALFGVSLFVSWKLCWVPWRERGLPSGSKDNNQEPLNYMDTETNEQENSEDFLDPPTPCPDSSMKISHTSPDIPLSTQTGIQENCAHGVRVQRQVTEPTSSARTTWIWES

SEQ ID NO: 85709 - protein, 386 aa, Homo sapiens
  Payload ID: 17028
  Gene Symbol: SYT5
  Gene Name: synaptotagmin V
  Uniprot ID: O00445
  ENSP ID: ENSP00000346265
MFPEPPTPGPPSPDTPPDSSRISHGPVPPWALATIVLVSGLLIFSCCFCLYRKSCRRRTGKKSQAQAQVHLQEVKGLGQSYIDKVQPEVEELEPAPSGPGQQVADKHELGRLQYSLDYDFQSGQLLVGILQAMGLAALDLGGSSDPYVRVYLLPDKRRRYETKVHRQTLNPHFGETFAFKVPYVELGGRVLVMAVYDFDRFSRNDAIGEVRVPMSSVDLGRPVQAWRELQAAPREEQEKLGDICFSLRYVPTAGKLTVIVLEAKNLKKMDVGGLSDPYVKVHLLQGGKKVRKKKTTIKKNTLNPYYNEAFSFEVPCDQVQKVQVELTVLDYDKLGKNEAIGRVAVGAAAGGAGLRHWADMLANPRRPIAQWHSLRPPDRVRLLPAP

SEQ ID NO: 85710 - protein, 386 aa, Homo sapiens; identical to SEQ ID NO: 85709
  Payload ID: 17028
  Gene Symbol: SYT5
  Gene Name: synaptotagmin V
  Uniprot ID: O00445
  ENSP ID: ENSP00000442896

SEQ ID NO: 85711 - protein, 49 aa, Homo sapiens
  Payload ID: 17028
  Gene Symbol: SYT5
  Gene Name: synaptotagmin V
  ENSP ID: ENSP00000465074
MFPEPPTPGPPSPDTPPDSSRISHGPGAARSRGAGASTIRARAAGGRQA

SEQ ID NO: 85712 - protein, 152 aa, Homo sapiens
  Payload ID: 17028
  Gene Symbol: SYT5
  Gene Name: synaptotagmin V
  ENSP ID: ENSP00000465110
MFPEPPTPGPPSPDTPPDSSRISHGPVPPWALATIVLVSGLLIFSCCFCLYRKSCRRRTGKKSQAQAQVHLQEVKGLGQSYIDKVQPEVEELEPAPSGPGQQVADKHELGRLQYSLDYDFQSGQLLVGILQAMGLAALDLGGSSDPYVRVYL

SEQ ID NO: 85713 - protein, 67 aa, Homo sapiens
  Payload ID: 17028
  Gene Symbol: SYT5
  Gene Name: synaptotagmin V
  ENSP ID: ENSP00000465304
MDVGGLSDPYVKVHLLQGGKKVRKKKTTIKKNTLNPYYNEAFSFEVPCDQVQKVQVELTVLDYDKLG

SEQ ID NO: 85714 - protein, 382 aa, Homo sapiens
  Payload ID: 17028
  Gene Symbol: SYT5
  Gene Name: synaptotagmin V
  Uniprot ID: O00445
  ENSP ID: ENSP00000465576
MTRGGCPVSARLFAQRPHGSWSSLLCVGLKGRLGWEWGTRVLECLCRKDSRTPPPCSRSPQPRGLHRPTRLPTPVASATAQVQPEVEELEPAPSGPGQQVADKHELGRLQYSLDYDFQSGQLLVGILQAMGLAALDLGGSSDPYVRVYLLPDKRRRYETKVHRQTLNPHFGETFAFKVPYVELGGRVLVMAVYDFDRFSRNDAIGEVRVPMSSVDLGRPVQAWRELQAAPREEEKLGDICFSLRYVPTAGKLTVIVLEAKNLKKMDVGGLSDPYVKVHLLQGGKKVRKKKTTIKKNTLNPYYNEAFSFEVPCDQVQKVQVELTVLDYDKLGKNEAIGRVAVGAAAGGAGLRHWADMLANPRRPIAQWHSLRPPDRVRLLPAP

SEQ ID NO: 85715 - protein, 154 aa, Homo sapiens
  Payload ID: 17028
  Gene Symbol: SYT5
  Gene Name: synaptotagmin V
  ENSP ID: ENSP00000467685
MFPEPPTPGPPSPDTPPDSSRISHGPVPPWALATIVLVSGLLIFSCCFCLYRKSCRRRTGKKSQAQAQVHLQEVKGLGQSYIDKVQPEVEELEPAPSGPGQQVADKHELGRLQYSLDYDFQSGQLLVGILQAMGLAALDLGGSSDPYVRVYLLP

SEQ ID NO: 85716 - protein, 22 aa, Homo sapiens
  Payload ID: 17028
  Gene Symbol: SYT5
  Gene Name: synaptotagmin V
  ENSP ID: ENSP00000469874
  MOD_RES (1)..(1): Any amino acid
XYYNEAFSFEVPCDQVQGRRLP

SEQ ID NO: 85717 - protein, 425 aa, Homo sapiens
  Payload ID: 17029
  Gene Symbol: SYT6
  Gene Name: synaptotagmin VI
  Uniprot ID: Q5T7P8
  ENSP ID: ENSP00000358560
MPWRNKEASSPSSANPPLEALQSPSFRGNMADKLKDPSTLGFLEAAVKISHTSPDIPAEVQMSVKEHIMRHTRLQRQTTEPASSTRHTSFKRHLPRQMHVSSVDYGNELPPAAEQPTSIGRIKPELYKQKSVDGEDAKSEATKSCGKINFSLRYDYETETLIVRILKAFDLPAKDFCGSSDPYVKIYLLPDRKCKLQTRVHRKTLNPTFDENFHFPVPYEELADRKLHLSVFDFDRFSRHDMIGEVILDNLFEASDLSRETSIWKDIQYATSESVDLGEIMFSLCYLPTAGRLTLTVIKCRNLKAMDITGYSDPYVKVSLLCDGRRLKKKKTTIKKNTLNPVYNEAIIFDIPPENMDQVSLLISVMDYDRVGHNEIIGVCRVGITAEGLGRDHWNEMLAYPRKPIAHWHSLVEVKKSFKEGNPRL

SEQ ID NO: 85718 - protein, 125 aa, Homo sapiens
  Payload ID: 17029
  Gene Symbol: SYT6
  Gene Name: synaptotagmin VI
  ENSP ID: ENSP00000476324
MACRALAAGAAGGSATWRPAQGTSVSLLAVVVIVCGVALVAVFLFLFWKLCWMPWRNKEASSPSSANPPLEALQSPSFRGNMADKLKDPSTLGFLEAAVKISHTSPDIPAEVQMSVKEHIMRHTR

SEQ ID NO: 85719 - protein, 510 aa, Homo sapiens
  Payload ID: 17029
  Gene Symbol: SYT6
  Gene Name: synaptotagmin VI
  Uniprot ID: Q5T7P8
  ENSP ID: ENSP00000476396
MSGVWGAGGPRCQEALAVLASLCRARPPPLGLDVETCRSFELQPPERSPSAAGAGTSVSLLAVVVIVCGVALVAVFLFLFWKLCWMPWRNKEASSPSSANPPLEALQSPSFRGNMADKLKDPSTLGFLEAAVKISHTSPDIPAEVQMSVKEHIMRHTRLQRQTTEPASSTRHTSFKRHLPRQMHVSSVDYGNELPPAAEQPTSIGRIKPELYKQKSVDGEDAKSEATKSCGKINFSLRYDYETETLIVRILKAFDLPAKDFCGSSDPYVKIYLLPDRKCKLQTRVHRKTLNPTFDENFHFPVPYEELADRKLHLSVFDFDRFSRHDMIGEVILDNLFEASDLSRETSIWKDIQYATSESVDLGEIMFSLCYLPTAGRLTLTVIKCRNLKAMDITGYSDPYVKVSLLCDGRRLKKKKTTIKKNTLNPVYNEAIIFDIPPENMDQVSLLISVMDYDRVGHNEIIGVCRVGITAEGLGRDHWNEMLAYPRKPIAHWHSLVEVKKSFKEGNPRL

SEQ ID NO: 85720 - protein, 425 aa, Homo sapiens; identical to SEQ ID NO: 85717
  Payload ID: 17029
  Gene Symbol: SYT6
  Gene Name: synaptotagmin VI
  Uniprot ID: Q5T7P8
  ENSP ID: ENSP00000476507

SEQ ID NO: 85721 - protein, 71 aa, Homo sapiens
  Payload ID: 17029
  Gene Symbol: SYT6
  Gene Name: synaptotagmin VI
  ENSP ID: ENSP00000476562
MSGVWGAGGPRCQEALAVLASLCRARPPPLGLDVETCRSFELQPPERSPSAAGAAVLDALEEQGGLQSLFC

SEQ ID NO: 85722 - protein, 214 aa, Homo sapiens
  Payload ID: 17029
  Gene Symbol: SYT6
  Gene Name: synaptotagmin VI
  ENSP ID: ENSP00000476616
MPWRNKEASSPSSANPPLEALQSPSFRGNMADKLKDPSTLGFLEAAVKISHTSPDIPAEVQMSVKEHIMRHTRLQRQTTEPASSTRHTSFKRHLPRQMHVSSVDYGNELPPAAEQPTSIGRIKPELYKQKSVDGEDAKSEATKSCGKINFSLRYDYETETLIVRILKAFDLPAKDFCGSSDPYVKIYLLPDRKCKLQTRVHRKTLNPTFDENFH

SEQ ID NO: 85723 - protein, 88 aa, Homo sapiens
  Payload ID: 17029
  Gene Symbol: SYT6
  Gene Name: synaptotagmin VI
  ENSP ID: ENSP00000477219
MPWRNKEASSPSSANPPLEALQSPSFRGNMADKLKDPSTLGFLEAAVKISHTSPDIPAEVQMSVKEHIMRHTRLQRQTTEPASSTRHT

SEQ ID NO: 85724 - protein, 71 aa, Homo sapiens; identical to SEQ ID NO: 85721
  Payload ID: 17029
  Gene Symbol: SYT6
  Gene Name: synaptotagmin VI
  ENSP ID: ENSP00000477325

SEQ ID NO: 85725 - protein, 425 aa, Homo sapiens; identical to SEQ ID NO: 85717
  Payload ID: 17029
  Gene Symbol: SYT6
  Gene Name: synaptotagmin VI
  Uniprot ID: Q5T7P8
  ENSP ID: ENSP00000477344

SEQ ID NO: 85726 - protein, 403 aa, Homo sapiens
  Payload ID: 17030
  Gene Symbol: SYT7
  Gene Name: synaptotagmin VII
  Uniprot ID: O43581
  ENSP ID: ENSP00000263846
MYRDPEAASPGAPSRDVLLVSAIITVSLSVTVVLCGLCHWCQRKLGKRYKNSLETVGTPDSGRGRSEKKAIKLPAGGKAVNTAPVPGQTPHDESDRRTEPRSSVSDLVNSLTSEMLMLSPGSEEDEAHEGCSRENLGRIQFSVGYNFQESTLTVKIMKAQELPAKDFSGTSDPFVKIYLLPDKKHKLETKVKRKNLNPHWNETFLFEGFPYEKVVQRILYLQVLDYDRFSRNDPIGEVSIPLNKVDLTQMQTFWKDLKPCSDGSGSRGELLLSLCYNPSANSIIVNIIKARNLKAMDIGGTSDPYVKVWLMYKDKRVEKKKTVTMKRNLNPIFNESFAFDIPTEKLRETTIIITVMDKDKLSRNDVIGKIYLSWKSGPGEVKHWKDMIARPRQPVAQWHQLKA

SEQ ID NO: 85727 - protein, 522 aa, Homo sapiens
  Payload ID: 17030
  Gene Symbol: SYT7
  Gene Name: synaptotagmin VII
  ENSP ID: ENSP00000437720
MYRDPEAASPGAPSRDVLLVSAIITVSLSVTVVLCGLCHWCQRKLGKRYKNSLETVGTPDSGRGRSEKKAINDLDRDFWNNNESTVQQKWSSYPPKEFILNISPYAPYGDPRLSLNGTLLSGAKVAAAAGLAVEREGRLGEKPAPVPPPGEDALRSGGAAPSEPGSGGKAGRGRWRTVQSHLAAGKLNLSKLPAGGKAVNTAPVPGQTPHDESDRRTEPRSSVSDLVNSLTSEMLMLSPGSEEDEAHEGCSRENLGRIQFSVGYNFQESTLTVKIMKAQELPAKDFSGTSDPFVKIYLLPDKKHKLETKVKRKNLNPHWNETFLFEGFPYEKVVQRILYLQVLDYDRFSRNDPIGEVSIPLNKVDLTQMQTFWKDLKPCSDGSGSRGELLLSLCYNPSANSIIVNIIKARNLKAMDIGGTSDPYVKVWLMYKDKRVEKKKTVTMKRNLNPIFNESFAFDIPTEKLRETTIIITVMDKDKLSRNDVIGKIYLSWKSGPGEVKHWKDMIARPRQPVAQWHQLKA

SEQ ID NO: 85728 - protein, 122 aa, Homo sapiens
  Payload ID: 17030
  Gene Symbol: SYT7
  Gene Name: synaptotagmin VII
  ENSP ID: ENSP00000438171
MYRDPEAASPGAPSRDVLLVSAIITVSLSVTVVLCGLCHWCQRKLGKRYKNSLETVGTPDSGRGRSEKKAINDLDRDFWNNNESTVQQKWSSYPPKEFILNISPYAPYGDPRLSLNPLFLRR

SEQ ID NO: 85729 - protein, 686 aa, Homo sapiens
  Payload ID: 17030
  Gene Symbol: SYT7
  Gene Name: synaptotagmin VII
  ENSP ID: ENSP00000439694
MYRDPEAASPGAPSRDVLLVSAIITVSLSVTVVLCGLCHWCQRKLGKRYKNSLETVGTPDSGRGRSEKKAINDLDRDFWNNNESTVQQKWSSYPPKEFILNISPYAPYGDPRLSLNGTLLSGAKVAAAAGLAVEREGRLGEKPAPVPPPGEDALRSGGAAPSEPGSGGKAGRGRWRTVQSHLAAGKLNLSNFEDSTLSTATTLESIPSSTGEPKCQRPRTLMRQQSLQQPLSQHQRGRQPSQPTTSQSLGQLQAHMASAPGPNPRAYGRGQARQGTSAGSKYRAAGGRSRSNPGSWDHVVGQIRNRGLDMKSFLEGRMVVLSLVLGLSEQDDFANIPDLQNPGTQQNQNAQGDKRLPAGGKAVNTAPVPGQTPHDESDRRTEPRSSVSDLVNSLTSEMLMLSPGSEEDEAHEGCSRENLGRIQFSVGYNFQESTLTVKIMKAQELPAKDFSGTSDPFVKIYLLPDKKHKLETKVKRKNLNPHWNETFLFEGFPYEKVVQRILYLQVLDYDRFSRNDPIGEVSIPLNKVDLTQMQTFWKDLKPCSDGSGSRGELLLSLCYNPSANSIIVNIIKARNLKAMDIGGTSDPYVKVWLMYKDKRVEKKKTVTMKRNLNPIFNESFAFDIPTEKLRETTIIITVMDKDKLSRNDVIGKIYLSWKSGPGEVKHWKDMIARPRQPVAQWHQLKA

SEQ ID NO: 85730 - protein, 122 aa, Homo sapiens; identical to SEQ ID NO: 85728
  Payload ID: 17030
  Gene Symbol: SYT7
  Gene Name: synaptotagmin VII
  ENSP ID: ENSP00000441184

SEQ ID NO: 85731 - protein, 175 aa, Homo sapiens
  Payload ID: 17030
  Gene Symbol: SYT7
  Gene Name: synaptotagmin VII
  ENSP ID: ENSP00000443576
MYRDPEAASPGAPSRDVLLVSAIITVSLSVTVVLCGLCHWCQRKLGKRYKNSLETVGTPDSGRGRSEKKAIKLPAGGKAVNTAPVPGQTPHDESDRRTEPRSSVSDLVNSLTSEMLMLSPGSEEDEAHEGCSRENLGRIQFSVGYNFQESTLTVKIMKAQELPAKDFSGTSDPFV

SEQ ID NO: 85732 - protein, 611 aa, Homo sapiens
  Payload ID: 17030
  Gene Symbol: SYT7
  Gene Name: synaptotagmin VII
  ENSP ID: ENSP00000444019
MYRDPEAASPGAPSRDVLLVSAIITVSLSVTVVLCGLCHWCQRKLGKRYKNSLETVGTPDSGRGRSEKKAINDLDRDFWNNNESTVQQKWSSYPPKEFILNISPYAPYGDPRLSLNFEDSTLSTATTLESIPSSTGEPKCQRPRTLMRQQSLQQPLSQHQRGRQPSQPTTSQSLGQLQAHMASAPGPNPRAYGRGQARQGTSAGSKYRAAGGRSRSNPGSWDHVVGQIRNRGLDMKSFLEGRMVVLSLVLGLSEQDDFANIPDLQNPGTQQNQNAQGDKRLPAGGKAVNTAPVPGQTPHDESDRRTEPRSSVSDLVNSLTSEMLMLSPGSEEDEAHEGCSRENLGRIQFSVGYNFQESTLTVKIMKAQELPAKDFSGTSDPFVKIYLLPDKKHKLETKVKRKNLNPHWNETFLFEGFPYEKVVQRILYLQVLDYDRFSRNDPIGEVSIPLNKVDLTQMQTFWKDLKPCSDGSGSRGELLLSLCYNPSANSIIVNIIKARNLKAMDIGGTSDPYVKVWLMYKDKRVEKKKTVTMKRNLNPIFNESFAFDIPTEKLRETTIIITVMDKDKLSRNDVIGKIYLSWKSGPGEVKHWKDMIARPRQPVAQWHQLKA

SEQ ID NO: 85733 - protein, 478 aa, Homo sapiens
  Payload ID: 17030
  Gene Symbol: SYT7
  Gene Name: synaptotagmin VII
  Uniprot ID: O43581
  ENSP ID: ENSP00000444201
MYRDPEAASPGAPSRDVLLVSAIITVSLSVTVVLCGLCHWCQRKLGKRYKNSLETVGTPDSGRGRSEKKAINGTLLSGAKVAAAAGLAVEREGRLGEKPAPVPPPGEDALRSGGAAPSEPGSGGKAGRGRWRTVQSHLAAGKLNLSKLPAGGKAVNTAPVPGQTPHDESDRRTEPRSSVSDLVNSLTSEMLMLSPGSEEDEAHEGCSRENLGRIQFSVGYNFQESTLTVKIMKAQELPAKDFSGTSDPFVKIYLLPDKKHKLETKVKRKNLNPHWNETFLFEGFPYEKVVQRILYLQVLDYDRFSRNDPIGEVSIPLNKVDLTQMQTFWKDLKPCSDGSGSRGELLLSLCYNPSANSIIVNIIKARNLKAMDIGGTSDPYVKVWLMYKDKRVEKKKTVTMKRNLNPIFNESFAFDIPTEKLRETTIIITVMDKDKLSRNDVIGKIYLSWKSGPGEVKHWKDMIARPRQPVAQWHQLKA

SEQ ID NO: 85734 - protein, 447 aa, Homo sapiens
  Payload ID: 17030
  Gene Symbol: SYT7
  Gene Name: synaptotagmin VII
  ENSP ID: ENSP00000444568
MYRDPEAASPGAPSRDVLLVSAIITVSLSVTVVLCGLCHWCQRKLGKRYKNSLETVGTPDSGRGRSEKKAINDLDRDFWNNNESTVQQKWSSYPPKEFILNISPYAPYGDPRLSLKLPAGGKAVNTAPVPGQTPHDESDRRTEPRSSVSDLVNSLTSEMLMLSPGSEEDEAHEGCSRENLGRIQFSVGYNFQESTLTVKIMKAQELPAKDFSGTSDPFVKIYLLPDKKHKLETKVKRKNLNPHWNETFLFEGFPYEKVVQRILYLQVLDYDRFSRNDPIGEVSIPLNKVDLTQMQTFWKDLKPCSDGSGSRGELLLSLCYNPSANSIIVNIIKARNLKAMDIGGTSDPYVKVWLMYKDKRVEKKKTVTMKRNLNPIFNESFAFDIPTEKLRETTIIITVMDKDKLSRNDVIGKIYLSWKSGPGEVKHWKDMIARPRQPVAQWHQLKA

SEQ ID NO: 85735 - protein, 387 aa, Homo sapiens
  Payload ID: 17031
  Gene Symbol: SYT8
  Gene Name: synaptotagmin VIII
  ENSP ID: ENSP00000343691
MGHPPVSPSAPAPAGTTAIPGLIPDLVAGTPWPRWALIAGALAAGVLLVSCLLCAACCCCRRHRKKPRDKESVGLGSARGTTTTHLVQPDVDGLESSPGDAQQWGCLQLSLEFDFGSQEIRVGLRQAADLRPGGTVDPYARVSVSTQAGHRHETKVHRGTLCPVFDETCCFHIPQAELPGATLQVQLFNFKRFSGHEPLGELRLPLGTVDLQHVLEHWYLLGPPAATQPEQVGELCFSLRYVPSSGRLTVVVLEARGLRPGLAEPYVKVQLMLNQRKWKKRKTATKKGTAAPYFNEAFTFLVPFSQVQNVDLVLAVWDRSLPLRTEPVGKVHLGARASGQPLQHWADMLAHARRPIAQRHPLRPAREVDRMLALQPRLRLRLPLPHS

SEQ ID NO: 85736 - protein, 401 aa, Homo sapiens
  Payload ID: 17031
  Gene Symbol: SYT8
  Gene Name: synaptotagmin VIII
  Uniprot ID: Q8NBV8
  ENSP ID: ENSP00000371394
MLHLHGWQTMQGRKMGHPPVSPSAPAPAGTTAIPGLIPDLVAGTPWPRWALIAGALAAGVLLVSCLLCAACCCCRRHRKKPRDKESVGLGSARGTTTTHLVQPDVDGLESSPGDAQQWGCLQLSLEFDFGSQEIRVGLRQAADLRPGGTVDPYARVSVSTQAGHRHETKVHRGTLCPVFDETCCFHIPQAELPGATLQVQLFNFKRFSGHEPLGELRLPLGTVDLQHVLEHWYLLGPPAATQPEQVGELCFSLRYVPSSGRLTVVVLEARGLRPGLAEPYVKVQLMLNQRKWKKRKTATKKGTAAPYFNEAFTFLVPFSQVQNVDLVLAVWDRSLPLRTEPVGKVHLGARASGQPLQHWADMLAHARRPIAQRHPLRPAREVDRMLALQPRLRLRLPLPHS

SEQ ID NO: 85737 - protein, 400 aa, Homo sapiens
  Payload ID: 17031
  Gene Symbol: SYT8
  Gene Name: synaptotagmin VIII
  ENSP ID: ENSP00000371406
  MOD_RES (1)..(1): Any amino acid
XGKPWWAPAVGRKMGHPPVSPSAPAPAGTTAIPGLIPDLVAGTPWPRWALIAGALAAGVLLVSCLLCAACCCCRRHRKKPRDKESVGLGSARGTTTTHLVQPDVDGLESSPGDAQQWGCLQLSLEFDFGSQEIRVGLRQAADLRPGGTVDPYARVSVSTQAGHRHETKVHRGTLCPVFDETCCFHIPQAELPGATLQVQLFNFKRFSGHEPLGELRLPLGTVDLQHVLEHWYLLGPPAATQPEQVGELCFSLRYVPSSGRLTVVVLEARGLRPGLAEPYVKVQLMLNQRKWKKRKTATKKGTAAPYFNEAFTFLVPFSQVQNVDLVLAVWDRSLPLRTEPVGKVHLGARASGQPLQHWADMLAHARRPIAQRHPLRPAREVDRMLALQPRLRLRLPLPHS

SEQ ID NO: 85738 - protein, 99 aa, Homo sapiens
  Payload ID: 17031
  Gene Symbol: SYT8
  Gene Name: synaptotagmin VIII
  ENSP ID: ENSP00000387678
MGHPPVSPSAPAPAGTTAIPGLIPDLVAGTPWPRWALIAGALAAGVLLVSCLLCAACCCCRRHRKKPRDKESVGLGSARGTTTTHLVQPDVDGLESSPG

SEQ ID NO: 85739 - protein, 102 aa, Homo sapiens
  Payload ID: 17031
  Gene Symbol: SYT8
  Gene Name: synaptotagmin VIII
  ENSP ID: ENSP00000392469
MGHPPVSPSAPAPAGTTAIPGLIPDLVAGTPWPRWALIAGALAAGVLLVSCLLCAACCCCRRHRKKPRDKESVGLGSARGTTTTHLVQPDVDGLESSPGDAQ

SEQ ID NO: 85740 - protein, 129 aa, Homo sapiens
  Payload ID: 17031
  Gene Symbol: SYT8
  Gene Name: synaptotagmin VIII
  ENSP ID: ENSP00000405850
MGHPPVSPSAPAPAGTTAIPGLIPDLVAGTPSWPLPQGPAGLSLPAPLPRASSSSPASSVLPAAAAAATGRSPGTRSPWVWAVPAAPPPPTWCNLMWMAWSPARGMLSNGGACSSPWSSTLEARRSGWA

SEQ ID NO: 85741 - protein, 523 aa, Homo sapiens
  Payload ID: 17032
  Gene Symbol: SYT10
  Gene Name: synaptotagmin X
  Uniprot ID: Q6XYQ8
  ENSP ID: ENSP00000228567
MSFHKEDGVNSLCQKALHIVTELCFAGQVEWEKCSGIFPRDRGSQGGSSTDISVSLLAVVVSFCGLALLVVSLFVFWKLCWPCWKSKPVTSNITTLPQSISSAPTEVFETEEKKEIKENEKPAVKAIEPAIKISHTSPDIPAEVQTALKEHLIKHARVQRQITEPTSSTRHSSFRRHLPRQMQVSSVDFSMGTEPVLQRGETTTSIGRIKPELYKQKSVDSEGNQNEDVKICGKLNFTLQYDYENELLVVKIIKALDLPAKDFTGTSDPYVKMYLLPDRKKKFQTRVHRKTLNPLFDETFQFPVAYDQLSNRKLHFSVYDFDRFSRHDMIGEVILDNLFEVSDLSREATVWKDIHCATTESIDLGEIMFSLCYLPTAGRMTLTVIKCRNLKAMDITGSSDPYVKVSLMCEGRRLKKRKTTTKKNTLNPVYNEAIIFDIPPENVDQVSLSIAVMDYDRVGHNEVIGVCRTGLDAEGLGRDHWNEMLAYHRKPITHWHPLLELPGRATSFDSQGSCPSPKPPSTP

SEQ ID NO: 85742 - protein, 194 aa, Homo sapiens
  Payload ID: 17032
  Gene Symbol: SYT10
  Gene Name: synaptotagmin X
  ENSP ID: ENSP00000444577
MSFHKEDGVNSLCQKALHIVTELCFAGQVEWEKCSGIFPRDRGSQGGSSTDISVSLLAVVVSFCGLALLVVSLFVFWKLCWPCWKSKPVTSNITTLPQSISSAPTEVFETEEKKEIKENEKPAVKAIEPAIKISHTSPDIPAEVQTALKEHLIKHARVQRQITEPTSSTRGWGKKKKKRILSTCNFVTMPRHPS

SEQ ID NO: 85743 - protein, 431 aa, Homo sapiens
  Payload ID: 17033
  Gene Symbol: SYT11
  Gene Name: synaptotagmin XI
  Uniprot ID: Q9BT88
  ENSP ID: ENSP00000357307
MAEITNIRPSFDVSPVVAGLIGASVLVVCVSVTVFVWSCCHQQAEKKQKNPPYKFIHMLKGISIYPETLSNKKKIIKVRRDKDGPGREGGRRNLLVDAAEAGLLSRDKDPRGPSSGSCIDQLPIKMDYGEELRSPITSLTPGESKTTSPSSPEEDVMLGSLTFSVDYNFPKKALVVTIQEAHGLPVMDDQTQGSDPYIKMTILPDKRHRVKTRVLRKTLDPVFDETFTFYGIPYSQLQDLVLHFLVLSFDRFSRDDVIGEVMVPLAGVDPSTGKVQLTRDIIKRNIQKCISRGELQVSLSYQPVAQRMTVVVLKARHLPKMDITGLSGNPYVKVNVYYGRKRIAKKKTHVKKCTLNPIFNESFIYDIPTDLLPDISIEFLVIDFDRTTKNEVVGRLILGAHSVTASGAEHWREVCESPRKPVAKWHSLSEY

SEQ ID NO: 85744 - protein, 421 aa, Homo sapiens
  Payload ID: 17034
  Gene Symbol: SYT12
  Gene Name: synaptotagmin XII
  Uniprot ID: Q8IV01
  ENSP ID: ENSP00000377520
MAVDVAEYHLSVIKSPPGWEVGVYAAGALALLGIAAVSLWKLWTSGSFPSPSPFPNYDYRYLQQKYGESCAEAREKRVPAWNAQRASTRGPPSRKGSLSIEDTFESISELGPLELMGRELDLAPYGTLRKSQSADSLNSISSVSNTFGQDFTLGQVEVSMEYDTASHTLNVAVMQGKDLLEREEASFESCFMRVSLLPDEQIVGISRIQRNAYSIFFDEKFSIPLDPTALEEKSLRFSVFGIDEDERNVSTGVVELKLSVLDLPLQPFSGWLYLQDQNKAADAVGEILLSLSYLPTAERLTVVVVKAKNLIWTNDKTTADPFVKVYLLQDGRKMSKKKTAVKRDDPNPVFNEAMIFSVPAIVLQDLSLRVTVAESSSDGRGDNVGHVIIGPSASGMGTTHWNQMLATLRRPVSMWHAVRRN

SEQ ID NO: 85745 - protein, 421 aa, Homo sapiens; identical to SEQ ID NO: 85744
  Payload ID: 17034
  Gene Symbol: SYT12
  Gene Name: synaptotagmin XII
  Uniprot ID: Q8IV01
  ENSP ID: ENSP00000431400

SEQ ID NO: 85746 - protein, 98 aa, Homo sapiens
  Payload ID: 17034
  Gene Symbol: SYT12
  Gene Name: synaptotagmin XII
  ENSP ID: ENSP00000434709
MAVDVAEYHLSVIKSPPGWEVGVYAAGALALLGIAAVSLWKLWTSGSFPSPSPFPNYDYRYLQQKYGESCAEAREKRVPAWNAQRASTRGPPSRKGSL

SEQ ID NO: 85747 - protein, 421 aa, Homo sapiens; identical to SEQ ID NO: 85744
  Payload ID: 17034
  Gene Symbol: SYT12
  Gene Name: synaptotagmin XII
  Uniprot ID: Q8IV01
  ENSP ID: ENSP00000435316

SEQ ID NO: 85748 - protein, 426 aa, Homo sapiens
  Payload ID: 17035
  Gene Symbol: SYT13
  Gene Name: synaptotagmin XIII
  Uniprot ID: Q7L8C5
  ENSP ID: ENSP00000020926
MVLSVPVIALGATLGTATSILALCGVTCLCRHMHPKKGLLPRDQDPDLEKAKPSLLGSAQQFNVKKSTEPVQPRALLKFPDIYGPRPAVTAPEVINYADYSLRSTEEPTAPASPQPPNDSRLKRQVTEELFILPQNGVVEDVCVMETWNPEKAASWNQAPKLHYCLDYDCQKAELFVTRLEAVTSNHDGGCDCYVQGSVANRTGSVEAQTALKKRQLHTTWEEGLVLPLAEEELPTATLTLTLRTCDRFSRHSVAGELRLGLDGTSVPLGAAQWGELKTSAKEPSAGAGEVLLSISYLPAANRLLVVLIKAKNLHSNQSKELLGKDVSVKVTLKHQARKLKKKQTKRAKHKINPVWNEMIMFELPDDLLQASSVELEVLGQDDSGQSCALGHCSLGLHTSGSERSHWEEMLKNPRRQIAMWHQLHL

SEQ ID NO: 85749 - protein, 186 aa, Homo sapiens
  Payload ID: 17035
  Gene Symbol: SYT13
  Gene Name: synaptotagmin XIII
  ENSP ID: ENSP00000432975
  MOD_RES (1)..(1): Any amino acid
XQSLAGRGQQTRWRTGQGVKKFNVKKSTEPVQPRALLKFPDIYGPRPAVTAPEVINYADYSLRSTEEPTAPASPQPPNDSRLKRQVTEELFILPQNGVVEDVCVMETWNPEKAASWNQAPKLHYCLDYDCQKAELFVTRLEAVTSNHDGGCDCYVQGSVANRTGSVEAQTALKKRQLHTTWEEGLV

SEQ ID NO: 85750 - protein, 20 aa, Homo sapiens
  Payload ID: 17035
  Gene Symbol: SYT13
  Gene Name: synaptotagmin XIII
  ENSP ID: ENSP00000434967
  MOD_RES (1)..(1): Any amino acid
XLEKAKPSLLGSAQQSICYI

SEQ ID NO: 85751 - protein, 517 aa, Homo sapiens
  Payload ID: 17036
  Gene Symbol: SYT14
  Gene Name: synaptotagmin XIV
  Uniprot ID: Q8NB59
  ENSP ID: ENSP00000355982
MLLLFLYINKKFCFENVGGFPDLGSEYSTRKNSQDKIYNSYMDKDEHGSSSESEDEALGKYHEALSRTHNSRLPLADSRQRNYAWETRQKYSPLSAEYDGYSSEASIDEGNCIQRMRRTPPLDELQPPPYQDDSGSPHLSCTPSEIGDSKCEFSHCSNSPRCSYNKCPSEGSTGHEIESFHNKGYEEDVPSDSTAVLSPEDMSAQGSSSQLPKPFDPEPEAKYGTLDVTFDYDSQEQKLLVTVTAVTDIPTYNRTGGNSWQVHLVLLPIKKQRAKTSIQRGPCPVFTETFKFNHVESEMIGNYAVRFRLYGVHRMKKEKIVGEKIFYLTKLNLQGKMSLPVILEPSYNHSGCDSQMSVSEMSCSESTSSCQSLEHGSVPEILIGLLYNATTGRLSAEVIKGSHFKNLAANRPPNTYVKLTLLNSMGQEMSKCKTSIRRGQPNPVYKETFVFQVALFQLSDVTLILSVYNKRSMKRKEMIGWISLGLNSSGEEELNHWTEMKESKGQQVCRWHALLES

SEQ ID NO: 85752 - protein, 574 aa, Homo sapiens
  Payload ID: 17036
  Gene Symbol: SYT14
  Gene Name: synaptotagmin XIV
  Uniprot ID: Q8NB59
  ENSP ID: ENSP00000355986
MAIEGGERTCGVHELICIRKVSPEAVGFLSAVGVFIILMLLLFLYINKKFCFENVGGFPDLGSEYSTRKNSQDKIYNSYMDKDEHGSSSESEDEALGKYHEALSRTHNSRLPLADSRQRNYAWETRQKYSPLSAEYDGYSSEASIDEGNCIQRMRRTPPLDELQPPPYQDDSGSPHLSCTPSEIGDSKCEFSHCSNSPRCSYNKCPSEGSTGHEIESFHNKGYEEDVPSDSTAVLSPEDMSAQGSSSQLPKPFDPEPEAKYGTLDVTFDYDSQEQKLLVTVTAVTDIPTYNRTGGNSWQVHLVLLPIKKQRAKTSIQRGPCPVFTETFKFNHVESEMIGNYAVRFRLYGVHRMKKEKIVGEKIFYLTKLNLQGKMSLPVILEPSYNHSGCDSQMSVSEMSCSESTSSCQSLEHGSVPEILIGLLYNATTGRLSAEVIKGSHFKNLAANRPPNGLFCCLKHLIGGQVYIIRDTYVKLTLLNSMGQEMSKCKTSIRRGQPNPVYKETFVFQVALFQLSDVTLILSVYNKRSMKRKEMIGWISLGLNSSGEEELNHWTEMKESKGQQVCRWHALLES

SEQ ID NO: 85753 - protein, 555 aa, Homo sapiens
  Payload ID: 17036
  Gene Symbol: SYT14
  Gene Name: synaptotagmin XIV
  Uniprot ID: Q8NB59
  ENSP ID: ENSP00000418901
MAIEGGERTCGVHELICIRKVSPEAVGFLSAVGVFIILMLLLFLYINKKFCFENVGGFPDLGSEYSTRKNSQDKIYNSYMDKDEHGSSSESEDEALGKYHEALSRTHNSRLPLADSRQRNYAWETRQKYSPLSAEYDGYSSEASIDEGNCIQRMRRTPPLDELQPPPYQDDSGSPHLSCTPSEIGDSKCEFSHCSNSPRCSYNKCPSEGSTGHEIESFHNKGYEEDVPSDSTAVLSPEDMSAQGSSSQLPKPFDPEPEAKYGTLDVTFDYDSQEQKLLVTVTAVTDIPTYNRTGGNSWQVHLVLLPIKKQRAKTSIQRGPCPVFTETFKFNHVESEMIGNYAVRFRLYGVHRMKKEKIVGEKIFYLTKLNLQGKMSLPVILEPSYNHSGCDSQMSVSEMSCSESTSSCQSLEHGSVPEILIGLLYNATTGRLSAEVIKGSHFKNLAANRPPNTYVKLTLLNSMGQEMSKCKTSIRRGQPNPVYKETFVFQVALFQLSDVTLILSVYNKRSMKRKEMIGWISLGLNSSGEEELNHWTEMKESKGQQVCRWHALLES

SEQ ID NO: 85754 - protein, 517 aa, Homo sapiens; identical to SEQ ID NO: 85751
  Payload ID: 17036
  Gene Symbol: SYT14
  Gene Name: synaptotagmin XIV
  Uniprot ID: Q8NB59
  ENSP ID: ENSP00000437423

SEQ ID NO: 85755 - protein, 504 aa, Homo sapiens
  Payload ID: 17036
  Gene Symbol: SYT14
  Gene Name: synaptotagmin XIV
  ENSP ID: ENSP00000442891
  MOD_RES (1)..(1): Any amino acid
XYMDKDEHGSSSESEDEALGKYHEALSRTHNSRLPLADSRQRNYAWETRQKYSPLSAEYDGYSSEASIDEGNCIQRMRRTPPLDELQPPPYQDDSGSPHLSCTPSEIGDSKCEFSHCSNSPRCSYNKCPSEGSTGHEIESFHNKGYEEDVPSDSTAVLSPEDMSAQGSSSQLPKPFDPEPEAKYGTLDVTFDYDSQEQKLLVTVTAVTDIPTYNRTGGNSWQVHLVLLPIKKQRAKTSIQRGPCPVFTETFKFNHVESEMIGNYAVRFRLYGVHRMKKEKIVGEKIFYLTKLNLQGKMSLPVILEPSYNHSGCDSQMSVSEMSCSESTSSCQSLEHGSVPEILIGLLYNATTGRLSAEVIKGSHFKNLAANRPPTFHPLLSDGLFCCLKHLIGGQVYIIRDTYVKLTLLNSMGQEMSKCKTSIRRGQPNPVYKETFVFQVALFQLSDVTLILSVYNKRSMKRKEMIGWISLGLNSSGEEELNHWTEMKESKGQQVCRWHALLES

SEQ ID NO: 85756 - protein, 265 aa, Homo sapiens
  Payload ID: 17036
  Gene Symbol: SYT14
  Gene Name: synaptotagmin XIV
  Uniprot ID: Q8NB59
  ENSP ID: ENSP00000445837
MLLLFLYINKKFCFENVGGFPDLGSEYSTRKNSQDKIYNSYMDKDEHGSSSESEDEALGKYHEALSRTHNSRLPLADSRQRNYAWETRQKYSPLSAEYDGYSSEASIDEGNCIQRMRRTPPLDELQPPPYQDDSGSPHLSCTPSEIGDSKCEFSHCSNSPRCSYNKCPSEGSTGHEIESFHNKGYEEDVPSDSTAVLSPEDMSAQGSSSQLPKPFDPEPEAKYGTLDVTFDYDSQEQKLLVTVTAVTDIPTYNRTGGNSWAVTPK

SEQ ID NO: 85757 - protein, 619 aa, Homo sapiens
  Payload ID: 17036
  Gene Symbol: SYT14
  Gene Name: synaptotagmin XIV
  Uniprot ID: Q8NB59
  ENSP ID: ENSP00000486230
MASASWRLKVEREPVEYMNLSVLEKIGYFSVARLEYSGTILAHCNFRLLGSNDSSASASQVTGTTVSPEAVGFLSAVGVFIILMLLLFLYINKKFCFENVGGFPDLGSEYSTRKNSQDKIYNSYMDKDEHGSSSESEDEALGKYHEALSRTHNSRLPLADSRQRNYAWETRQKYSPLSAEYDGYSSEASIDEGNCIQRMRRTPPLDELQPPPYQDDSGSPHLSCTPSEIGDSKCEFSHCSNSPRCSYNKCPSEGSTGHEIESFHNKGYEEDVPSDSTAVLSPEDMSAQGSSSQLPKPFDPEPEAKYGTLDVTFDYDSQEQKLLVTVTAVTDIPTYNRTGGNSWQVHLVLLPIKKQRAKTSIQRGPCPVFTETFKFNHVESEMIGNYAVRFRLYGVHRMKKEKIVGEKIFYLTKLNLQGKMSLPVILEPSYNHSGCDSQMSVSEMSCSESTSSCQSLEHGSVPEILIGLLYNATTGRLSAEVIKGSHFKNLAANRPPNGLFCCLKHLIGGQVYIIRDTYVKLTLLNSMGQEMSKCKTSIRRGQPNPVYKETFVFQVALFQLSDVTLILSVYNKRSMKRKEMIGWISLGLNSSGEEELNHWTEMKESKGQQVCRWHALLES

SEQ ID NO: 85758 - protein, 421 aa, Homo sapiens
  Payload ID: 17037
  Gene Symbol: SYT15
  Gene Name: synaptotagmin XV
  Uniprot ID: Q9BQS2
  ENSP ID: ENSP00000363441
MAEQLALVIGGTIGGLLLLLLIGASCCLWRRFCATLTYEELPGTPAMATTAASSGQRDRPCQPHARTQLSRPPAVPFVVPPTLQGRDWVPLHSGEWADAPWDPCPASELLPHTSSGGLGDACMVGAINPELYKFPEDKSETDFPDGCLGRLWFSVEYEQEAERLLVGLIKAQHLQAPSETCSPLVKLYLLPDERRFLQSKTKRKTSNPQFDEHFIFQVSSKTITQRVLKFSVYHVDRQRKHQLLGQVLFPLKNETLVGDCRRVIWRDLEAESLEPPSEFGDLQFCLSYNDYLSRLTVVVLRAKGLRLQEDRGIVSVFVKVSLMNHNKFVKCKKTSAVLGSINPVYNETFSFKADATELDTASLSLTVVQNMEGDKSQQLGRVVVGPYMYTRGRELEHWDEMLSKPKELVKRWHALCRTTEP

SEQ ID NO: 85759 - protein, 474 aa, Homo sapiens
  Payload ID: 17037
  Gene Symbol: SYT15
  Gene Name: synaptotagmin XV
  ENSP ID: ENSP00000363443
MGVVLSPHPAPSRREPLAPLAPGTRPGWSPAVSGSSRSALRPSTAGPGPGPGTGWGGTAASGRWVPAPAVHCAAPRAAAGHQQHHGPPLCSPDGAPRRFKRRPGSPAPAAQTGETSLREQPHGGPPAVPFVVPPTLQGRDWVPLHSGEWADAPWDPCPASELLPHTSSGGLGDACMVGAINPELYKFPEDKSETDFPDGCLGRLWFSVEYEQEAERLLVGLIKAQHLQAPSETCSPLVKLYLLPDERRFLQSKTKRKTSNPQFDEHFIFQVSSKTITQRVLKFSVYHVDRQRKHQLLGQVLFPLKNETLVGDCRRVIWRDLEAESLEPPSEFGDLQFCLSYNDYLSRLTVVVLRAKGLRLQEDRGIVSVFVKVSLMNHNKFVKCKKTSAVLGSINPVYNETFSFKADATELDTASLSLTVVQNMEGDKSQQLGRVVVGPYMYTRGRELEHWDEMLSKPKELVKRWHALCRTTEP

SEQ ID NO: 85760 - protein, 180 aa, Homo sapiens
  Payload ID: 17037
  Gene Symbol: SYT15
  Gene Name: synaptotagmin XV
  ENSP ID: ENSP00000363448
DEHFIFQVSSKTITQRVLKFSVYHVDRQRKHQLLGQVLFPLKNETLVGDCRRVIWRDLEAESLEPPSEFGDLQFCLSYNDYLSRLTVVVLRAKGLRLQEDRGIVSVFVKVSLMNHNKFVKCKKTSAVLGSINPVYNETFSFKADATELDTASLSLTVVQNMEGDKQATTVELFLFHLTSG

SEQ ID NO: 85761 - protein, 136 aa, Homo sapiens
  Payload ID: 17037
  Gene Symbol: SYT15
  Gene Name: synaptotagmin XV
  ENSP ID: ENSP00000424803
MAGDACMVGAINPELYKFPEDKSETDFPDGCLGRLWFSVEYEQEAERLLVGLIKAQHLQAPSETCSPLVKLYLLPDERRFLQSKTKRKTSNPQFDEHFIFQVSSKTITQRVLKFSVYHVDRQRKHQLLGQVLFPLK

SEQ ID NO: 85762 - protein, 390 aa, Homo sapiens
  Payload ID: 17037
  Gene Symbol: SYT15
  Gene Name: synaptotagmin XV
  Uniprot ID: Q9BQS2
  ENSP ID: ENSP00000427607
MAEQLALVIGGTIGGLLLLLLIGASCCLWRRFCATLTYEELPGTPAMATTAASSGQRDRPCQPHARTQLSRPPAVPFVVPPTLQGRDWVPLHSGEWADAPWDPCPASELLPHTSSGGLGDACMVGAINPELYKFPEDKSETDFPDGCLGRLWFSVEYEQEAERLLVGLIKAQHLQAPSETCSPLVKLYLLPDERRFLQSKTKRKTSNPQFDEHFIFQVSSKTITQRVLKFSVYHVDRQRKHQLLGQVLFPLKNETLVGDCRRVIWRDLEAESLEPPSEFGDLQFCLSYNDYLSRLTVVVLRAKGLRLQEDRGIVSVFVKVSLMNHNKFVKCKKTSAVLGSINPVYNETFSFKADATELDTASLSLTVVQNMEGDKQATTVELFLFHLTSG

SEQ ID NO: 85763 - protein, 203 aa, Homo sapiens
  Payload ID: 17038
  Gene Symbol: SYT16
  Gene Name: synaptotagmin XVI
  Uniprot ID: Q17RD7
  ENSP ID: ENSP00000394700
MTRERMMGEKLFYLSHLHPEGEMKVTLVLEPRSNISSGGSPLSPSAVSHSDSTSSTQSLSHGGAPELLVGLSYNATTGRLSVEMIKGSHFRNLAVNRAPDTYGKLFLLNSVGQEMSRCKTSIRRGQPNPVYKETFVFQVALFQLSDVTLMISVYNRRTMKRKEMIGWIALGQNSSGEEEQDHWEEMKETKGQQICRWHTLLES

SEQ ID NO: 85764 - protein, 383 aa, Homo sapiens
  Payload ID: 17038
  Gene Symbol: SYT16
  Gene Name: synaptotagmin XVI
  Uniprot ID: Q17RD7
  ENSP ID: ENSP00000451035
MVLAMASQDVQNFFQPFSSWISRVYEALQQAGDMLSASLVNISKQDSKLSDKLDQDLDNIQIQETYFEDEEQDNDWSQEDANSLFLEVDHFSCCNSDLQDSAQNSSPSLSQHAKDSCSTMSQWPNWASDDRKLPHVLSSIAEEEHHLEKQRSGLQHGFDSQLPGTLETVNGKKQVNSFGDDEELSTSSDSDEEVIKQFEISVSRSQSFRSVTSEKGKQTGLEQKPKFSRSLLTHGEDGTEVSACEDLDGASQRRYSENLSYGEDDHIPAHSQSPCERGDAKHHGTSHQESSVVQSLRRQSTEGSLEMETAFNSRGFEDSYATDSSSMWSPEANLNLKRKGYLLDVYCLSSPLLFTTSLHRRNRTGPICRCHPGSQSPSQSVVT

SEQ ID NO: 85765 - protein, 645 aa, Homo sapiens
  Payload ID: 17038
  Gene Symbol: SYT16
  Gene Name: synaptotagmin XVI
  Uniprot ID: Q17RD7
  ENSP ID: ENSP00000478637
MVLAMASQDVQNFFQPFSSWISRVYEALQQAGDMLSASLVNISKQDSKLSDKLDQDLDNIQIQETYFEDEEQDNDWSQEDANSLFLEVDHFSCCNSDLQDSAQNSSPSLSQHAKDSCSTMSQWPNWASDDRKLPHVLSSIAEEEHHLEKQRSGLQHGFDSQLPGTLETVNGKKQVNSFGDDEELSTSSDSDEEVIKQFEISVSRSQSFRSVTSEKGKQTGLEQKPKFSRSLLTHGEDGTEVSACEDLDGASQRRYSENLSYGEDDHIPAHSQSPCERGDAKHHGTSHQESSVVQSLRRQSTEGSLEMETAFNSRGFEDSYATDSSSMWSPEEQDRTNLQVPSGVSEPISKCGDLDVIFEYRAASQKLTVTIVRAQGLPDKDRSGVNSWQVHVVLLPGKKHRGRTNIQRGPNPVFREKVTFAKLEPRDVAACAVRFRLYAARKMTRERMMGEKLFYLSHLHPEGEMKVTLVLEPRSNISSGGSPLSPSAVSHSDSTSSTQSLSHGGAPELLVGLSYNATTGRLSVEMIKGSHFRNLAVNRAPDTYGKLFLLNSVGQEMSRCKTSIRRGQPNPVYKETFVFQVALFQLSDVTLMISVYNRRTMKRKEMIGWIALGQNSSGEEEQDHWEEMKETKGQQICRWHTLLES

SEQ ID NO: 85766 - protein, 474 aa, Homo sapiens
  Payload ID: 17039
  Gene Symbol: SYT17
  Gene Name: synaptotagmin XVII
  Uniprot ID: Q9BSW7
  ENSP ID: ENSP00000347538
MAYIQLEPLNEGFLSRISGLLLCRWTCRHCCQKCYESSCCQSSEDEVEILGPFPAQTPPWLMASRSSDKDGDSVHTASEVPLTPRTNSPDGRRSSSDTSKSTYSLTRRISSLESRRPSSPLIDIKPIEFGVLSAKKEPIQPSVLRRTYNPDDYFRKFEPHLYSLDSNSDDVDSLTDEEILSKYQLGMLHFSTQYDLLHNHLTVRVIEARDLPPPISHDGSRQDMAHSNPYVKICLLPDQKNSKQTGVKRKTQKPVFEERYTFEIPFLEAQRRTLLLTVVDFDKFSRHCVIGKVSVPLCEVDLVKGGHWWKALIPSSQNEVELGELLLSLNYLPSAGRLNVDVIRAKQLLQTDVSQGSDPFVKIQLVHGLKLVKTKKTSFLRGTIDPFYNESFSFKVPQEELENASLVFTVFGHNMKSSNDFIGRIVIGQYSSGPSETNHWRRMLNTHRTAVEQWHSLRSRAECDRVSPASLEVT

SEQ ID NO: 85767 - protein, 93 aa, Homo sapiens
  Payload ID: 17039
  Gene Symbol: SYT17
  Gene Name: synaptotagmin XVII
  ENSP ID: ENSP00000454335
MASRSSDKDGDSVHTASEVPLTPRTNSPDGRRSSSDTSKSTYSLTRRISSLESRRPSSPLIDIKPIEFGVLSAKKEPIQPSVLRRTYNPDDYF

SEQ ID NO: 85768 - protein, 470 aa, Homo sapiens
  Payload ID: 17039
  Gene Symbol: SYT17
  Gene Name: synaptotagmin XVII
  ENSP ID: ENSP00000454721
MLEPLNEGFLSRISGLLLCRWTCRHCCQKCYESSCCQSSEDEVEILGPFPAQTPPWLMASRSSDKDGDSVHTASEVPLTPRTNSPDGRRSSSDTSKSTYSLTRRISSLESRRPSSPLIDIKPIEFGVLSAKKEPIQPSVLRRTYNPDDYFRKFEPHLYSLDSNSDDVDSLTDEEILSKYQLGMLHFSTQYDLLHNHLTVRVIEARDLPPPISHDGSRQDMAHSNPYVKICLLPDQKNSKQTGVKRKTQKPVFEERYTFEIPFLEAQRRTLLLTVVDFDKFSRHCVIGKVSVPLCEVDLVKGGHWWKALIPSSQNEVELGELLLSLNYLPSAGRLNVDVIRAKQLLQTDVSQGSDPFVKIQLVHGLKLVKTKKTSFLRGTIDPFYNESFSFKVPQEELENASLVFTVFGHNMKSSNDFIGRIVIGQYSSGPSETNHWRRMLNTHRTAVEQWHSLRSRAECDRVSPASLEVT

SEQ ID NO: 85769 - protein, 392 aa, Homo sapiens
  Payload ID: 17039
  Gene Symbol: SYT17
  Gene Name: synaptotagmin XVII
  ENSP ID: ENSP00000456009
MASRSSDKDGDSVHTASEVPLTPRTNSPDGRRSSSDTSKSTYSLTRRISSLESRRPSSPLIDIKPIEFGVLSAKKEPIQPSVLRRTYNPDDYFRKFEPHLYSLDSNSDDVDSLTDEEILSKYQLGMLHFSTQYDLLHNHLTVRVIEARDLPPPISHDGSRQDMAHSNPYVKICLLPDQKNSKQTGVKRKTQKPVFEERYTFEIPFLEAQRRTLLLTVVDFDKFSRHCVIGKVSVPLCEVDLVKGGHWWKALIPSSQNEVELGELLLSLNYLPSAGRLNVDVIRAKQLLQTDVSQGSDPFVKIQLVHGLKLVKTKKTSFLRGTIDPFYNESFSFKVPQEELENASLVFTGSNSPIPACELSSHPAHGISPWIPSPGNEHFHGIKKQVKAIKVE

SEQ ID NO: 85770 - protein, 413 aa, Homo sapiens
  Payload ID: 17039
  Gene Symbol: SYT17
  Gene Name: synaptotagmin XVII
  ENSP ID: ENSP00000456252
MASRSSDKDGDSVHTASEVPLTPRTNSPDGRRSSSDTSKSTYSLTRRISSLESRRPSSPLIDIKPIEFGVLSAKKEPIQPSVLRRTYNPDDYFRKFEPHLYSLDSNSDDVDSLTDEEILSKYQLGMLHFSTQYDLLHNHLTVRVIEARDLPPPISHDGSRQDMAHSNPYVKICLLPDQKNSKQTGVKRKTQKPVFEERYTFEIPFLEAQRRTLLLTVVDFDKFSRHCVIGKVSVPLCEVDLVKGGHWWKALIPSSQNEVELGELLLSLNYLPSAGRLNVDVIRAKQLLQTDVSQGSDPFVKIQLVHGLKLVKTKKTSFLRGTIDPFYNESFSFKVPQEELENASLVFTVFGHNMKSSNDFIGRIVIGQYSSGPSETNHWRRMLNTHRTAVEQWHSLRSRAECDRVSPASLEVT

SEQ ID NO: 85771 - protein, 79 aa, Homo sapiens
  Payload ID: 17039
  Gene Symbol: SYT17
  Gene Name: synaptotagmin XVII
  ENSP ID: ENSP00000456790
MASRSSDKDGDSVHTASEVPLTPRTNSPDGRRSSSDTSKSTYSLTRRISSLESRRPSSPLIDIKPIEFGVLSAKKEPIQ

SEQ ID NO: 85772 - protein, 142 aa, Homo sapiens
  Payload ID: 17039
  Gene Symbol: SYT17
  Gene Name: synaptotagmin XVII
  ENSP ID: ENSP00000456879
  MOD_RES (1)..(1): Any amino acid
XPDQKNSKQTGVKRKTQKPVFEERYTFEIPFLEAQRRTLLLTVVDFDKFSRHCVIGKVSVPLCEVDLVKGGHWWKALIPSSQNEVELGELLLSLNYLPSAGRLNVDVIRAKQLLQTDVSQGSAGAWTQTCENQEDVLLKGHN

SEQ ID NO: 85773 - protein, 168 aa, Homo sapiens
  Payload ID: 17039
  Gene Symbol: SYT17
  Gene Name: synaptotagmin XVII
  ENSP ID: ENSP00000456915
MGTFFAFMEKKNEVELGELLLSLNYLPSAGRLNVDVIRAKQLLQTDVSQGSDPFVKIQLVHGLKLVKTKKTSFLRGTIDPFYNESFSFKVPQEELENASLVFTVFGHNMKSSNDFIGRIVIGQYSSGPSETNHWRRMLNTHRTAVEQWHSLRSRAECDRVSPASLEVT

SEQ ID NO: 85774 - protein, 444 aa, Homo sapiens
  Payload ID: 17040
  Gene Symbol:
  Gene Name: Synaptotagmin-15
  ENSP ID: ENSP00000478933
  MOD_RES (1)..(1): Any amino acid
XRDGLAAQPQPPRPARPACGSSPMAEQLALVIGGTIGGLLLLLLIGASCCLWRRFCATLTYEELPGTPAMATTAASSGQRDRPCQPHARTQLSRPPAVPFVVPPTLQGRDWVPLHSGEWADAPWDPCPASELLPHTSSGGLGDACMVGAINPELYKFPEDKSETDFPDGCLGRLWFSVEYEQEAERLLVGLIKAQHLQAPSETCSPLVKLYLLPDERRFLQSKTKRKTSNPQFDEHFIFQVSSKTITQRVLKFSVYHVDRQRKHQLLGQVLFPLKNETLVGDCRRVIWRDLEAESLEPPSEFGDLQFCLSYNDYLSRLTVVVLRAKGLRLQEDRGIVSVFVKVSLMNHNKFVKCKKTSAVLGSINPVYNETFSFKADATELDTASLSLTVVQNMEGDKSQQLGRVVVGPYMYTRGRELEHWDEMLSKPKELVKRWHALCRTTEP

SEQ ID NO: 85775 - protein, 390 aa, Homo sapiens; identical to SEQ ID NO: 85762
  Payload ID: 17040
  Gene Symbol:
  Gene Name: Synaptotagmin-15
  ENSP ID: ENSP00000482225

SEQ ID NO: 85776 - protein, 474 aa, Homo sapiens; identical to SEQ ID NO: 85759
  Payload ID: 17040
  Gene Symbol:
  Gene Name: Synaptotagmin-15
  ENSP ID: ENSP00000485217

SEQ ID NO: 85777 - protein, 550 aa, Homo sapiens
  Payload ID: 17041
  Gene Symbol: SYTL1
  Gene Name: synaptotagmin-like 1
  Uniprot ID: Q8IYJ3
  ENSP ID: ENSP00000316464
MPQRGHPSQEGLWALPSLPMAHGPKPETEGLLDLSFLTEEEQEAIAGVLQRDARLRQLEEGRVSKLRASVADPGQLKILTGDWFQEARSQRHHNAHFGSDLVRASMRRKKSTRGDQAPGHDREAEAAVKEKEEGPEPRLTIDEAPQERLRETEASDPEEASQAQEDPGQGDQQVCAEEADPELEPASGGEQEPRPQQAQTKAASQILENGEEAPGPDPSLDRMLSSSSSVSSLNSSTLSGSQMSLSGDAEAVQVRGSVHFALHYEPGAAELRVHVIQCQGLAAARRRRSDPYVKSYLLPDKQSKRKTAVKKRNLNPVFNETLRYSVPQAELQGRVLSLSVWHRESLGRNIFLGEVEVPLDTWDWGSEPTWLPLQPRVPPSPDDLPSRGLLALSLKYVPAGSEGAGLPPSGELHFWVKEARDLLPLRAGSLDTYVQCFVLPDDSQASRQRTRVVRRSLSPVFNHTMVYDGFGPADLRQACAELSLWDHGALANRQLGGTRLSLGTGSSYGLQVPWMDSTPEEKQLWQALLEQPCEWVDGLLPLRTNLAPRT

SEQ ID NO: 85778 - protein, 76 aa, Homo sapiens
  Payload ID: 17041
  Gene Symbol: SYTL1
  Gene Name: synaptotagmin-like 1
  ENSP ID: ENSP00000420110
MPQRGHPSQEGLWALPSLPMAHGPKPETEGLLDLSFLTEEEQEAIAGVLQRDARLRQLEEGRVSKLRASVADPGQL

SEQ ID NO: 85779 - protein, 562 aa, Homo sapiens
  Payload ID: 17041
  Gene Symbol: SYTL1
  Gene Name: synaptotagmin-like 1
  Uniprot ID: Q8IYJ3
  ENSP ID: ENSP00000440704
MPQRGHPSQEGLWALPSLPMAHGPKPETEGLLDLSFLTEEEQEAIAGVLQRDARLRQLEEGRVSKLRASVADPGQLKILTGDWFQEARSQRHHNAHFGSDLVRASMRRKKSTRGDQAPGHDREAEAAVKEKEEGPEPRLTIDEAPQERLRETEGPDFPSPSVPLKASDPEEASQAQEDPGQGDQQVCAEEADPELEPASGGEQEPRPQQAQTKAASQILENGEEAPGPDPSLDRMLSSSSSVSSLNSSTLSGSQMSLSGDAEAVQVRGSVHFALHYEPGAAELRVHVIQCQGLAAARRRRSDPYVKSYLLPDKQSKRKTAVKKRNLNPVFNETLRYSVPQAELQGRVLSLSVWHRESLGRNIFLGEVEVPLDTWDWGSEPTWLPLQPRVPPSPDDLPSRGLLALSLKYVPAGSEGAGLPPSGELHFWVKEARDLLPLRAGSLDTYVQCFVLPDDSQASRQRTRVVRRSLSPVFNHTMVYDGFGPADLRQACAELSLWDHGALANRQLGGTRLSLGTGSSYGLQVPWMDSTPEEKQLWQALLEQPCEWVDGLLPLRTNLAPRT

SEQ ID NO: 85780 - protein, 562 aa, Homo sapiens; identical to SEQ ID NO: 85779
  Payload ID: 17041
  Gene Symbol: SYTL1
  Gene Name: synaptotagmin-like 1
  Uniprot ID: Q8IYJ3
  ENSP ID: ENSP00000481032

SEQ ID NO: 85781 - protein, 497 aa, Homo sapiens
  Payload ID: 17041
  Gene Symbol: SYTL1
  Gene Name: synaptotagmin-like 1
  ENSP ID: ENSP00000484337
MPQRGHPSQEGLWALPSLPMAHGPKPETEGLLDLSFLTEEEQEAIAGVLQRDARLRQLEEGRVSKLRASVADPGQLKILTGDWFQEARSQRHHNAHFGSDLVRASMRRKKSTRGDQAPGHDREAEAAVKEKEEGPEPRLTIDEAPQERLRETEASDPEEASQAQEDPGQGDQQVCAEEADPELEPASGGEQEPRPQQAQTKAASQILENGEEAPGPDPSLDRMLSSSSSVSSLNSSTLSGSQMSLSGDAEAVQVRGSVHFALHYEPGAAELRVHVIQCQGLAAARRRRSDPYVKSYLLPDKQSKRKTAVKKRNLNPVFNETLRVPPSPDDLPSRGLLALSLKYVPAGSEGAGLPPSGELHFWVKEARDLLPLRAGSLDTYVQCFVLPDDSQASRQRTRVVRRSLSPVFNHTMVYDGFGPADLRQACAELSLWDHGALANRQLGGTRLSLGTGSSYGLQVPWMDSTPEEKQLWQALLEQPCEWVDGLLPLRTNLAPRT

SEQ ID NO: 85782 - protein, 935 aa, Homo sapiens
  Payload ID: 17042
  Gene Symbol: SYTL2
  Gene Name: synaptotagmin-like 2
  Uniprot ID: Q9HCH5
  ENSP ID: ENSP00000318803
MIDLSFLTEEEQEAIMKVLQRDAALKRAEEERVRHLPEKIKDDQQLKNMSGQWFYEAKAKRHRDKIHGADIIRASMRKKRPQIAAEQSKDRENGAKESWVNNVNKDAFLPPELAGVVEEPEEDAAPASPSSSVVNPASSVIDMSQENTRKPNVSPEKQRKNPFNSSKLPEGHSSQQTKNEQSKNGRTGLFQTSKEDELSESKEKSTVADTSIQKLEKSKQTLPGLSNGSQIKAPIPKARKMIYKSTDLNKDDNQSFPRQRTDSLKARGAPRGILKRNSSSSSTDSETLRYNHNFEPKSKIVSPGLTIHERISEKEHSLEDNSSPNSLEPLKHVRFSAVKDELPQSPGLIHGREVGEFSVLESDRLKNGMEDAGDTEEFQSDPKPSQYRKPSLFHQSTSSPYVSKSETHQPMTSGSFPINGLHSHSEVLTARPQSMENSPTINEPKDKSSELTRLESVLPRSPADELSHCVEPEPSQVPGGSSRDRQQGSEEEPSPVLKTLERSAARKMPSKSLEDISSDSSNQAKVDNQPEELVRSAEDVSTVPTQPDNPFSHPDKLKRMSKSVPAFLQDESDDRETDTASESSYQLSRHKKSPSSLTNLSSSSGMTSLSSVSGSVMSVYSGDFGNLEVKGNIQFAIEYVESLKELHVFVAQCKDLAAADVKKQRSDPYVKAYLLPDKGKMGKKKTLVVKKTLNPVYNEILRYKIEKQILKTQKLNLSIWHRDTFKRNSFLGEVELDLETWDWDNKQNKQLRWYPLKRKTAPVALEAENRGEMKLALQYVPEPVPGKKLPTTGEVHIWVKECLDLPLLRGSHLNSFVKCTILPDTSRKSRQKTRAVGKTTNPIFNHTMVYDGFRPEDLMEACVELTVWDHYKLTNQFLGGLRIGFGTGKSYGTEVDWMDSTSEEVALWEKMVNSPNTWIEATLPLRMLLIAKISK

SEQ ID NO: 85783 - protein, 935 aa, Homo sapiens; identical to SEQ ID NO: 85782
  Payload ID: 17042
  Gene Symbol: SYTL2
  Gene Name: synaptotagmin-like 2
  Uniprot ID: Q9HCH5
  ENSP ID: ENSP00000352065

SEQ ID NO: 85784 - protein, 365 aa, Homo sapiens
  Payload ID: 17042
  Gene Symbol: SYTL2
  Gene Name: synaptotagmin-like 2
  Uniprot ID: Q9HCH5
  ENSP ID: ENSP00000374608
MSDDRETDTASESSYQLSRHKKSPSSLTNLSSSSGMTSLSSVSGSVMSVYSGDFGNLEVKGNIQFAIEYVESLKELHVFVAQCKDLAAADVKKQRSDPYVKAYLLPDKGKMGKKKTLVVKKTLNPVYNEILRYKIEKQILKTQKLNLSIWHRDTFKRNSFLGEVELDLETWDWDNKQNKQLRWYPLKRKTAPVALEAENRGEMKLALQYVPEPVPGKKLPTTGEVHIWVKECLDLPLLRGSHLNSFVKCTILPDTSRKSRQKTRAVGKTTNPIFNHTMVYDGFRPEDLMEACVELTVWDHYKLTNQFLGGLRIGFGTGKSYGTEVDWMDSTSEEVALWEKMVNSPNTWIEATLPLRMLLIAKISK

SEQ ID NO: 85785 - protein, 910 aa, Homo sapiens
  Payload ID: 17042
  Gene Symbol: SYTL2
  Gene Name: synaptotagmin-like 2
  Uniprot ID: Q9HCH5
  ENSP ID: ENSP00000374610
MIDLSFLTEEEQEAIMKVLQRDAALKRAEEERVRHLPEKIKDDQQLKNMSGQWFYEAKAKRHRDKIHGADIIRASMRKKRPQIAAEQSKDRENGAKESWVNNVNKDAFLPPELAGVVEEPEEDAAPASPSSSVVNPASSVIDMSQENTRKPNVSPEKRKNPFNSSKLPEGHSSQQTKNEQSKNGRTGLFQTSKEDELSESKEKSTVADTSIQKLEKSKQTLPGLSNGSQIKAPIPKARKMIYKSTDLNKDDNQSFPRQRTDSLKARGAPRGILKRNSSSSSTDSETLRYNHNFEPKSKIVSPGLTIHERISEKEHSLEDNSSPNSLEPLKHVRFSAVKDELPQSPGLIHGREVGEFSVLESDRLKNGMEDAGDTEEFQSDPKPSQYRKPSLFHQSTSSPYVSKSETHQPMTSGSFPINGLHSHSEVLTARPQSMENSPTINEPKDKSSELTRLESVLPRSPADELSHCVEPEPSQVPGGSSRDRQQGSEEEPSPVLKTLERSAARKMPSKSLEDISSDSSNQAKVDNQPEELVRSAEDDEKPDQKPVTNECVPRISTVPTQPDNPFSHPDKLKRMSKSVPAFLQDEVSGSVMSVYSGDFGNLEVKGNIQFAIEYVESLKELHVFVAQCKDLAAADVKKQRSDPYVKAYLLPDKGKMGKKKTLVVKKTLNPVYNEILRYKIEKQILKTQKLNLSIWHRDTFKRNSFLGEVELDLETWDWDNKQNKQLRWYPLKRKTAPVALEAENRGEMKLALQYVPEPVPGKKLPTTGEVHIWVKECLDLPLLRGSHLNSFVKCTILPDTSRKSRQKTRAVGKTTNPIFNHTMVYDGFRPEDLMEACVELTVWDHYKLTNQFLGGLRIGFGTGKSYGTEVDWMDSTSEEVALWEKMVNSPNTWIEATLPLRMLLIAKISK

SEQ ID NO: 85786 - protein, 934 aa, Homo sapiens
  Payload ID: 17042
  Gene Symbol: SYTL2
  Gene Name: synaptotagmin-like 2
  Uniprot ID: Q9HCH5
  ENSP ID: ENSP00000431701
MIDLSFLTEEEQEAIMKVLQRDAALKRAEEERVRHLPEKIKDDQQLKNMSGQWFYEAKAKRHRDKIHGADIIRASMRKKRPQIAAEQSKDRENGAKESWVNNVNKDAFLPPELAGVVEEPEEDAAPASPSSSVVNPASSVIDMSQENTRKPNVSPEKRKNPFNSSKLPEGHSSQQTKNEQSKNGRTGLFQTSKEDELSESKEKSTVADTSIQKLEKSKQTLPGLSNGSQIKAPIPKARKMIYKSTDLNKDDNQSFPRQRTDSLKARGAPRGILKRNSSSSSTDSETLRYNHNFEPKSKIVSPGLTIHERISEKEHSLEDNSSPNSLEPLKHVRFSAVKDELPQSPGLIHGREVGEFSVLESDRLKNGMEDAGDTEEFQSDPKPSQYRKPSLFHQSTSSPYVSKSETHQPMTSGSFPINGLHSHSEVLTARPQSMENSPTINEPKDKSSELTRLESVLPRSPADELSHCVEPEPSQVPGGSSRDRQQGSEEEPSPVLKTLERSAARKMPSKSLEDISSDSSNQAKVDNQPEELVRSAEDVSTVPTQPDNPFSHPDKLKRMSKSVPAFLQDESDDRETDTASESSYQLSRHKKSPSSLTNLSSSSGMTSLSSVSGSVMSVYSGDFGNLEVKGNIQFAIEYVESLKELHVFVAQCKDLAAADVKKQRSDPYVKAYLLPDKGKMGKKKTLVVKKTLNPVYNEILRYKIEKQILKTQKLNLSIWHRDTFKRNSFLGEVELDLETWDWDNKQNKQLRWYPLKRKTAPVALEAENRGEMKLALQYVPEPVPGKKLPTTGEVHIWVKECLDLPLLRGSHLNSFVKCTILPDTSRKSRQKTRAVGKTTNPIFNHTMVYDGFRPEDLMEACVELTVWDHYKLTNQFLGGLRIGFGTGKSYGTEVDWMDSTSEEVALWEKMVNSPNTWIEATLPLRMLLIAKISK

SEQ ID NO: 85787 - protein, 69 aa, Homo sapiens
  Payload ID: 17042
  Gene Symbol: SYTL2
  Gene Name: synaptotagmin-like 2
  ENSP ID: ENSP00000431703
MSKSVPAFLQDESDDRETDTASESSYQLSRHKKSPSSLTNLSSSSGMTSLSSVSGSVMSVYSGDFGNLE

SEQ ID NO: 85788 - protein, 63 aa, Homo sapiens
  Payload ID: 17042
  Gene Symbol: SYTL2
  Gene Name: synaptotagmin-like 2
  ENSP ID: ENSP00000432116
MSKSVPAFLQDESDDRETDTASESSYQLSRHKKSPSSLTNLSSSSGMTSLSSVSGSVMSVYSG

SEQ ID NO: 85789 - protein, 155 aa, Homo sapiens
  Payload ID: 17042
  Gene Symbol: SYTL2
  Gene Name: synaptotagmin-like 2
  ENSP ID: ENSP00000432137
MSKSVPAFLQDESDDRETDTASESSYQLSRHKKSPSSLTNLSSSSGMTSLSSVSGSVMSVYSGDFGNLEVKGNIQFAIEYVESLKELHVFVAQCKDLAAADVKKQRSDPYVKAYLLPDKGKMGKKKTLVVKKTLNPVYNEILRYKIEKQILKTQK

SEQ ID NO: 85790 - protein, 336 aa, Homo sapiens
  Payload ID: 17042
  Gene Symbol: SYTL2
  Gene Name: synaptotagmin-like 2
  Uniprot ID: Q9HCH5
  ENSP ID: ENSP00000432144
MSKSVPAFLQDEVSGSVMSVYSGDFGNLEVKGNIQFAIEYVESLKELHVFVAQCKDLAAADVKKQRSDPYVKAYLLPDKGKMGKKKTLVVKKTLNPVYNEILRYKIEKQILKTQKLNLSIWHRDTFKRNSFLGEVELDLETWDWDNKQNKQLRWYPLKRKTAPVALEAENRGEMKLALQYVPEPVPGKKLPTTGEVHIWVKECLDLPLLRGSHLNSFVKCTILPDTSRKSRQKTRAVGKTTNPIFNHTMVYDGFRPEDLMEACVELTVWDHYKLTNQFLGGLRIGFGTGKSYGTEVDWMDSTSEEVALWEKMVNSPNTWIEATLPLRMLLIAKISK

SEQ ID NO: 85791 - protein, 376 aa, Homo sapiens
  Payload ID: 17042
  Gene Symbol: SYTL2
  Gene Name: synaptotagmin-like 2
  Uniprot ID: Q9HCH5
  ENSP ID: ENSP00000432996
MSKSVPAFLQDESDDRETDTASESSYQLSRHKKSPSSLTNLSSSSGMTSLSSVSGSVMSVYSGDFGNLEVKGNIQFAIEYVESLKELHVFVAQCKDLAAADVKKQRSDPYVKAYLLPDKGKMGKKKTLVVKKTLNPVYNEILRYKIEKQILKTQKLNLSIWHRDTFKRNSFLGEVELDLETWDWDNKQNKQLRWYPLKRKTAPVALEAENRGEMKLALQYVPEPVPGKKLPTTGEVHIWVKECLDLPLLRGSHLNSFVKCTILPDTSRKSRQKTRAVGKTTNPIFNHTMVYDGFRPEDLMEACVELTVWDHYKLTNQFLGGLRIGFGTGKSYGTEVDWMDSTSEEVALWEKMVNSPNTWIEATLPLRMLLIAKISK

SEQ ID NO: 85792 - protein, 902 aa, Homo sapiens
  Payload ID: 17042
  Gene Symbol: SYTL2
  Gene Name: synaptotagmin-like 2
  Uniprot ID: Q9HCH5
  ENSP ID: ENSP00000434010
MSGQWFYEAKAKRHRDKIHGADIIRASMRKKRPQIAAEQSKDRENGAKESWVNNVNKDAFLPPELAGVVEEPEEDAAPASPSSSVVNPASSVIDMSQENTRKPNVSPEKRKNPFNSSKLPEGHSSQQTKNEQSKNGRTGLFQTSKEDELSESKEKSTVADTSIQKLEKSKQTLPGLSNGSQIKAPIPKARKMIYKSTDLNKDDNQSFPRQRTDSLKARGAPRGILKRNSSSSSTDSETLRYNHNFEPKSKIVSPGLTIHERISEKEHSLEDNSSPNSLEPLKHVRFSAVKDELPQSPGLIHGREVGEFSVLESDRLKNGMEDAGDTEEFQSDPKPSQYRKPSLFHQSTSSPYVSKSETHQPMTSGSFPINGLHSHSEVLTARPQSMENSPTINEPKDKSSELTRLESVLPRSPADELSHCVEPEPSQVPGGSSRDRQQGSEEEPSPVLKTLERSAARKMPSKSLEDISSDSSNQAKVDNQPEELVRSAEDDEKPDQKPVTNECVPRISTVPTQPDNPFSHPDKLKRMSKSVPAFLQDESDDRETDTASESSYQLSRHKKSPSSLTNLSSSSGMTSLSSVSGSVMSVYSGDFGNLEVKGNIQFAIEYVESLKELHVFVAQCKDLAAADVKKQRSDPYVKAYLLPDKGKMGKKKTLVVKKTLNPVYNEILRYKIEKQILKTQKLNLSIWHRDTFKRNSFLGEVELDLETWDWDNKQNKQLRWYPLKRKTAPVALEAENRGEMKLALQYVPEPVPGKKLPTTGEVHIWVKECLDLPLLRGSHLNSFVKCTILPDTSRKSRQKTRAVGKTTNPIFNHTMVYDGFRPEDLMEACVELTVWDHYKLTNQFLGGLRIGFGTGKSYGTEVDWMDSTSEEVALWEKMVNSPNTWIEATLPLRMLLIAKISK

SEQ ID NO: 85793 - protein, 103 aa, Homo sapiens
  Payload ID: 17042
  Gene Symbol: SYTL2
  Gene Name: synaptotagmin-like 2
  ENSP ID: ENSP00000434111
MSKSVPAFLQDESDDRETDTASESSYQLSRHKKSPSSLTNLSSSSGMTSLSSVSGSVMSVYSGDFGNLEVKGNIQFAIEYVESLKELHVFVAQCKDLAAADVK

SEQ ID NO: 85794 - protein, 7 aa, Homo sapiens
  Payload ID: 17042
  Gene Symbol: SYTL2
  Gene Name: synaptotagmin-like 2
  ENSP ID: ENSP00000434621
MSKSVPA

SEQ ID NO: 85795 - protein, 910 aa, Homo sapiens; identical to SEQ ID NO: 85785
  Payload ID: 17042
  Gene Symbol: SYTL2
  Gene Name: synaptotagmin-like 2
  Uniprot ID: Q9HCH5
  ENSP ID: ENSP00000435238

SEQ ID NO: 85796 - protein, 376 aa, Homo sapiens; identical to SEQ ID NO: 85791
  Payload ID: 17042
  Gene Symbol: SYTL2
  Gene Name: synaptotagmin-like 2
  Uniprot ID: Q9HCH5
  ENSP ID: ENSP00000435855

SEQ ID NO: 85797 - protein, 124 aa, Homo sapiens
  Payload ID: 17042
  Gene Symbol: SYTL2
  Gene Name: synaptotagmin-like 2
  ENSP ID: ENSP00000436164
MRTKKMSKSVPAFLQDECKDLAAADVKKQRSDPYVKAYLLPDKGKMGKKKTLVVKKTLNPVYNEILRYKIEKQILKTQKLNLSIWHRDTFKRNSFLGEVELDLETWDWDNKQNKQLRWYPLKRK

SEQ ID NO: 85798 - protein, 100 aa, Homo sapiens
  Payload ID: 17042
  Gene Symbol: SYTL2
  Gene Name: synaptotagmin-like 2
  ENSP ID: ENSP00000436678
MSKSVPAFLQDEVSGSVMSVYSGDFGNLEVKGNIQFAIEYVESLKELHVFVAQCKDLAAADVKKQRSDPWSFTVVAQAGTISAHSNLRLPGSSDSPASAS

SEQ ID NO: 85799 - protein, 160 aa, Homo sapiens
  Payload ID: 17042
  Gene Symbol: SYTL2
  Gene Name: synaptotagmin-like 2
  ENSP ID: ENSP00000437005
MSKSVPAFLQDEVSGSVMSVYSGDFGNLEVKGNIQFAIEYVESLKELHVFVAQCKDLAAADVKKQRSDPYVKAYLLPDKGKMGKKKTLVVKKTLNPVYNEILRYKIEKQILKTQKLNLSIWHRDTFKRNSFLGEVELDLETWDWDNKQNKQLRWYPLKRK

SEQ ID NO: 85800 - protein, 651 aa, Homo sapiens
  Payload ID: 17042
  Gene Symbol: SYTL2
  Gene Name: synaptotagmin-like 2
  ENSP ID: ENSP00000488994
ETVEKAEAPLITESAFDAGFEKLLKEITEAPPYQPQVSVREETHEKESSQSEQTRFLGTVPHFYRAASQTSEMKDKSNGLESQVNQCDKMLGGDALVTDLLVDFCGSRSGVEIPRTPQLYVAHEIGTIKTVTPPEDRDSESGVAGGQGTLQEPGFGEASEAISVSRNRQPIPLLMNKENSTKTSKVELTLASPYMKQEKEEEKEGFSESDFSDGNTSSNAESWRNPSSSEEEPSPVLKTLERSAARKMPSKSLEDISSDSSNQAKVDNQPEELVRSAEDDEKPDQKPVTNECVPRISTVPTQPDNPFSHPDKLKRMSKSVPAFLQDEVSGSVMSVYSGDFGNLEVKGNIQFAIEYVESLKELHVFVAQCKDLAAADVKKQRSDPYVKAYLLPDKGKMGKKKTLVVKKTLNPVYNEILRYKIEKQILKTQKLNLSIWHRDTFKRNSFLGEVELDLETWDWDNKQNKQLRWYPLKRKTAPVALEAENRGEMKLALQYVPEPVPGKKLPTTGEVHIWVKECLDLPLLRGSHLNSFVKCTILPDTSRKSRQKTRAVGKTTNPIFNHTMVYDGFRPEDLMEACVELTVWDHYKLTNQFLGGLRIGFGTGKSYGTEVDWMDSTSEEVALWEKMVNSPNTWIEATLPLRMLLIAKISK

SEQ ID NO: 85801 - protein, 1276 aa, Homo sapiens
  Payload ID: 17042
  Gene Symbol: SYTL2
  Gene Name: synaptotagmin-like 2
  ENSP ID: ENSP00000489095
LKERMDEPNAEQVYNPSQFENLRKFWDLEANSNSKDNDKNITTTSQKNSAPFNRQKHKEFSDIKLSGKNTHEAEVLLSPKKVMAREEMEKLNSKGILQVLPDEITFPLSPLRKYTYQLPGNESSKENVEKNTEGIVTPVFKEEKDYSEQEIQESIIKTNVLSKDCKDTFNDSLQKLLSETSTPAIQPSGGKVHGKQVLEPSVSENRTWPQKTDFADTEEEVKGPEKIINEHVDKTVVHPKVKRNSLTASLDKLLKEATGTSPSPLQAKLAPVITGTNSKLEEGRFFGKGIEQSHNTSADKREILAPFPVRDETFGNTALLKKAESGECQLSTQNLIQMAAEDSHPLDPTSQLSRKGSFGDVASPPQDMLFPQDAHLVPQARVHPSQTEISETVEKVILPPRPVLNDVSAALQKLCGEVWLSYPAGREVGPGEVNPEFPEAVQPVCSPLNPPGVISPWATMDTIVPDRKDFYSSNVVPDKTHEVGSYLAAQMSPSDQTLSSFASIVAQYGKGLPQEVEEIVRETIVQPKSEFLEFSAGLEKLLKEETETFPSKYESDTGNLSPSKLIGSTEEPRRATSECHPEELKETVEKAEAPLITESAFDAGFEKLLKEITEAPPYQPQVSVREETHEKESSQSEQTRFLGTVPHFYRAASQTSEMKDKSNGLESQVNQCDKMLGGDALVTDLLVDFCGSRSGVEIPRTPQLYVAHEIGTIKTVTPPEDRDSESGVAGGQGTLQEPGFGEASEAISVSRNRQPIPLLMNKENSTKTSKVELTLASPYMKQEKEEEKEGFSESDFSDGNTSSNAESWRNPSSSEEEPSPVLKTLERSAARKMPSKSLEDISSDSSNQAKVDNQPEELVRSAEDDEKPDQKPVTNECVPRISTVPTQPDNPFSHPDKLKRMSKSVPAFLQDESDDRETDTASESSYQLSRHKKSPSSLTNLSSSSGMTSLSSVSGSVMSVYSGDFGNLEVKGNIQFAIEYVESLKELHVFVAQCKDLAAADVKKQRSDPYVKAYLLPDKGKMGKKKTLVVKKTLNPVYNEILRYKIEKQILKTQKLNLSIWHRDTFKRNSFLGEVELDLETWDWDNKQNKQLRWYPLKRKTAPVALEAENRGEMKLALQYVPEPVPGKKLPTTGEVHIWVKECLDLPLLRGSHLNSFVKCTILPDTSRKSRQKTRAVGKTTNPIFNHTMVYDGFRPEDLMEACVELTVWDHYKLTNQFLGGLRIGFGTGKSYGTEVDWMDSTSEEVALWEKMVNSPNTWIEATLPLRMLLIAKISK

SEQ ID NO: 85802 - protein, 2223 aa, Homo sapiens
  Payload ID: 17042
  Gene Symbol: SYTL2
  Gene Name: synaptotagmin-like 2
  ENSP ID: ENSP00000489269
MIDLSFLTEEEQEAIMKVLQRDAALKRAEEERVRHLPEKIKDDQQLKNMSGQWFYEAKAKRHRDKIHGADIIRASMRKKRPQIAAEQSKDRENGAKESWVNNVNKDAFLPPELAGVVEEPEEDAAPASPSSSVVNPASSVIDMSQENTRKPNVSPEKQRKNPFNSSKLPEGHSSQQTKNEQSKNGRTGLFQTSKEDELSESKEKSTVADTSIQKLEKSKQTLPGLSNGSQIKAPIPKARKMIYKSTDLNKDDNQSFPRQRTDSLKARGAPRGILKRNSSSSSTDSETLRYNHNFEPKSKIVSPGLTIHERISEKEHSLEDNSSPNSLEPLKHVRFSAVKDELPQSPGLIHGREVGEFSVLESDRLKNGMEDAGDTEEFQSDPKPSQYRKPSLFHQSTSSPYVSKSETHQPMTSGSFPINGLHSHSEVLTARPQSMENSPTINEPKDKSSELTRLESVLPRSPADELSHCVEPEPSQVPGGSSRDRQQGKPPPLPALKAKTSSRSGPYATEIKKSTDDSIFKVLDWFNRSSYSDDNKSFLQHPRGIESKEKTDSKSQVAVDLVTDDTTLRENGSKTLSPSKIELKPVRSDSPFQAEGDMLVSESCQDNNVNIKSKFMNLSQKGTPKEGPGILQPFESYGTPSQGSKNMDYSQDSKSPGKGNGASPSNSNYSYSVLKESDAENQVPCNTNNIGNLGEEEPKFHAHEENRGHSEVNFDSSTVVKEPGLKDNMNAERKSKVGNTYILKASLEPENIKSTPGVANNGSPWKKPEVQFQQEAGEVPKNQVQREKYKRVSDRISFWEGEKAGAKITHEKPTSSCSQEQPSAKAYQPVKKSQGVSSMDSLSTDQSEYNQAIPKRVVLDEDDQASQLSNSYSSNKSKETKPQIAGPSRYYLSAEQSDKVSLFQNKKNEPIKRSQVADSLPSRRNITLPALQPPSNVGSERHAPLEKDRPLVRESNANFKVMSLKERMDEPNAEQVYNPSQFENLRKFWDLEANSNSKDNDKNITTTSQKNSAPFNRQKHKEFSDIKLSGKNTHEAEVLLSPKKVMAREEMEKLNSKGILQVLPDEITFPLSPLRKYTYQLPGNESSKENVEKNTEGIVTPVFKEEKDYSEQEIQESIIKTNVLSKDCKDTFNDSLQKLLSETSTPAIQPSGGKVHGKQVLEPSVSENRTWPQKTDFADTEEEVKGPEKIINEHVDKTVVHPKVKRNSLTASLDKLLKEATGTSPSPLQAKLAPVITGTNSKLEEGRFFGKGIEQSHNTSADKREILAPFPVRDETFGNTALLKKAESGECQLSTQNLIQMAAEDSHPLDPTSQLSRKGSFGDVASPPQDMLFPQDAHLVPQARVHPSQTEISETVEKVILPPRPVLNDVSAALQKLCGEVWLSYPAGREVGPGEVNPEFPEAVQPVCSPLNPPGVISPWATMDTIVPDRKDFYSSNVVPDKTHEVGSYLAAQMSPSDQTLSSFASIVAQYGKGLPQEVEEIVRETIVQPKSEFLEFSAGLEKLLKEETETFPSKYESDTGNLSPSKLIGSTEEPRRATSECHPEELKETVEKAEAPLITESAFDAGFEKLLKEITEAPPYQPQVSVREETHEKESSQSEQTRFLGTVPHFYRAASQTSEMKDKSNGLESQVNQCDKMLGGDALVTDLLVDFCGSRSGVEIPRTPQLYVAHEIGTIKTVTPPEDRDSESGVAGGQGTLQEPGFGEASEAISVSRNRQPIPLLMNKENSTKTSKVELTLASPYMKQEKEEEKEGFSESDFSDGNTSSNAESWRNPSSSEEEPSPVLKTLERSAARKMPSKSLEDISSDSSNQAKVDNQPEELVRSAEDVSTVPTQPDNPFSHPDKLKRMSKSVPAFLQDESDDRETDTASESSYQLSRHKKSPSSLTNLSSSSGMTSLSSVSGSVMSVYSGDFGNLEVKGNIQFAIEYVESLKELHVFVAQCKDLAAADVKKQRSDPYVKAYLLPDKGKMGKKKTLVVKKTLNPVYNEILRYKIEKQILKTQKLNLSIWHRDTFKRNSFLGEVELDLETWDWDNKQNKQLRWYPLKRKTAPVALEAENRGEMKLALQYVPEPVPGKKLPTTGEVHIWVKECLDLPLLRGSHLNSFVKCTILPDTSRKSRQKTRAVGKTTNPIFNHTMVYDGFRPEDLMEACVELTVWDHYKLTNQFLGGLRIGFGTGKSYGTEVDWMDSTSEEVALWEKMVNSPNTWIEATLPLRMLLIAKISK

SEQ ID NO: 85803 - protein, 866 aa, Homo sapiens
  Payload ID: 17042
  Gene Symbol: SYTL2
  Gene Name: synaptotagmin-like 2
  ENSP ID: ENSP00000489554
LKERMDEPNAEQVYNPSQFENLRKFWDLEANSNSKDNDKNITTTSQKNSAPFNRQKHKEFSDIKLSGKNTHEAEVLLSPKKVMAREEMEKLNSKGILQVLPDEITFPLSPLRKYTYQLPGNESSKENVEKNTEGIVTPVFKEEKDYSEQEIQESIIKTNVLSKDCKDTFNDSLQKLLSETSTPAIQPSGGKVHGKQVLEPSVSENRTWPQKTDFADTEEEVKGPEKIINEHVDKTVVHPKVKRNSLTASLDKLLKEATGTSPSPLQAKLAPVITGTNSKLEEGRFFGKGIEQSHNTSADKREILAPFPVRDETFGNTALLKKAESGECQLSTQNLIQMAAEDSHPLDPTSQLSRKGSFGDVASPPQDMLFPQDAHLVPQARVHPSQTEISETVEKVILPPRPVLNDVSAALQKLCGEVWLSYPAGREVGPGEVNPEFPEAVQPVCSPLNPPGVISPWATMDTIVPDRKDFYSSNVVPDKTHEVGSYLAAQMSPSDQTLSSFASIVAQYGKGLPQEVEEIVRETIVQPKSEFLEFSAGLEKLLKEETETFPSKYESDTGNLSPSKLIGSTEEPRRATSECHPEELKETVEKAEAPLITESAFDAGFEKLLKEITEAPPYQPQVSVREETHEKESSQSEQTRFLGTVPHFYRAASQTSEMKDKSNGLESQVNQCDKMLGGDALVTDLLVDFCGSRSGVEIPRTPQLYVAHEIGTIKTVTPPEDRDSESGVAGGQGTLQEPGFGEASEAISVSRNRQPIPLLMNKENSTKTSKVELTLASPYMKQEKEEEKEGFSESDFSDGNTSSNAESWRNPSSSEEEPSPVLKTLERSAARKMPSKSLEDISSDSSNQAKVDNQPEELVRSAEDDF

SEQ ID NO: 85804 - protein, 610 aa, Homo sapiens
  Payload ID: 17043
  Gene Symbol: SYTL3
  Gene Name: synaptotagmin-like 3
  Uniprot ID: Q4VX76
  ENSP ID: ENSP00000297239
MAQEIDLSALKELEREAILQVLYRDQAVQNTEEERTRKLKTHLQHLRWKGAKNTDWEHKEKCCARCQQVLGFLLHRGAVCRGCSHRVCAQCRVFLRGTHAWKCTVCFEDRNVKIKTGEWFYEERAKKFPTGGKHETVGGQLLQSYQKLSKISVVPPTPPPVSESQCSRSPGRLQEFGQFRGFNKSVENLFLSLATHVKKLSKSQNDMTSEKHLLATGPRQCVGQTERRSQSDTAVNVTTRKVSAPDILKPLNQEDPKCSTNPILKQQNLPSSPAPSTIFSGGFRHGSLISIDSTCTEMGNFDNANVTGEIEFAIHYCFKTHSLEICIKACKNLAYGEEKKKKCNPYVKTYLLPDRSSQGKRKTGVQRNTVDPTFQETLKYQVAPAQLVTRQLQVSVWHLGTLARRVFLGEVIIPLATWDFEDSTTQSFRWHPLRAKAEKYEDSVPQSNGELTVRAKLVLPSRPRKLQEAQEGTDQPSLHGQLCLVVLGAKNLPVRPDGTLNSFVKGCLTLPDQQKLRLKSPVLRKQACPQWKHSFVFSGVTPAQLRQSSLELTVWDQALFGMNDRLLGGTRLGSKGDTAVGGDACSLSKLQWQKVLSSPNLWTDMTLVLH

SEQ ID NO: 85805 - protein, 610 aa, Homo sapiens; identical to SEQ ID NO: 85804
  Payload ID: 17043
  Gene Symbol: SYTL3
  Gene Name: synaptotagmin-like 3
  Uniprot ID: Q4VX76
  ENSP ID: ENSP00000353631

SEQ ID NO: 85806 - protein, 542 aa, Homo sapiens
  Payload ID: 17043
  Gene Symbol: SYTL3
  Gene Name: synaptotagmin-like 3
  Uniprot ID: Q4VX76
  ENSP ID: ENSP00000356048
MAQEIDLSALKELEREAILQVLYRDQAVQNTEEERTRKLKTHLQHLRWKGAKNTDWEHKEKCCARCQQVLGFLLHRGAVCRGCSHRVCAQCRVFLRGTHAWKCTVCFEDRNVKIKTGEWFYEERAKKFPTGGKHETVGGQLLQSYQKLSKISVVPPTPPPVSESQCSRSPGRKVSAPDILKPLNQEDPKCSTNPILKQQNLPSSPAPSTIFSGGFRHGSLISIDSTCTEMGNFDNANVTGEIEFAIHYCFKTHSLEICIKACKNLAYGEEKKKKCNPYVKTYLLPDRSSQGKRKTGVQRNTVDPTFQETLKYQVAPAQLVTRQLQVSVWHLGTLARRVFLGEVIIPLATWDFEDSTTQSFRWHPLRAKAEKYEDSVPQSNGELTVRAKLVLPSRPRKLQEAQEGTDQPSLHGQLCLVVLGAKNLPVRPDGTLNSFVKGCLTLPDQQKLRLKSPVLRKQACPQWKHSFVFSGVTPAQLRQSSLELTVWDQALFGMNDRLLGGTRLGSKGDTAVGGDACSLSKLQWQKVLSSPNLWTDMTLVLH

SEQ ID NO: 85807 - protein, 610 aa, Homo sapiens; identical to SEQ ID NO: 85804
  Payload ID: 17043
  Gene Symbol: SYTL3
  Gene Name: synaptotagmin-like 3
  Uniprot ID: Q4VX76
  ENSP ID: ENSP00000483936

SEQ ID NO: 85808 - protein, 671 aa, Homo sapiens
  Payload ID: 17044
  Gene Symbol: SYTL4
  Gene Name: synaptotagmin-like 4
  Uniprot ID: Q96C24
  ENSP ID: ENSP00000263033
MSELLDLSFLSEEEKDLILSVLQRDEEVRKADEKRIRRLKNELLEIKRKGAKRGSQHYSDRTCARCQESLGRLSPKTNTCRGCNHLVCRDCRIQESNGTWRCKVCAKEIELKKATGDWFYDQKVNRFAYRTGSEIIRMSLRHKPAVSKRETVGQSLLHQTQMGDIWPGRKIIQERQKEPSVLFEVPKLKSGKSALEAESESLDSFTADSDSTSRRDSLDKSGLFPEWKKMSAPKSQVEKETQPGGQNVVFVDEGEMIFKKNTRKILRPSEYTKSVIDLRPEDVVHESGSLGDRSKSVPGLNVDMEEEEEEEDIDHLVKLHRQKLARSSMQSGSSMSTIGSMMSIYSEAGDFGNIFVTGRIAFSLKYEQQTQSLVVHVKECHQLAYADEAKKRSNPYVKTYLLPDKSRQGKRKTSIKRDTINPLYDETLRYEIPESLLAQRTLQFSVWHHGRFGRNTFLGEAEIQMDSWKLDKKLDHCLPLHGKISAESPTGLPSHKGELVVSLKYIPASKTPVGGDRKKSKGGEGGELQVWIKEAKNLTAAKAGGTSDSFVKGYLLPMRNKASKRKTPVMKKTLNPHYNHTFVYNGVRLEDLQHMCLELTVWDREPLASNDFLGGVRLGVGTGISNGEVVDWMDSTGEEVSLWQKMRQYPGSWAEGTLQLRSSMAKQKLGL

SEQ ID NO: 85809 - protein, 671 aa, Homo sapiens; identical to SEQ ID NO: 85808
  Payload ID: 17044
  Gene Symbol: SYTL4
  Gene Name: synaptotagmin-like 4
  Uniprot ID: Q96C24
  ENSP ID: ENSP00000276141

SEQ ID NO: 85810 - protein, 349 aa, Homo sapiens
  Payload ID: 17044
  Gene Symbol: SYTL4
  Gene Name: synaptotagmin-like 4
  Uniprot ID: Q96C24
  ENSP ID: ENSP00000362072
MSELLDLSFLSEEEKDLILSVLQRDEEVRKADEKRIRRLKNELLEIKRKGAKRGSQHYSDRTCARCQESLGRLSPKTNTCRGCNHLVCRDCRIQESNGTWRCKVCAKEIELKKATGDWFYDQKVNRFAYRTGSEIIRMSLRHKPAVSKRETVGQSLLHQTQMGDIWPGRKIIQERQKEPSVLFEVPKLKSGKSALEAESESLDSFTADSDSTSRRDSLDKSGLFPEWKKMSAPKSQVEKETQPGGQNVVFVDEGEMIFKKNTRKILRPSEYTKSVIDLRPEDVVHESGSLGDRSKSVPGLNVDMEEEEEEEDIDHLVKLHRQKLARSSMQSGSSMVSSIRSVVTGMLGY

SEQ ID NO: 85811 - protein, 671 aa, Homo sapiens; identical to SEQ ID NO: 85808
  Payload ID: 17044
  Gene Symbol: SYTL4
  Gene Name: synaptotagmin-like 4
  Uniprot ID: Q96C24
  ENSP ID: ENSP00000362080

SEQ ID NO: 85812 - protein, 730 aa, Homo sapiens
  Payload ID: 17045
  Gene Symbol: SYTL5
  Gene Name: synaptotagmin-like 5
  Uniprot ID: Q8TDW5
  ENSP ID: ENSP00000297875
MSKNSEFINLSFLLDHEKEMILGVLKRDEYLKKVEDKRIRKLKNELLEAKRRSGKTQQEASRVCVHCHRNLGLIFDRGDPCQACSLRVCRECRVAGPNGSWKCTVCDKIAQLRIITGEWFFEEKAKRFKQVNVLGTDVVRQSILRRSPGAEEVQSQEQTRQDAEKSDTSPVAGKKASHDGPKRKGFLLSKFRSATRGEIITPKTDTGRSYSLDLDGQHFRSLKSPPGSDRGSTGSSDLNDQEPGPRTPKSSRSNGVTPGTQSSPAPSTRTVTSVISREYGFENSMDLAAIEGTSQELTKSHRRNTSGTPSIAVSGTSLSSDQSRSELDLSESFTEDSEDTVSIRSKSVPGALDKDSLEETEESIDALVSSQLSTNTHRLASGLSTTSLNSMMSVYSETGDYGNVKVSGEILLHISYCYKTGGLYIFVKNCRNLAIGDEKKQRTDAYVKSYLLPDKSRNNKRKTKIRTGTNPEFNETLKYTISHTQLETRTLQLSVWHYDRFGRNSFLGEVEIPFDSWNFENPTDEWFVLQPKVEFAPDIGLQYKGELTVVLRYIPPEENLMLPPEQLQGNKTFKKGKKKESPVISGGILEVFIKEAKNLTAVKSGGTSDSFVKGYLLPDDSKATKHKTLVIKKSVNPQWNHTFMFSGIHPQDIKNVCLELTIWDKEAFSSNIFLGGVRLNSGSGVSHGKNVDWMDSQGEEQRLWQKMANNPGTPFEGVLMLRSSMGKCRL

SEQ ID NO: 85813 - protein, 752 aa, Homo sapiens
  Payload ID: 17045
  Gene Symbol: SYTL5
  Gene Name: synaptotagmin-like 5
  Uniprot ID: Q8TDW5
  ENSP ID: ENSP00000395220
MSKNSEFINLSFLLDHEKEMILGVLKRDEYLKKVEDKRIRKLKNELLEAKRRSGKTQQEASRVCVHCHRNLGLIFDRGDPCQACSLRVCRECRVAGPNGSWKCTVCDKIAQLRIITGEWFFEEKAKRFKQVNVLGTDVVRQSILRRSPGAEEVQSQEQTRQDAEKSDTSPVAGKKASHDGPKRKGFLLSKFRSATRGEIITPKTDTGRSYSLDLDGQHFRSLKSPPGSDRGSTGSSDLNDQEPGPRTPKSSRSNGVTPGTQSSPAPSTRTVTSVISREYGFENSMDLAAIEGTSQELTKSHRRNTSGTPSIAVSGTSLSSDQSRSELDLSESFTEDSEDTVSIRSKSVPGALDKDSLEETEESIDALVSSQLSTNTHRLASGLSTSSQAGSDRKWTYLNVPDADSDTTSLNSMMSVYSETGDYGNVKVSGEILLHISYCYKTGGLYIFVKNCRNLAIGDEKKQRTDAYVKSYLLPDKSRNNKRKTKIRTGTNPEFNETLKYTISHTQLETRTLQLSVWHYDRFGRNSFLGEVEIPFDSWNFENPTDEWFVLQPKVEFAPDIGLQYKGELTVVLRYIPPEENLMLPPEQLQGNKTFKKGKKKESPVISGGILEVFIKEAKNLTAVKSGGTSDSFVKGYLLPDDSKATKHKTLVIKKSVNPQWNHTFMFSGIHPQDIKNVCLELTIWDKEAFSSNIFLGGVRLNSGSGVSHGKNVDWMDSQGEEQRLWQKMANNPGTPFEGVLMLRSSMGKCRL

SEQ ID NO: 85814 - protein, 476 aa, Homo sapiens
  Payload ID: 17046
  Gene Symbol: SYNC
  Gene Name: syncoilin, intermediate filament protein
  Uniprot ID: Q9H7C4
  ENSP ID: ENSP00000362583
MASPEPRRGGDGAAQAARKTRVEANSPLPKNSGSLNEAEALNPEVTLSSEGSLNLEDILYLEDTGDLDETLYVQETEKAEEALYIEEAMQPDEALHVEEPGNPEETVCVEETTEPDRIQFVEGPVEPGKPTSPEHVVYEGETVTRAEKSNPEESLRAEQSPSMEENLSIEDLELLEGRFQQCVQAVAQLEEERDQLIHELVLLREPALQEVQQVHQDILAAYKLHAQAELERDGLREEIRLVKQKLFKVTKECVAYQYQLECRQQDVAQFADFREVLTTRATQLSEELAQLRDAYQKQKEQLRQQLEAPPSQRDGHFLQESRRLSAQFENLMAESRQDLEEEYEPQFLRLLERKEAGTKALQRTQAEIQEMKEALRPLQAEARQLRLQNRNLEDQIALVRQKRDEEVQQYREQLEEMEERQRQLRNGVQLQQQKNKEMEQLRLSLAEELSTYKGCLEIYGQICNPETAKNFLAKDH

SEQ ID NO: 85815 - protein, 482 aa, Homo sapiens
  Payload ID: 17046
  Gene Symbol: SYNC
  Gene Name: syncoilin, intermediate filament protein
  Uniprot ID: Q9H7C4
  ENSP ID: ENSP00000386439
MASPEPRRGGDGAAQAARKTRVEANSPLPKNSGSLNEAEALNPEVTLSSEGSLNLEDILYLEDTGDLDETLYVQETEKAEEALYIEEAMQPDEALHVEEPGNPEETVCVEETTEPDRIQFVEGPVEPGKPTSPEHVVYEGETVTRAEKSNPEESLRAEQSPSMEENLSIEDLELLEGRFQQCVQAVAQLEEERDQLIHELVLLREPALQEVQQVHQDILAAYKLHAQAELERDGLREEIRLVKQKLFKVTKECVAYQYQLECRQQDVAQFADFREVLTTRATQLSEELAQLRDAYQKQKEQLRQQLEAPPSQRDGHFLQESRRLSAQFENLMAESRQDLEEEYEPQFLRLLERKEAGTKALQRTQAEIQEMKEALRPLQAEARQLRLQNRNLEDQIALVRQKRDEEVQQYREQLEEMEERQRQLRNGVQLQQQKNKEMEQLRLSLAEELSTYKAMLLPKSLEQADAPTSQAGGMETQSQGAV

SEQ ID NO: 85816 - protein, 70 aa, Homo sapiens
  Payload ID: 17046
  Gene Symbol: SYNC
  Gene Name: syncoilin, intermediate filament protein
  ENSP ID: ENSP00000387594
MQPDEALHVEEPGNPEETVCVEETTEPDRIQFVEGPVEPGKPTSPEHVVYEGETVTRAEKSNPEESLRAE

SEQ ID NO: 85817 - protein, 89 aa, Homo sapiens
  Payload ID: 17046
  Gene Symbol: SYNC
  Gene Name: syncoilin, intermediate filament protein
  ENSP ID: ENSP00000401975
MQPDEALHVEEPGNPEETVCVEETTEPDRIQFVEGPVEPGKPTSPEHVVYEGETVTRAEKSNPEESLRAEQSPSMEENLSIEDLELLEG

SEQ ID NO: 85818 - protein, 134 aa, Homo sapiens
  Payload ID: 17047
  Gene Symbol: SYCN
  Gene Name: syncollin
  Uniprot ID: Q0VAF6
  ENSP ID: ENSP00000325564
MSPLRPLLLALALASVPCAQGACPASADLKHSDGTRTCAKLYDKSDPYYENCCGGAELSLESGADLPYLPSNWANTASSLVVAPRCELTVWSRQGKAGKTHKFSAGTYPRLEEYRRGILGDWSNAISALYCRCS

SEQ ID NO: 85819 - protein, 310 aa, Homo sapiens
  Payload ID: 17048
  Gene Symbol: SDC1
  Gene Name: syndecan 1
  Uniprot ID: P18827
  ENSP ID: ENSP00000254351
MRRAALWLWLCALALSLQPALPQIVATNLPPEDQDGSGDDSDNFSGSGAGALQDITLSQQTPSTWKDTQLLTAIPTSPEPTGLEATAASTSTLPAGEGPKEGEAVVLPEVEPGLTAREQEATPRPRETTQLPTTHLASTTTATTAQEPATSHPHRDMQPGHHETSTPAGPSQADLHTPHTEDGGPSATERAAEDGASSQLPAAEGSGEQDFTFETSGENTAVVAVEPDRRNQSPVDQGATGASQGLLDRKEVLGGVIAGGLVGLIFAVCLVGFMLYRMKKKDEGSYSLEEPKQANGGAYQKPTKQEEFYA

SEQ ID NO: 85820 - protein, 310 aa, Homo sapiens; identical to SEQ ID NO: 85819
  Payload ID: 17048
  Gene Symbol: SDC1
  Gene Name: syndecan 1
  Uniprot ID: P18827
  ENSP ID: ENSP00000370542

SEQ ID NO: 85821 - protein, 169 aa, Homo sapiens
  Payload ID: 17048
  Gene Symbol: SDC1
  Gene Name: syndecan 1
  ENSP ID: ENSP00000384613
MRRAALWLWLCALALSLQPALPQIVATNLPPEDQDGSGDDSDNFSGSGAGALQDITLSQQTPSTWKDTQLLTAIPTSPEPTGLEATAASTSTLPAGEGPKEGEAVVLPEVEPGLTAREQEATPRPRETTQLPTTHLASTTTATTAQEPATSHPHRDMQPVHFVSWGGLI

SEQ ID NO: 85822 - protein, 28 aa, Homo sapiens
  Payload ID: 17048
  Gene Symbol: SDC1
  Gene Name: syndecan 1
  ENSP ID: ENSP00000390201
MRRAALWLWLCALALSLQPALPSLSHGR

SEQ ID NO: 85823 - protein, 215 aa, Homo sapiens
  Payload ID: 17048
  Gene Symbol: SDC1
  Gene Name: syndecan 1
  ENSP ID: ENSP00000400773
PRWPGEPGQGCVGGAGERLQGPRACRGRLEQIVATNLPPEDQDGSGDDSDNFSGSGAGALQDITLSQQTPSTWKDTQLLTAIPTSPEPTGLEATAASTSTLPAGEGPKEGEAVVLPEVEPGLTAREQEATPRPRETTQLPTTHLASTTTATTAQEPATSHPHRDMQPGHHETSTPAGPSQADLHTPHTEDGGPSATERAAEDGASSQLPAAEGSG

SEQ ID NO: 85824 - protein, 201 aa, Homo sapiens
  Payload ID: 17049
  Gene Symbol: SDC2
  Gene Name: syndecan 2
  Uniprot ID: P34741
  ENSP ID: ENSP00000307046
MRRAWILLTLGLVACVSAESRAELTSDKDMYLDNSSIEEASGVYPIDDDDYASASGSGADEDVESPELTTSRPLPKILLTSAAPKVETTTLNIQNKIPAQTKSPEETDKEKVHLSDSERKMDPAEEDTNVYTEKHSDSLFKRTEVLAAVIAGGVIGFLFAIFLILLLVYRMRKKDEGSYDLGERKPSSAAYQKAPTKEFYA

SEQ ID NO: 85825 - protein, 172 aa, Homo sapiens
  Payload ID: 17049
  Gene Symbol: SDC2
  Gene Name: syndecan 2
  ENSP ID: ENSP00000427784
MYLDNSSIEEASGVYPIDDDDYASASGSGADEDVESPELTTSRPLPKILLTSAAPKVETTTLNIQNKIPAQTKSPEETDKEKVHLSDSERKMDPAEEDTNVYTEKHSDSLFKRTEVLAAVIAGGVIGFLFAIFLILLLVYRMRKKDEGSYDLGERKPSSAAYQKAPTKEFYA

SEQ ID NO: 85826 - protein, 172 aa, Homo sapiens; identical to SEQ ID NO: 85825
  Payload ID: 17049
  Gene Symbol: SDC2
  Gene Name: syndecan 2
  ENSP ID: ENSP00000428256

SEQ ID NO: 85827 - protein, 165 aa, Homo sapiens
  Payload ID: 17049
  Gene Symbol: SDC2
  Gene Name: syndecan 2
  ENSP ID: ENSP00000429045
MRRAWILLTLGLVACVSAESVRADEDVESPELTTSRPLPKILLTSAAPKVETTTLNIQNKIPAQTKSPEETDKEKVHLSDSERKMDPAEEDTNVYTEKHSDSLFKRTEVLAAVIAGGVIGFLFAIFLILLLVYRMRKKDEGSYDLGERKPSSAAYQKAPTKEFYA

SEQ ID NO: 85828 - protein, 137 aa, Homo sapiens
  Payload ID: 17049
  Gene Symbol: SDC2
  Gene Name: syndecan 2
  ENSP ID: ENSP00000429121
MYLDNSSIEEASGVYPIDDDDYASASGSGADEDVESPELTTSRPLPKILLTSAAPKVETTTLNIQNKIPAQTKSPEETDKEKVHLSDSERKMDPAEEDTNVYTEKHSDSLFKRTEVLAAVIAGGVIGFLFAIFLILL

SEQ ID NO: 85829 - protein, 145 aa, Homo sapiens
  Payload ID: 17049
  Gene Symbol: SDC2
  Gene Name: syndecan 2
  ENSP ID: ENSP00000429662
MYLDNSSIEEASGVYPIDDDDYASASGSGADEDVESPELTTSRPLPKILLTSAAPKVETTTLNIQNKIPAQTKSPEETDKEKVHLSDSERKMDPAEEDTNVYTEKHSDSLFKRTEVLAAVIAGGVIGFLFAIFLILLLVYRMRKK

SEQ ID NO: 85830 - protein, 384 aa, Homo sapiens
  Payload ID: 17050
  Gene Symbol: SDC3
  Gene Name: syndecan 3
  ENSP ID: ENSP00000338346
MAIAYLGSSCPSQPPSSLALSLSPTPSDFEQESGIETAMRFSPDVALAVSTTPAVLPTTNIQPVGTPFEELPSERPTLEPATSPLVVTEVPEEPSQRATTVSTTMATTAATSTGDPTVATVPATVATATPSTPAAPPFTATTAVIRTTGVRRLLPLPLTTVATARATTPEAPSPPTTAAVLDTEAPTPRLVSTATSRPRALPRPATTQEPDIPERSTLPLGTTAPGPTEVAQTPTPETFLTTIRDEPEVPVSGGPSGDFELPEEETTQPDTANEVVAVGGAAAKASSPPGTLPKGARPGPGLLDNAIDSGSSAAQLPQKSILERKEVLVAVIVGGVVGALFAAFLVTLLIYRMKKKDEGSYTLEEPKQASVTYQKPDKQEEFYA

SEQ ID NO: 85831 - protein, 442 aa, Homo sapiens
  Payload ID: 17050
  Gene Symbol: SDC3
  Gene Name: syndecan 3
  Uniprot ID: O75056
  ENSP ID: ENSP00000344468
MKPGPPHRAGAAHGAGAGAGAAAGPGARGLLLPPLLLLLLAGRAAGAQRWRSENFERPVDLEGSGDDDSFPDDELDDLYSGSGSGYFEQESGIETAMRFSPDVALAVSTTPAVLPTTNIQPVGTPFEELPSERPTLEPATSPLVVTEVPEEPSQRATTVSTTMATTAATSTGDPTVATVPATVATATPSTPAAPPFTATTAVIRTTGVRRLLPLPLTTVATARATTPEAPSPPTTAAVLDTEAPTPRLVSTATSRPRALPRPATTQEPDIPERSTLPLGTTAPGPTEVAQTPTPETFLTTIRDEPEVPVSGGPSGDFELPEEETTQPDTANEVVAVGGAAAKASSPPGTLPKGARPGPGLLDNAIDSGSSAAQLPQKSILERKEVLVAVIVGGVVGALFAAFLVTLLIYRMKKKDEGSYTLEEPKQASVTYQKPDKQEEFYA

SEQ ID NO: 85832 - protein, 198 aa, Homo sapiens
  Payload ID: 17051
  Gene Symbol: SDC4
  Gene Name: syndecan 4
  Uniprot ID: P31431
  ENSP ID: ENSP00000361818
MAPARLFALLLFFVGGVAESIRETEVIDPQDLLEGRYFSGALPDDEDVVGPGQESDDFELSGSGDLDDLEDSMIGPEVVHPLVPLDNHIPERAGSGSQVPTEPKKLEENEVIPKRISPVEESEDVSNKVSMSSTVQGSNIFERTEVLAALIVGGIVGILFAVFLILLLMYRMKKKDEGSYDLGKKPIYKKAPTNEFYA

SEQ ID NO: 85833 - protein, 298 aa, Homo sapiens
  Payload ID: 17052
  Gene Symbol: SDCBP
  Gene Name: syndecan binding protein (syntenin)
  Uniprot ID: O00560
  ENSP ID: ENSP00000260130
MSLYPSLEDLKVDKVIQAQTAFSANPANPAILSEASAPIPHDGNLYPRLYPELSQYMGLSLNEEEIRANVAVVSGAPLQGQLVARPSSINYMVAPVTGNDVGIRRAEIKQGIREVILCKDQDGKIGLRLKSIDNGIFVQLVQANSPASLVGLRFGDQVLQINGENCAGWSSDKAHKVLKQAFGEKITMTIRDRPFERTITMHKDSTGHVGFIFKNGKITSIVKDSSAARNGLLTEHNICEINGQNVIGLKDSQIADILSTSGTVVTITIMPAFIFEHIIKRMAPSIMKSLMDHTIPEV

SEQ ID NO: 85834 - protein, 292 aa, Homo sapiens
  Payload ID: 17052
  Gene Symbol: SDCBP
  Gene Name: syndecan binding protein (syntenin)
  Uniprot ID: O00560
  ENSP ID: ENSP00000395351
MSLYPSLEDLKAQTAFSANPANPAILSEASAPIPHDGNLYPRLYPELSQYMGLSLNEEEIRANVAVVSGAPLQGQLVARPSSINYMVAPVTGNDVGIRRAEIKQGIREVILCKDQDGKIGLRLKSIDNGIFVQLVQANSPASLVGLRFGDQVLQINGENCAGWSSDKAHKVLKQAFGEKITMTIRDRPFERTITMHKDSTGHVGFIFKNGKITSIVKDSSAARNGLLTEHNICEINGQNVIGLKDSQIADILSTSGTVVTITIMPAFIFEHIIKRMAPSIMKSLMDHTIPEV

SEQ ID NO: 85835 - protein, 244 aa, Homo sapiens
  Payload ID: 17052
  Gene Symbol: SDCBP
  Gene Name: syndecan binding protein (syntenin)
  ENSP ID: ENSP00000397820
MSLYPSLEDLKVDKVIQAQTAFSANPANPAILSEASAPIPHDGNLYPRLYPELSQYMGLSLNEEEIRANVAVVSGAPLQGGIFVQLVQANSPASLVGLRFGDQVLQINGENCAGWSSDKAHKVLKQAFGEKITMTIRDRPFERTITMHKDSTGHVGFIFKNGKITSIVKDSSAARNGLLTEHNICEINGQNVIGLKDSQIADILSTSGTVVTITIMPAFIFEHIIKRMAPSIMKSLMDHTIPEV

SEQ ID NO: 85836 - protein, 297 aa, Homo sapiens
  Payload ID: 17052
  Gene Symbol: SDCBP
  Gene Name: syndecan binding protein (syntenin)
  Uniprot ID: O00560
  ENSP ID: ENSP00000409288
MSLYPSLEDLKVDKVIQAQTAFSANPANPAILSEASAPIPHDGNLYPRLYPELSQYMGLSLNEEEIRANVAVVSGAPLQGLVARPSSINYMVAPVTGNDVGIRRAEIKQGIREVILCKDQDGKIGLRLKSIDNGIFVQLVQANSPASLVGLRFGDQVLQINGENCAGWSSDKAHKVLKQAFGEKITMTIRDRPFERTITMHKDSTGHVGFIFKNGKITSIVKDSSAARNGLLTEHNICEINGQNVIGLKDSQIADILSTSGTVVTITIMPAFIFEHIIKRMAPSIMKSLMDHTIPEV

SEQ ID NO: 85837 - protein, 298 aa, Homo sapiens; identical to SEQ ID NO: 85833
  Payload ID: 17052
  Gene Symbol: SDCBP
  Gene Name: syndecan binding protein (syntenin)
  Uniprot ID: O00560
  ENSP ID: ENSP00000411771

SEQ ID NO: 85838 - protein, 318 aa, Homo sapiens
  Payload ID: 17052
  Gene Symbol: SDCBP
  Gene Name: syndecan binding protein (syntenin)
  ENSP ID: ENSP00000428184
MIKLWTNRDLHIIVMVKNPAKMSLYPSLEDLKVDKVIQAQTAFSANPANPAILSEASAPIPHDGNLYPRLYPELSQYMGLSLNEEEIRANVAVVSGAPLQGLVARPSSINYMVAPVTGNDVGIRRAEIKQGIREVILCKDQDGKIGLRLKSIDNGIFVQLVQANSPASLVGLRFGDQVLQINGENCAGWSSDKAHKVLKQAFGEKITMTIRDRPFERTITMHKDSTGHVGFIFKNGKITSIVKDSSAARNGLLTEHNICEINGQNVIGLKDSQIADILSTSGTVVTITIMPAFIFEHIIKRMAPSIMKSLMDHTIPEV

SEQ ID NO: 85839 - protein, 239 aa, Homo sapiens
  Payload ID: 17052
  Gene Symbol: SDCBP
  Gene Name: syndecan binding protein (syntenin)
  ENSP ID: ENSP00000430730
MSLYPSLEDLKVDKVIQAQTAFSANPANPAILSEASAPIPHDGNLYPRLYPELSQYMGLSLNEEEIRANVAVVSGAPLQGLVQANSPASLVGLRFGDQVLQINGENCAGWSSDKAHKVLKQAFGEKITMTIRDRPFERTITMHKDSTGHVGFIFKNGKITSIVKDSSAARNGLLTEHNICEINGQNVIGLKDSQIADILSTSGTVVTITIMPAFIFEHIIKRMAPSIMKSLMDHTIPEV

SEQ ID NO: 85840 - protein, 318 aa, Homo sapiens; identical to SEQ ID NO: 85838
  Payload ID: 17052
  Gene Symbol: SDCBP
  Gene Name: syndecan binding protein (syntenin)
  ENSP ID: ENSP00000487245

SEQ ID NO: 85841 - protein, 292 aa, Homo sapiens
  Payload ID: 17053
  Gene Symbol: SDCBP2
  Gene Name: syndecan binding protein (syntenin) 2
  Uniprot ID: Q9H190
  ENSP ID: ENSP00000342935
MSSLYPSLEDLKVDQAIQAQVRASPKMPALPVQATAISPPPVLYPNLAELENYMGLSLSSQEVQESLLQIPEGDSTAVSGPGPGQMVAPVTGYSLGVRRAEIKPGVREIHLCKDERGKTGLRLRKVDQGLFVQLVQANTPASLVGLRFGDQLLQIDGRDCAGWSSHKAHQVVKKASGDKIVVVVRDRPFQRTVTMHKDSMGHVGFVIKKGKIVSLVKGSSAARNGLLTNHYVCEVDGQNVIGLKDKKIMEILATAGNVVTLTIIPSVIYEHMVKKLPPVLLHHTMDHSIPDA

SEQ ID NO: 85842 - protein, 292 aa, Homo sapiens; identical to SEQ ID NO: 85841
  Payload ID: 17053
  Gene Symbol: SDCBP2
  Gene Name: syndecan binding protein (syntenin) 2
  Uniprot ID: Q9H190
  ENSP ID: ENSP00000354013

SEQ ID NO: 85843 - protein, 207 aa, Homo sapiens
  Payload ID: 17053
  Gene Symbol: SDCBP2
  Gene Name: syndecan binding protein (syntenin) 2
  Uniprot ID: Q9H190
  ENSP ID: ENSP00000371229
MVAPVTGYSLGVRRAEIKPGVREIHLCKDERGKTGLRLRKVDQGLFVQLVQANTPASLVGLRFGDQLLQIDGRDCAGWSSHKAHQVVKKASGDKIVVVVRDRPFQRTVTMHKDSMGHVGFVIKKGKIVSLVKGSSAARNGLLTNHYVCEVDGQNVIGLKDKKIMEILATAGNVVTLTIIPSVIYEHMVKKLPPVLLHHTMDHSIPDA

SEQ ID NO: 85844 - protein, 292 aa, Homo sapiens; identical to SEQ ID NO: 85841
  Payload ID: 17053
  Gene Symbol: SDCBP2
  Gene Name: syndecan binding protein (syntenin) 2
  Uniprot ID: Q9H190
  ENSP ID: ENSP00000371233

SEQ ID NO: 85845 - protein, 339 aa, Homo sapiens
  Payload ID: 17054
  Gene Symbol: SYNM
  Gene Name: synemin, intermediate filament protein
  ENSP ID: ENSP00000330469
MLSWRLQTGPEKAELQELNARLYDYVCRVRELERENLLLEEELRGRRGREGLWAEGQARCAEEARSLRQQLDELSWATALAEGERDALRRELRELQRLDAEERAARGRLDAELGAQQRELQEALGARAALEALLGRLQAERRGLDAAHERDVRELRARAASLTMHFRARATGPAAPPPRLREVHDSYALLVAESWRETVQLYEDEVRELEEALRRGQESRLQAEEETRLCAQEAEALRREALGLEQLRARLEDALLRMREEYGIQAEERQRVIDCLEDEKATLTLAMADWLRDYQDLLQVKTGLSLEVATYRALLEGESNPEIVIWAEHVENMPSDGCE

SEQ ID NO: 85846 - protein, 1565 aa, Homo sapiens
  Payload ID: 17054
  Gene Symbol: SYNM
  Gene Name: synemin, intermediate filament protein
  Uniprot ID: O15061
  ENSP ID: ENSP00000336775
MLSWRLQTGPEKAELQELNARLYDYVCRVRELERENLLLEEELRGRRGREGLWAEGQARCAEEARSLRQQLDELSWATALAEGERDALRRELRELQRLDAEERAARGRLDAELGAQQRELQEALGARAALEALLGRLQAERRGLDAAHERDVRELRARAASLTMHFRARATGPAAPPPRLREVHDSYALLVAESWRETVQLYEDEVRELEEALRRGQESRLQAEEETRLCAQEAEALRREALGLEQLRARLEDALLRMREEYGIQAEERQRVIDCLEDEKATLTLAMADWLRDYQDLLQVKTGLSLEVATYRALLEGESNPEIVIWAEHVENMPSEFRNKSYHYTDSLLQRENERNLFSRQKAPLASFNHSSALYSNLSGHRGSQTGTSIGGDARRGFLGSGYSSSATTQQENSYGKAVSSQTNVRTFSPTYGLLRNTEAQVKTFPDRPKAGDTREVPVYIGEDSTIARESYRDRRDKVAAGASESTRSNERTVILGKKTEVKATREQERNRPETIRTKPEEKMFDSKEKASEERNLRWEELTKLDKEARQRESQQMKEKAKEKDSPKEKSVREREVPISLEVSQDRRAEVSPKGLQTPVKDAGGGTGREAEARELRFRLGTSDATGSLQGDSMTETVAENIVTSILKQFTQSPETEASADSFPDTKVTYVDRKELPGERKTKTEIVVESKLTEDVDVSDEAGLDYLLSKDIKEVGLKGKSAEQMIGDIINLGLKGREGRAKVVNVEIVEEPVSYVSGEKPEEFSVPFKVEEVEDVSPGPWGLVKEEEGYGESDVTFSVNQHRRTKQPQENTTHVEEVTEAGDSEGEQSYFVSTPDEHPGGHDRDDGSVYGQIHIEEESTIRYSWQDEIVQGTRRRTQKDGAVGEKVVKPLDVPAPSLEGDLGSTHWKEQARSGEFHAEPTVIEKEIKIPHEFHTSMKGISSKEPRQQLVEVIGQLEETLPERMREELSALTREGQGGPGSVSVDVKKVQGAGGSSVTLVAEVNVSQTVDADRLDLEELSKDEASEMEKAVESVVRESLSRQRSPAPGSPDEEGGAEAPAAGIRFRRWATRELYIPSGESEVAGGASHSSGQRTPQGPVSATVEVSSPTGFAQSQVLEDVSQAARHIKLGPSEVWRTERMSYEGPTAEVVEVSAGGDLSQAASPTGASRSVRHVTLGPGQSPLSREVIFLGPAPACPEAWGSPEPGPAESSADMDGSGRHSTFGCRQFHAEKEIIFQGPISAAGKVGDYFATEESVGTQTSVRQLQLGPKEGFSGQIQFTAPLSDKVELGVIGDSVHMEGLPGSSTSIRHISIGPQRHQTTQQIVYHGLVPQLGESGDSESTVHGEGSADVHQATHSHTSGRQTVMTEKSTFQSVVSESPQEDSAEDTSGAEMTSGVSRSFRHIRLGPTETETSEHIAIRGPVSRTFVLAGSADSPELGKLADSSRTLRHIAPGPKETSFTFQMDVSNVEAIRSRTQEAGALGVSDRGSWRDADSRNDQAVGVSFKASAGEGDQAHREQGKEQAMFDKKVQLQRMVDQRSVISDEKKVALLYLDNEEEENDGHWF

SEQ ID NO: 85847 - protein, 967 aa, Homo sapiens
  Payload ID: 17054
  Gene Symbol: SYNM
  Gene Name: synemin, intermediate filament protein
  ENSP ID: ENSP00000453040
MADWLRDYQDLLQVKTGLSLEVATYRALLEGESNPEIVIWAEHVENMPSEFRNKSYHYTDSLLQRENERNLFSRQKAPLASFNHSSALYSNLSGHRGSQTGTSIGGDARRGFLGSGYSSSATTQQENSYGKAVSSQTNVRTFSPTYGLLRNTEAQVKTFPDRPKAGDTREVPVYIGEDSTIARESYRDRRDKVAAGASESTRSNERTVILGKKTEVKATREQERNRPETIRTKPEEKMFDSKEKASEERNLRWEELTKLDKEARQRESQQMKEKAKEKDSPKEKSVREREVPISLEVSQDRRAEVSPKGLQTPVKDAGGGTGREAEARELRFRLGTSDATGSLQGDSMTETVAENIVTSILKQFTQSPETEASADSFPDTKVTYVDRKELPGERKTKTEIVVESKLTEDVDVSDEAGLDYLLSKDIKEVGLKGKSAEQMIGDIINLGLKGREGRAKVVNVEIVEEPVSYVSGEKPEEFSVPFKVEEVEDVSPGPWGLVKEEEGYGESDVTFSVNQHRRTKQPQENTTHVEEVTEAGDSEGEQSYFVSTPDEHPGGHDRDDGSVYGQIHIEEESTIRYSWQDEIVQGTRRRTQKDGAVGEKVVKPLDVPAPSLEGDLGSTHWKEQARSGEFHAEPTVIEKEIKIPHEFHTSMKGISSKEPRQQLVEVIGQLEETLPERMREELSALTREGQGGPGSVSVDVKKVQGAGGSSVTLVAEVNVSQTVDADRLDLEELSKDEASEMEKAVESVVRESLSRQRSPAPGSPDEEGGAEAPAAGIRFRRWATRELYIPSGESEVAGGASHSSGQRTPQGPVSATVEVSSPTGFAQSQVLEDVSQAARHIKLGPSEVWRTERMSYEGPTAEVVEMDVSNVEAIRSRTQEAGALGVSDRGSWRDADSRNDQAVGVSFKASAGEGDQAHREQGKEQAMFDKKVQLQRMVDQRSVISDEKKVALLYLDNEEEENDGHWF

SEQ ID NO: 85848 - protein, 1253 aa, Homo sapiens
  Payload ID: 17054
  Gene Symbol: SYNM
  Gene Name: synemin, intermediate filament protein
  ENSP ID: ENSP00000472953
MLSWRLQTGPEKAELQELNARLYDYVCRVRELERENLLLEEELRGRRGREGLWAEGQARCAEEARSLRQQLDELSWATALAEGERDALRRELRELQRLDAEERAARGRLDAELGAQQRELQEALGARAALEALLGRLQAERRGLDAAHERDVRELRARAASLTMHFRARATGPAAPPPRLREVHDSYALLVAESWRETVQLYEDEVRELEEALRRGQESRLQAEEETRLCAQEAEALRREALGLEQLRARLEDALLRMREEYGIQAEERQRVIDCLEDEKATLTLAMADWLRDYQDLLQVKTGLSLEVATYRALLEGESNPEIVIWAEHVENMPSEFRNKSYHYTDSLLQRENERNLFSRQKAPLASFNHSSALYSNLSGHRGSQTGTSIGGDARRGFLGSGYSSSATTQQENSYGKAVSSQTNVRTFSPTYGLLRNTEAQVKTFPDRPKAGDTREVPVYIGEDSTIARESYRDRRDKVAAGASESTRSNERTVILGKKTEVKATREQERNRPETIRTKPEEKMFDSKEKASEERNLRWEELTKLDKEARQRESQQMKEKAKEKDSPKEKSVREREVPISLEVSQDRRAEVSPKGLQTPVKDAGGGTGREAEARELRFRLGTSDATGSLQGDSMTETVAENIVTSILKQFTQSPETEASADSFPDTKVTYVDRKELPGERKTKTEIVVESKLTEDVDVSDEAGLDYLLSKDIKEVGLKGKSAEQMIGDIINLGLKGREGRAKVVNVEIVEEPVSYVSGEKPEEFSVPFKVEEVEDVSPGPWGLVKEEEGYGESDVTFSVNQHRRTKQPQENTTHVEEVTEAGDSEGEQSYFVSTPDEHPGGHDRDDGSVYGQIHIEEESTIRYSWQDEIVQGTRRRTQKDGAVGEKVVKPLDVPAPSLEGDLGSTHWKEQARSGEFHAEPTVIEKEIKIPHEFHTSMKGISSKEPRQQLVEVIGQLEETLPERMREELSALTREGQGGPGSVSVDVKKVQGAGGSSVTLVAEVNVSQTVDADRLDLEELSKDEASEMEKAVESVVRESLSRQRSPAPGSPDEEGGAEAPAAGIRFRRWATRELYIPSGESEVAGGASHSSGQRTPQGPVSATVEVSSPTGFAQSQVLEDVSQAARHIKLGPSEVWRTERMSYEGPTAEVVEMDVSNVEAIRSRTQEAGALGVSDRGSWRDADSRNDQAVGVSFKASAGEGDQAHREQGKEQAMFDKKVQLQRMVDQRSVISDEKKVALLYLDNEEEENDGHWF

SEQ ID NO: 85849 - protein, 1235 aa, Homo sapiens
  Payload ID: 17055
  Gene Symbol: SYNRG
  Gene Name: synergin, gamma
  Uniprot ID: Q9UMZ2
  ENSP ID: ENSP00000477885
MALRPGAGSGGGGAAGAGAGSAGGGGFMFPVAGGIRPPQGLMPMQQQGFPMVSVMQPNMQGIMGMNYSSQMSQGPIAMQAGIPMGPMPAAGMPYLGQAPFLGMRPPGPQYTPDMQKQFAEEQQKRFEQQQKLLEEERKRRQFEEQKQKLRLLSSVKPKTGEKSRDDALEAIKGNLDGFSRDAKMHPTPASHPKKPGVGVFPSQDPAQPRMPPWIYNESLVPDAYKKILETTMTPTGIDTAKLYPILMSSGLPRETLGQIWALANRTTPGKLTKEELYTVLAMIAVTQRGVPAMSPDALNQFPAAPIPTLSGFSMTLPTPVSQPTVIPSGPAGSMPLSLGQPVMGINLVGPVGGAAAQASSGFIPTYPANQVVKPEEDDFQDFQDASKSGSLDDSFSDFQELPASSKTSNSQHGNSAPSLLMPLPGTKALPSMDKYAVFKGIAADKSSENTVPPGDPGDKYSAFRELEQTAENKPLGESFAEFRSAGTDDGFTDFKTADSVSPLEPPTKDKTFPPSFPSGTIQQKQQTQVKNPLNLADLDMFSSVNCSSEKPLSFSAVFSTSKSVSTPQSTGSAATMTALAATKTSSLADDFGEFSLFGEYSGLAPVGEQDDFADFMAFSNSSISSEQKPDDKYDALKEEASPVPLTSNVGSTVKGGQNSTAASTKYDVFRQLSLEGSGLGVEDLKDNTPSGKSDDDFADFHSSKFSSINSDKSLGEKAVAFRHTKEDSASVKSLDLPSIGGSSVGKEDSEDALSVQFDMKLADVGGDLKHVMSDSSLDLPTVSGQHPPAADIEDLKYAAFGSYSSNFAVSTLTSYDWSDRDDATQGRKLSPFVLSAGSGSPSATSILQKKETSFGSSENITMTSLSKVTTFVSEDALPETTFPALASFKDTIPQTSEQKEYENRDYKDFTKQDLPTAERSQEATCPSPASSGASQETPNECSDDFGEFQSEKPKISKFDFLVATSQSKMKSSEEMIKSELATFDLSVQGSHKRSLSLGDKEISRSSPSPALEQPFRDRSNTLNEKPALPVIRDKYKDLTGEVEENERYAYEWQRCLGSALNVIKKANDTLNGISSSSVCTEVIQSAQGMEYLLGVVEVYRVTKRVELGIKATAVCSEKLQQLLKDIDKVWNNLIGFMSLATLTPDENSLDFSSCMLRPGIKNAQELACGVCLLNVDSRSRKEEKPAEEHPKKAFNSETDSFKLAYGGHQYHASCANFWINCVEPKPPGLVLPDLL

SEQ ID NO: 85850 - protein, 1108 aa, Homo sapiens
  Payload ID: 17055
  Gene Symbol: SYNRG
  Gene Name: synergin, gamma
  Uniprot ID: Q9UMZ2
  ENSP ID: ENSP00000478707
MALRPGAGSGGGGAAGAGAGSAGGGGFMFPVAGGIRPPQAGLMPMQQQGFPMVSVMQPNMQGIMGMNYSSQMSQGPIAMQAGIPMGPMPAAGMPYLGQAPFLGMRPPGPQYTPDMQKQFAEEQQKRFEQQQKLLEEERKRRQFEEQKQKLRLLSSVKPKTGEKSRDDALEAIKGNLDGFSRDAKMHPTPASHPKKPGVGVFPSQDPAQPRMPPWIYNESLVPDAYKKILETTMTPTGIDTAKLYPILMSSGLPRETLGQIWALANRTTPGKLTKEELYTVLAMIAVTQVVKPEEDDFQDFQDASKSGSLDDSFSDFQELPASSKTSNSQHGNSAPSLLMPLPGTKALPSMDKYAVFKGIAADKSSENTVPPGDPGDKYSAFRELEQTAENKPLGESFAEFRSAGTDDGFTDFKTADSVSPLEPPTKDKTFPPSFPSGTIQQKQQTQVKNPLNLADLDMFSSVNCSSEKPLSFSAVFSTSKSVSTPQSTGSAATMTALAATKTSSLADDFGEFSLFGEYSGLAPVGEQDDFADFMAFSNSSISSEQKPDDKYDALKEEASPVPLTSNVGSTVKGGQNSTAASTKYDVFRQLSLEGSGLGVEDLKDNTPSGKSDDDFADFHSSKFSSINSDKSLGEKAVAFRHTKEDSASVKSLDLPSIGGSSVGKEDSEDALSVQFDMKLADVGGDLKHVMSDSSLDLPTVSGQHPPAAAGSGSPSATSILQKKETSFGSSENITMTSLSKVTTFVSEDALPETTFPALASFKDTIPQTSEQKEYENRDYKDFTKQDLPTAERSQEATCPSPASSGASQETPNECSDDFGEFQSEKPKISKFDFLVATSQSKMKSSEEMIKSELATFDLSVQGSHKRSLSLGDKEISRSSPSPALEQPFRDRSNTLNEKPALPVIRDKYKDLTGEVEENERYAYEWQRCLGSALNVIKKANDTLNGISSSSVCTEVIQSAQGMEYLLGVVEVYRVTKRVELGIKATAVCSEKLQQLLKDIDKVWNNLIGFMSLATLTPDENSLDFSSCMLRPGIKNAQELACGVCLLNVDSRSRKEEKPAEEHPKKAFNSETDSFKLAYGGHQYHASCANFWINCVEPKPPGLVLPDLL

SEQ ID NO: 85851 - protein, 107 aa, Homo sapiens
  Payload ID: 17055
  Gene Symbol: SYNRG
  Gene Name: synergin, gamma
  ENSP ID: ENSP00000480047
  MOD_RES (1)..(1): Any amino acid
XQKLLEEERKRRQFEEQKQKLRLLSSVKPKTGEKSRDDALEAIKGNLDGFSRDAKMHPTPASHPKKPGSFKRHYIFLFWEGDLCSPCFFTSPLYVCVKSQCRTLPSS

SEQ ID NO: 85852 - protein, 1314 aa, Homo sapiens
  Payload ID: 17055
  Gene Symbol: SYNRG
  Gene Name: synergin, gamma
  Uniprot ID: Q9UMZ2
  ENSP ID: ENSP00000480288
MALRPGAGSGGGGAAGAGAGSAGGGGFMFPVAGGIRPPQAGLMPMQQQGFPMVSVMQPNMQGIMGMNYSSQMSQGPIAMQAGIPMGPMPAAGMPYLGQAPFLGMRPPGPQYTPDMQKQFAEEQQKRFEQQQKLLEEERKRRQFEEQKQKLRLLSSVKPKTGEKSRDDALEAIKGNLDGFSRDAKMHPTPASHPKKPGPSLEEKFLVSCDISTSGQEQIKLNTSEVGHKALGPGSSKKYPSLMASNGVAVDGCVSGTTTAEAENTSDQNLSIEESGVGVFPSQDPAQPRMPPWIYNESLVPDAYKKILETTMTPTGIDTAKLYPILMSSGLPRETLGQIWALANRTTPGKLTKEELYTVLAMIAVTQRGVPAMSPDALNQFPAAPIPTLSGFSMTLPTPVSQPTVIPSGPAGSMPLSLGQPVMGINLVGPVGGAAAQASSGFIPTYPANQVVKPEEDDFQDFQDASKSGSLDDSFSDFQELPASSKTSNSQHGNSAPSLLMPLPGTKALPSMDKYAVFKGIAADKSSENTVPPGDPGDKYSAFRELEQTAENKPLGESFAEFRSAGTDDGFTDFKTADSVSPLEPPTKDKTFPPSFPSGTIQQKQQTQVKNPLNLADLDMFSSVNCSSEKPLSFSAVFSTSKSVSTPQSTGSAATMTALAATKTSSLADDFGEFSLFGEYSGLAPVGEQDDFADFMAFSNSSISSEQKPDDKYDALKEEASPVPLTSNVGSTVKGGQNSTAASTKYDVFRQLSLEGSGLGVEDLKDNTPSGKSDDDFADFHSSKFSSINSDKSLGEKAVAFRHTKEDSASVKSLDLPSIGGSSVGKEDSEDALSVQFDMKLADVGGDLKHVMSDSSLDLPTVSGQHPPAADIEDLKYAAFGSYSSNFAVSTLTSYDWSDRDDATQGRKLSPFVLSAGSGSPSATSILQKKETSFGSSENITMTSLSKVTTFVSEDALPETTFPALASFKDTIPQTSEQKEYENRDYKDFTKQDLPTAERSQEATCPSPASSGASQETPNECSDDFGEFQSEKPKISKFDFLVATSQSKMKSSEEMIKSELATFDLSVQGSHKRSLSLGDKEISRSSPSPALEQPFRDRSNTLNEKPALPVIRDKYKDLTGEVEENERYAYEWQRCLGSALNVIKKANDTLNGISSSSVCTEVIQSAQGMEYLLGVVEVYRVTKRVELGIKATAVCSEKLQQLLKDIDKVWNNLIGFMSLATLTPDENSLDFSSCMLRPGIKNAQELACGVCLLNVDSRSRKEEKPAEEHPKKAFNSETDSFKLAYGGHQYHASCANFWINCVEPKPPGLVLPDLL

SEQ ID NO: 85853 - protein, 1108 aa, Homo sapiens; identical to SEQ ID NO: 85850
  Payload ID: 17055
  Gene Symbol: SYNRG
  Gene Name: synergin, gamma
  Uniprot ID: Q9UMZ2
  ENSP ID: ENSP00000481151

SEQ ID NO: 85854 - protein, 1224 aa, Homo sapiens
  Payload ID: 17055
  Gene Symbol: SYNRG
  Gene Name: synergin, gamma
  Uniprot ID: Q9UMZ2
  ENSP ID: ENSP00000482597
MALRPGAGSGGGGAAGAGAGSAGGGGFMFPVAGGIRPPQAGLMPMQQQGFPMVSVMQPNMQGIMGMNYSSQMSQGPIAMQAGIPMGPMPAAGMPYLGQAPFLGMRPPGPQYTPDMQKQFAEEQQKRFEQQQKLLEEERKRRQFEEQKQKLRLLSSVKPKTGEKSRDDALEAIKGNLDGFSRDAKMHPTPASHPKKPGVGVFPSQDPAQPRMPPWIYNESLVPDAYKKILETTMTPTGIDTAKLYPILMSSGLPRETLGQIWALANRTTPGKLTKEELYTVLAMIAVTQRGVPAMSPDALNQFPAAPIPTLSGFSMTLPTPVSQPTVIPSGPAGSMPLSLGQPVMGINLVGPVGGAAAQASSGFIPTYPANQVVKPEEDDFQDFQDASKSGSLDDSFSDFQELPASSKTSNSQHGNSAPSLLMPLPGTKALPSMDKYAVFKGIAADKSSENTVPPGDPGDKYSAFRELEQTAENKPLGESFAEFRSAGTDDGFTDFKTADSVSPLEPPTKDKTFPPSFPSGTIQQKQQTQVKNPLNLADLDMFSSVNCSSEKPLSFSAVFSTSKSVSTPQSTGSAATMTALAATKTSSLADDFGEFSLFGEYSGLAPVGEQDDFADFMAFSNSSISSEQKPDDKYDALKEEASPVPLTSNVGSTVKGGQNSTAASTKYDVFRQLSLEGSGLGVEDLKDNTPSGKSDDDFADFHSSKFSSINSDKSLGEKAVAFRHTKEDSASVKSLDLPSIGGSSVGKEDSEDALSVQFDMKLADVGGDLKHVMSDSSLDLPTVSGQHPPAADIEDLKYAAFGSYSSNFAVSTLTSYDWSDRDDATQGRKLSPFVLSAGSGSPSATSILQKKETSFGSSENITMTSLSKVTTFVSEDALPETTFPALASFKDTIPQTSEQKEYENRDYKDFTKQDLPTAERSQEATCPSPASSGASQETPNECSDDFGEFQSEKPKISKFDFLVATSQSKMKSSEEMIKSELATFDLSVQGSHKRSLSLGDKEISRSSPSPALEQPFRDRSNTLNEKPALPVIRDKYKDLTGEVEENERYAYEWQRCLGSALNVIKKANDTLNGISSSSVCTEVIQSAQGMEYLLGVVEVYRVTKRVELGIKATAVCSEKLQQLLKDIDKVWNNLIGFMSLATLTPDENSLDFSSCMLRPGIKNAQELACGVCLLNVDSRSRAFNSETDSFKLAYGGHQYHASCANFWINCVEPKPPGLVLPDLL

SEQ ID NO: 85855 - protein, 125 aa, Homo sapiens
  Payload ID: 17055
  Gene Symbol: SYNRG
  Gene Name: synergin, gamma
  ENSP ID: ENSP00000482631
MFPVAGGIRPPQGLMPMQQQGFPMVSVMQPNMQGIMGMNYSSQMSQGPIAMQAGIPMGPMPAAGMPYLGQAPFLGMRPPGPQYTPDMQKQFAEEQQKRFEQQQKLLEEERKRRQFEEQKQKLRLL

SEQ ID NO: 85856 - protein, 236 aa, Homo sapiens
  Payload ID: 17055
  Gene Symbol: SYNRG
  Gene Name: synergin, gamma
  ENSP ID: ENSP00000482858
ETSFGSSENITMTSLSKVTTFVSEDALPETTFPALASFKDTIPQTSEQKEYENRDYKDFTKQDLPTAERSQEATCPSPASSGASQETPNECSDDFGEFQSEKPKISKFDFLVATSQSKMKSSEEMIKSELATFDLSVQALEQPFRDRSNTLNEKPALPVIRDKYKDLTGEVEENERYAYEWQRCLGSALNVIKKANDTLNGISSSSVCTEVIQSAQGMEYLLGVVEVYRVTKRVEL

SEQ ID NO: 85857 - protein, 1179 aa, Homo sapiens
  Payload ID: 17055
  Gene Symbol: SYNRG
  Gene Name: synergin, gamma
  Uniprot ID: Q9UMZ2
  ENSP ID: ENSP00000482962
MALRPGAGSGGGGAAGAGAGSAGGGGFMFPVAGGIRPPQAGLMPMQQQGFPMVSVMQPNMQGIMGMNYSSQMSQGPIAMQAGIPMGPMPAAGMPYLGQAPFLGMRPPGPQYTPDMQKQFAEEQQKRFEQQQKLLEEERKRRQFEEQKQKLRLLSSVKPKTGEKSRDDALEAIKGNLDGFSRDAKMHPTPASHPKKPGVGVFPSQDPAQPRMPPWIYNESLVPDAYKKILETTMTPTGIDTAKLYPILMSSGLPRETLGQIWALANRTTPGKLTKEELYTVLAMIAVTQRGVPAMSPDALNQFPAAPIPTLSGFSMTLPTPVSQPTVIPSGPAGSMPLSLGQPVMGINLVGPVGGAAAQASSGFIPTYPANQVVKPEEDDFQDFQDASKSGSLDDSFSDFQELPASSKTSNSQHGNSAPSLLMPLPGTKALPSMDKYAVFKGIAADKSSENTVPPGDPGDKYSAFRELEQTAENKPLGESFAEFRSAGTDDGFTDFKTADSVSPLEPPTKDKTFPPSFPSGTIQQKQQTQVKNPLNLADLDMFSSVNCSSEKPLSFSAVFSTSKSVSTPQSTGSAATMTALAATKTSSLADDFGEFSLFGEYSGLAPVGEQDDFADFMAFSNSSISSEQKPDDKYDALKEEASPVPLTSNVGSTVKGGQNSTAASTKYDVFRQLSLEGSGLGVEDLKDNTPSGKSDDDFADFHSSKFSSINSDKSLGEKAVAFRHTKEDSASVKSLDLPSIGGSSVGKEDSEDALSVQFDMKLADVGGDLKHVMSDSSLDLPTVSGQHPPAAAGSGSPSATSILQKKETSFGSSENITMTSLSKVTTFVSEDALPETTFPALASFKDTIPQTSEQKEYENRDYKDFTKQDLPTAERSQEATCPSPASSGASQETPNECSDDFGEFQSEKPKISKFDFLVATSQSKMKSSEEMIKSELATFDLSVQGSHKRSLSLGDKEISRSSPSPALEQPFRDRSNTLNEKPALPVIRDKYKDLTGEVEENERYAYEWQRCLGSALNVIKKANDTLNGISSSSVCTEVIQSAQGMEYLLGVVEVYRVTKRVELGIKATAVCSEKLQQLLKDIDKVWNNLIGFMSLATLTPDENSLDFSSCMLRPGIKNAQELACGVCLLNVDSRSRAFNSETDSFKLAYGGHQYHASCANFWINCVEPKPPGLVLPDLL

SEQ ID NO: 85858 - protein, 1259 aa, Homo sapiens
  Payload ID: 17055
  Gene Symbol: SYNRG
  Gene Name: synergin, gamma
  Uniprot ID: Q9UMZ2
  ENSP ID: ENSP00000483063
MALRPGAGSGGGGAAGAGAGSAGGGGFMFPVAGGIRPPQAGLMPMQQQGFPMVSVMQPNMQGIMGMNYSSQMSQGPIAMQAGIPMGPMPAAGMPYLGQAPFLGMRPPGPQYTPDMQKQFAEEQQKRFEQQQKLLEEERKRRQFEEQKQKLRLLSSVKPKTGEKSRDDALEAIKGNLDGFSRDAKMHPTPASHPKKPGVGVFPSQDPAQPRMPPWIYNESLVPDAYKKILETTMTPTGIDTAKLYPILMSSGLPRETLGQIWALANRTTPGKLTKEELYTVLAMIAVTQRGVPAMSPDALNQFPAAPIPTLSGFSMTLPTPVSQPTVIPSGPAGSMPLSLGQPVMGINLVGPVGGAAAQASSGFIPTYPANQVVKPEEDDFQDFQDASKSGSLDDSFSDFQELPASSKTSNSQHGNSAPSLLMPLPGTKALPSMDKYAVFKGIAADKSSENTVPPGDPGDKYSAFRELEQTAENKPLGESFAEFRSAGTDDGFTDFKTADSVSPLEPPTKDKTFPPSFPSGTIQQKQQTQVKNPLNLADLDMFSSVNCSSEKPLSFSAVFSTSKSVSTPQSTGSAATMTALAATKTSSLADDFGEFSLFGEYSGLAPVGEQDDFADFMAFSNSSISSEQKPDDKYDALKEEASPVPLTSNVGSTVKGGQNSTAASTKYDVFRQLSLEGSGLGVEDLKDNTPSGKSDDDFADFHSSKFSSINSDKSLGEKAVAFRHTKEDSASVKSLDLPSIGGSSVGKEDSEDALSVQFDMKLADVGGDLKHVMSDSSLDLPTVSGQHPPAADIEDLKYAAFGSYSSNFAVSTLTSYDWSDRDDATQGRKLSPFVLSAGSGSPSATSILQKKETSFGSSENITMTSLSKVTTFVSEDALPETTFPALASFKDTIPQTSEQKEYENRDYKDFTKQDLPTAERSQEATCPSPASSGASQETPNECSDDFGEFQSEKPKISKFDFLVATSQSKMKSSEEMIKSELATFDLSVQGSHKRSLSLGDKEISRSSPSPALEQPFRDRSNTLNEKPALPVIRDKYKDLTGEVEENERYAYEWQRCLGSALNVIKKANDTLNGISSSSVCTEVIQSAQGMEYLLGVVEVYRVTKRVELGIKATAVCSEKLQQLLKDIDKVWNNLIGFMSLATLTCCWEKMTVITKHLSPYHELLEEKPDENSLDFSSCMLRPGIKNAQELACGVCLLNVDSRSRKEEKPAEEHPKKAFNSETDSFKLAYGGHQYHASCANFWINCVEPKPPGLVLPDLL

SEQ ID NO: 85859 - protein, 1259 aa, Homo sapiens; identical to SEQ ID NO: 85858
  Payload ID: 17055
  Gene Symbol: SYNRG
  Gene Name: synergin, gamma
  Uniprot ID: Q9UMZ2
  ENSP ID: ENSP00000483152

SEQ ID NO: 85860 - protein, 1314 aa, Homo sapiens; identical to SEQ ID NO: 85852
  Payload ID: 17055
  Gene Symbol: SYNRG
  Gene Name: synergin, gamma
  Uniprot ID: Q9UMZ2
  ENSP ID: ENSP00000483453

SEQ ID NO: 85861 - protein, 1224 aa, Homo sapiens; identical to SEQ ID NO: 85854
  Payload ID: 17055
  Gene Symbol: SYNRG
  Gene Name: synergin, gamma
  Uniprot ID: Q9UMZ2
  ENSP ID: ENSP00000484529

SEQ ID NO: 85862 - protein, 1179 aa, Homo sapiens; identical to SEQ ID NO: 85857
  Payload ID: 17055
  Gene Symbol: SYNRG
  Gene Name: synergin, gamma
  Uniprot ID: Q9UMZ2
  ENSP ID: ENSP00000487672

SEQ ID NO: 85863 - protein, 125 aa, Homo sapiens; identical to SEQ ID NO: 85855
  Payload ID: 17055
  Gene Symbol: SYNRG
  Gene Name: synergin, gamma
  ENSP ID: ENSP00000488089

SEQ ID NO: 85864 - protein, 1235 aa, Homo sapiens; identical to SEQ ID NO: 85849
  Payload ID: 17055
  Gene Symbol: SYNRG
  Gene Name: synergin, gamma
  Uniprot ID: Q9UMZ2
  ENSP ID: ENSP00000488473

SEQ ID NO: 85865 - protein, 107 aa, Homo sapiens; identical to SEQ ID NO: 85851
  Payload ID: 17055
  Gene Symbol: SYNRG
  Gene Name: synergin, gamma
  ENSP ID: ENSP00000488863
  MOD_RES (1)..(1): Any amino acid

SEQ ID NO: 85866 - protein, 40 aa, Homo sapiens
  Payload ID: 17056
  Gene Symbol: SYNJ2BP-COX16
  Gene Name: SYNJ2BP-COX16 readthrough
  ENSP ID: ENSP00000477705
MNGRVDYLVTEEEINLTRGPSGKWPRPKEPAAPGCCRPLS

SEQ ID NO: 85867 - protein, 186 aa, Homo sapiens
  Payload ID: 17056
  Gene Symbol: SYNJ2BP-COX16
  Gene Name: SYNJ2BP-COX16 readthrough
  ENSP ID: ENSP00000478757
MNGRVDYLVTEEEINLTRGPSGLGFNIVGGTDQQYVSNDSGIYVSRIKENGAAALDGRLQEGDKILSVNGQDLKNLLHQDAVDLFRNAGYAVSLRVQHRLQVQNGPIGHRGEGDPSGIPIFMVLVPVFALTMMDPELEKKLKENKISLESEYEKIKDSKFDDWKNIRGPRPWEDPDLLQGRNPESL

SEQ ID NO: 85868 - protein, 53 aa, Homo sapiens
  Payload ID: 17056
  Gene Symbol: SYNJ2BP-COX16
  Gene Name: SYNJ2BP-COX16 readthrough
  ENSP ID: ENSP00000480746
MDPELEKKLKENKISLESEYEKIKDSKFDDWKNIRGPRPWEDPDLLQGRNPES

SEQ ID NO: 85869 - protein, 182 aa, Homo sapiens
  Payload ID: 17056
  Gene Symbol: SYNJ2BP-COX16
  Gene Name: SYNJ2BP-COX16 readthrough
  ENSP ID: ENSP00000482133
MNGRVDYLVTEEEINLTRGPSGLGFNIVGGTDQQYVSNDSGIYVSRIKENGAAALDGRLQEGDKILSVNGQDLKNLLHQDAVDLFRNAGYAVSLRVQHRLLIVGGSFGLREFSQIRYDAVKSKMDPELEKKLKENKISLESEYEKIKDSKFDDWKNIRGPRPWEDPDLLQGRNPESLKTKTT

SEQ ID NO: 85870 - protein, 152 aa, Homo sapiens
  Payload ID: 17056
  Gene Symbol: SYNJ2BP-COX16
  Gene Name: SYNJ2BP-COX16 readthrough
  ENSP ID: ENSP00000484161
MNGRVDYLVTEEEINLTRGPSGLGFNIVGGTDQQYVSNDSGIYVSRIKENGAAALDGRLQEGDKILSVNGQDLKNLLHQDAVDLFRNAGYAVSLRVQHRMDPELEKKLKENKISLESEYEKIKDSKFDDWKNIRGPRPWEDPDLLQGRNPES

SEQ ID NO: 85871 - protein, 616 aa, Homo sapiens
  Payload ID: 17057
  Gene Symbol: SYVN1
  Gene Name: synovial apoptosis inhibitor 1, synoviolin
  Uniprot ID: Q86TM6
  ENSP ID: ENSP00000294256
MFRTAVMMAASLALTGAVVAHAYYLKHQFYPTVVYLTKSSPSMAVLYIQAFVLVFLLGKVMGKVFFGQLRAAEMEHLLERSWYAVTETCLAFTVFRDDFSPRFVALFTLLLFLKCFHWLAEDRVDFMERSPNISWLFHCRIVSLMFLLGILDFLFVSHAYHSILTRGASVQLVFGFEYAILMTMVLTIFIKYVLHSVDLQSENPWDNKAVYMLYTELFTGFIKVLLYMAFMTIMIKVHTFPLFAIRPMYLAMRQFKKAVTDAIMSRRAIRNMNTLYPDATPEELQAMDNVCIICREEMVTGAKRLPCNHIFHTSCLRSWFQRQQTCPTCRMDVLRASLPAQSPPPPEPADQGPPPAPHPPPLLPQPPNFPQGLLPPFPPGMFPLWPPMGPFPPVPPPPSSGEAVAPPSTSAALSRPSGAATTTAAGTSATAASATASGPGSGSAPEAGPAPGFPFPPPWMGMPLPPPFAFPPMPVPPAGFAGLTPEELRALEGHERQHLEARLQSLRNIHTLLDAAMLQINQYLTVLASLGPPRPATSVNSTEETATTVVAAASSTSIPSSEATTPTPGASPPAPEMERPPAPESVGTEEMPEDGEPDAAELRRRRLQKLESPVAH

SEQ ID NO: 85872 - protein, 565 aa, Homo sapiens
  Payload ID: 17057
  Gene Symbol: SYVN1
  Gene Name: synovial apoptosis inhibitor 1, synoviolin
  Uniprot ID: Q86TM6
  ENSP ID: ENSP00000302035
MFRTAVMMAASLALTGAVVAHAYYLKHQFYPTVVYLTKSSPSMAVLYIQAFVLVFLLGKVMGKVFFGQLRAAEMEHLLERSWYAVTETCLAFTVFRDDFSPRFVALFTLLLFLKCFHWLAEDRVDFYAILMTMVLTIFIKYVLHSVDLQSENPWDNKAVYMLYTELFTGFIKVLLYMAFMTIMIKVHTFPLFAIRPMYLAMRQFKKAVTDAIMSRRAIRNMNTLYPDATPEELQAMDNVCIICREEMVTGAKRLPCNHIFHTSCLRSWFQRQQTCPTCRMDVLRASLPAQSPPPPEPADQGPPPAPHPPPLLPQPPNFPQGLLPPFPPGMFPLWPPMGPFPPVPPPPSSGEAVAPPSTSAALSRPSGAATTTAAGTSATAASATASGPGSGSAPEAGPAPGFPFPPPWMGMPLPPPFAFPPMPVPPAGFAGLTPEELRALEGHERQHLEARLQSLRNIHTLLDAAMLQINQYLTVLASLGPPRPATSVNSTEETATTVVAAASSTSIPSSEATTPTPGASPPAPEMERPPAPESVGTEEMPEDGEPDAAELRRRRLQKLESPVAH

SEQ ID NO: 85873 - protein, 617 aa, Homo sapiens
  Payload ID: 17057
  Gene Symbol: SYVN1
  Gene Name: synovial apoptosis inhibitor 1, synoviolin
  Uniprot ID: Q86TM6
  ENSP ID: ENSP00000366395
MFRTAVMMAASLALTGAVVAHAYYLKHQFYPTVVYLTKSSPSMAVLYIQAFVLVFLLGKVMGKVFFGQLRAAEMEHLLERSWYAVTETCLAFTVFRDDFSPRFVALFTLLLFLKCFHWLAEDRVDFMERSPNISWLFHCRIVSLMFLLGILDFLFVSHAYHSILTRGASVQLVFGFEYAILMTMVLTIFIKYVLHSVDLQSENPWDNKAVYMLYTELFTGFIKVLLYMAFMTIMIKVHTFPLFAIRPMYLAMRQFKKAVTDAIMSRRAIRNMNTLYPDATPEELQAMDNVCIICREEMVTGAKRLPCNHIFHTSCLRSWFQRQQTCPTCRMDVLRASLPAQSPPPPEPADQGPPPAPHPPPLLPQPPNFPQGLLPPFPPGMFPLWPPMGPFPPVPPPPSSGEAVAPPSTSAAALSRPSGAATTTAAGTSATAASATASGPGSGSAPEAGPAPGFPFPPPWMGMPLPPPFAFPPMPVPPAGFAGLTPEELRALEGHERQHLEARLQSLRNIHTLLDAAMLQINQYLTVLASLGPPRPATSVNSTEETATTVVAAASSTSIPSSEATTPTPGASPPAPEMERPPAPESVGTEEMPEDGEPDAAELRRRRLQKLESPVAH

SEQ ID NO: 85874 - protein, 236 aa, Homo sapiens
  Payload ID: 17057
  Gene Symbol: SYVN1
  Gene Name: synovial apoptosis inhibitor 1, synoviolin
  ENSP ID: ENSP00000431215
MGKVFFGQLRAAEMEHLLERSWYAVTETCLAFTVFRDDFSPRFVALFTLLLFLKCFHWLAEDRVDFMERSPNISWLFHCRIVSLMFLLGILDFLFVSHAYHSILTRGASVQLVFGFEYAILMTMVLTIFIKYVLHSVDLQSENPWDNKAVYMLYTELFTGFIKVLLYMAFMTIMIKVHTFPLFAIRPMYLAMRQFKKAVTDAIMSRRAIRNMNTLYPDATPEELQAMDNVCIICRE

SEQ ID NO: 85875 - protein, 237 aa, Homo sapiens
  Payload ID: 17057
  Gene Symbol: SYVN1
  Gene Name: synovial apoptosis inhibitor 1, synoviolin
  ENSP ID: ENSP00000431720
MFRTAVMMAASLALTGAVVAHAYYLKHQFYPTVVYLTKSSPSMAVMGKVFFGQLRAAEMEHLLERSWYAVTETCLAFTVFRDDFSPRFVALFTLLLFLKCFHWLAEDRVDFMERSPNISWLFHCRIVSLMFLLGILDFLFVSHAYHSILTRGASVQLVFGFEYAILMTMVLTIFIKYVLHSVDLQSENPWDNKAVYMLYTELFTGFIKVLLYMAFMTIMIKVHTFPLFAIRPMYLAM

SEQ ID NO: 85876 - protein, 149 aa, Homo sapiens
  Payload ID: 17057
  Gene Symbol: SYVN1
  Gene Name: synovial apoptosis inhibitor 1, synoviolin
  ENSP ID: ENSP00000432166
  MOD_RES (1)..(1): Any amino acid
XVAHAYYLKHQFYPTVVYLTKSSPSMAVLYIQAFVLVFLLGKVMGKVFFGQLRAAEMEHLLERSWYAVTETCLAFTVFRDDFSPRFVALFTLLLFLKCFHWLAEDRVDFMERSPNISWLFHCRIVLCHPDDDGAHHLHQVCAALRGPPE

SEQ ID NO: 85877 - protein, 149 aa, Homo sapiens
  Payload ID: 17057
  Gene Symbol: SYVN1
  Gene Name: synovial apoptosis inhibitor 1, synoviolin
  ENSP ID: ENSP00000432888
MFRTAVMMAASLALTGAVVAHAYYLKHQFYPTVVYLTKSSPSMAVLYIQAFVLVFLLGKVMGKVFFGQLRAAEMEHLLERSWYAVTETCLAFTVFRDDFSPRFVALFTLLLFLKCFHWLAEDRVDFMERSPNISWLFHCRIVSTPITAS

SEQ ID NO: 85878 - protein, 616 aa, Homo sapiens; identical to SEQ ID NO: 85871
  Payload ID: 17057
  Gene Symbol: SYVN1
  Gene Name: synovial apoptosis inhibitor 1, synoviolin
  Uniprot ID: Q86TM6
  ENSP ID: ENSP00000436984

SEQ ID NO: 85879 - protein, 396 aa, Homo sapiens
  Payload ID: 17058
  Gene Symbol: SS18L1
  Gene Name: synovial sarcoma translocation gene on chromosome 18-like 1
  Uniprot ID: O75177
  ENSP ID: ENSP00000333012
MSVAFASARPRGKGEVTQQTIQKMLDENHHLIQCILEYQSKGKTAECTQYQQILHRNLVYLATIADSNQNMQSLLPAPPTQNMNLGPGALTQSGSSQGLHSQGSLSDAISTGLPPSSLLQGQIGNGPSHVSMQQTAPNTLPTTSMSISGPGYSHAGPASQGVPMQGQGTIGNYVSRTNINMQSNPVSMMQQQAATSHYSSAQGGSQHYQGQSSIAMMGQGSQGSSMMGQRPMAPYRPSQQGSSQQYLGQEEYYGEQYSHSQGAAEPMGQQYYPDGHGDYAYQQSSYTEQSYDRSFEESTQHYYEGGNSQYSQQQAGYQQGAAQQQTYSQQQYPSQQSYPGQQQGYGSAQGAPSQYPGYQQGQGQQYGSYRAPQTAPSAQQQRPYGYEQGQYGNYQQ

SEQ ID NO: 85880 - protein, 314 aa, Homo sapiens
  Payload ID: 17058
  Gene Symbol: SS18L1
  Gene Name: synovial sarcoma translocation gene on chromosome 18-like 1
  Uniprot ID: O75177
  ENSP ID: ENSP00000359885
MNLGPGALTQSGSSQGLHSQGSLSDAISTGLPPSSLLQGQIGNGPSHVSMQQTAPNTLPTTSMSISGPGYSHAGPASQGVPMQGQGTIGNYVSRTNINMQSNPVSMMQQQAATSHYSSAQGGSQHYQGQSSIAMMGQGSQGSSMMGQRPMAPYRPSQQGSSQQYLGQEEYYGEQYSHSQGAAEPMGQQYYPDGHGDYAYQQSSYTEQSYDRSFEESTQHYYEGGNSQYSQQQAGYQQGAAQQQTYSQQQYPSQQSYPGQQQGYGSAQGAPSQYPGYQQGQGQQYGSYRAPQTAPSAQQQRPYGYEQGQYGNYQQ

SEQ ID NO: 85881 - protein, 128 aa, Homo sapiens
  Payload ID: 17058
  Gene Symbol: SS18L1
  Gene Name: synovial sarcoma translocation gene on chromosome 18-like 1
  ENSP ID: ENSP00000398634
MQSLSTEARYVPRVPQHRDQISPRSPQHGGQICPRSPLHRGQICPRSPPARRYQQILHRNLVYLATIADSNQNMQSLLPAPPTQNMNLGPGALTQSGSSQGLHSQGSLSDAISTGLPPSSLLQGQIGN

SEQ ID NO: 85882 - protein, 211 aa, Homo sapiens
  Payload ID: 17058
  Gene Symbol: SS18L1
  Gene Name: synovial sarcoma translocation gene on chromosome 18-like 1
  ENSP ID: ENSP00000434451
  MOD_RES (1)..(1): Any amino acid
XSMMQQQAATSHYSSAQGGSQHYQGQSSIAMMGQGSQGSSMMGQRPMAPYRPSQQGSSQQYLGQEEYYGEQYSHSQGAAEPMGQQYYPDGHGDYAYQQSSYTEQSYDRSFEESTQHYYEGGNSQYSQQQAGYQQGAAQQQTYSQQQYPSQQSYPGQQQGYGSAQGAPSQYPGYQQGQGQQYGSYRAPQTAPSAQQQRPYGYEQGQYGNYQQ

SEQ ID NO: 85883 - protein, 77 aa, Homo sapiens
  Payload ID: 17059
  Gene Symbol: SS18L2
  Gene Name: synovial sarcoma translocation gene on chromosome 18-like 2
  Uniprot ID: Q9UHA2
  ENSP ID: ENSP00000011691
MSVAFVPDWLRGKAEVNQETIQRLLEENDQLIRCIVEYQNKGRGNECVQYQHVLHRNLIYLATIADASPTSTSKAME

SEQ ID NO: 85884 - protein, 77 aa, Homo sapiens; identical to SEQ ID NO: 85883
  Payload ID: 17059
  Gene Symbol: SS18L2
  Gene Name: synovial sarcoma translocation gene on chromosome 18-like 2
  Uniprot ID: Q9UHA2
  ENSP ID: ENSP00000401115

SEQ ID NO: 85885 - protein, 387 aa, Homo sapiens
  Payload ID: 17060
  Gene Symbol: SS18
  Gene Name: synovial sarcoma translocation, chromosome 18
  Uniprot ID: Q15532
  ENSP ID: ENSP00000269137
MSVAFAAPRQRGKGEITPAAIQKMLDDNNHLIQCIMDSQNKGKTSECSQYQQMLHTNLVYLATIADSNQNMQSLLPAPPTQNMPMGPGGMNQSGPPPPPRSHNMPSDGMVGGGPPAPHMQNQMNGQMPGPNHMPMQGPGPNQLNMTNSSMNMPSSSHGSMGGYNHSVPSSQSMPVQNQMTMSQGQPMGNYGPRPNMSMQPNQGPMMHQQPPSQQYNMPQGGGQHYQGQQPPMGMMGQVNQGNHMMGQRQIPPYRPPQQGPPQQYSGQEDYYGDQYSHGGQGPPEGMNQQYYPDGNSQYGQQQDAYQGPPPQQGYPPQQQQYPGQQGYPGQQQGYGPSQGGPGPQYPNYPQGQGQQYGGYRPTQPGPPQPPQQRPYGYDQGQYGNYQQ

SEQ ID NO: 85886 - protein, 61 aa, Homo sapiens
  Payload ID: 17060
  Gene Symbol: SS18
  Gene Name: synovial sarcoma translocation, chromosome 18
  ENSP ID: ENSP00000269138
MSVAFAAPRQRGKGEITPAAIQKMLDDNNHLIQCIMDSQNKGKTSECSHHPHRICLWVLEG

SEQ ID NO: 85887 - protein, 418 aa, Homo sapiens
  Payload ID: 17060
  Gene Symbol: SS18
  Gene Name: synovial sarcoma translocation, chromosome 18
  Uniprot ID: Q15532
  ENSP ID: ENSP00000414516
MSVAFAAPRQRGKGEITPAAIQKMLDDNNHLIQCIMDSQNKGKTSECSQYQQMLHTNLVYLATIADSNQNMQSLLPAPPTQNMPMGPGGMNQSGPPPPPRSHNMPSDGMVGGGPPAPHMQNQMNGQMPGPNHMPMQGPGPNQLNMTNSSMNMPSSSHGSMGGYNHSVPSSQSMPVQNQMTMSQGQPMGNYGPRPNMSMQPNQGPMMHQQPPSQQYNMPQGGGQHYQGQQPPMGMMGQVNQGNHMMGQRQIPPYRPPQQGPPQQYSGQEDYYGDQYSHGGQGPPEGMNQQYYPDGHNDYGYQQPSYPEQGYDRPYEDSSQHYYEGGNSQYGQQQDAYQGPPPQQGYPPQQQQYPGQQGYPGQQQGYGPSQGGPGPQYPNYPQGQGQQYGGYRPTQPGPPQPPQQRPYGYDQGQYGNYQQ

SEQ ID NO: 85888 - protein, 395 aa, Homo sapiens
  Payload ID: 17060
  Gene Symbol: SS18
  Gene Name: synovial sarcoma translocation, chromosome 18
  ENSP ID: ENSP00000438066
MLDDNNHLIQCIMDSQNKGKTSECSQYQQMLHTNLVYLATIADSNQNMQSLLPAPPTQNMPMGPGGMNQSGPPPPPRSHNMPSDGMVGGGPPAPHMQNQMNGQMPGPNHMPMQGPGPNQLNMTNSSMNMPSSSHGSMGGYNHSVPSSQSMPVQNQMTMSQGQPMGNYGPRPNMSMQPNQGPMMHQQPPSQQYNMPQGGGQHYQGQQPPMGMMGQVNQGNHMMGQRQIPPYRPPQQGPPQQYSGQEDYYGDQYSHGGQGPPEGMNQQYYPDGHNDYGYQQPSYPEQGYDRPYEDSSQHYYEGGNSQYGQQQDAYQGPPPQQGYPPQQQQYPGQQGYPGQQQGYGPSQGGPGPQYPNYPQGQGQQYGGYRPTQPGPPQPPQQRPYGYDQGQYGNYQQ

SEQ ID NO: 85889 - protein, 41 aa, Homo sapiens
  Payload ID: 17060
  Gene Symbol: SS18
  Gene Name: synovial sarcoma translocation, chromosome 18
  ENSP ID: ENSP00000441760
MSVAFAAPRQRGKGEITPAAIQKVSADVAHKLGIPCYNSRF

SEQ ID NO: 85890 - protein, 58 aa, Homo sapiens
  Payload ID: 17060
  Gene Symbol: SS18
  Gene Name: synovial sarcoma translocation, chromosome 18
  ENSP ID: ENSP00000462104
MSVAFAAPRQRGKGEITPAAIQKMLDDNNHLIQCIMDSQNKGKTSECSQVSPNYSRVA

SEQ ID NO: 85891 - protein, 58 aa, Homo sapiens; identical to SEQ ID NO: 85890
  Payload ID: 17060
  Gene Symbol: SS18
  Gene Name: synovial sarcoma translocation, chromosome 18
  ENSP ID: ENSP00000462363

SEQ ID NO: 85892 - protein, 152 aa, Homo sapiens
  Payload ID: 17060
  Gene Symbol: SS18
  Gene Name: synovial sarcoma translocation, chromosome 18
  ENSP ID: ENSP00000462766
MLDDNNHLIQCIMDSQNKGKTSECSQYQQMLHTNLVYLATIADSNQNMQSLLPAPPTQNMPMGPGGMNQSGPPPPPRSHNMPSDGMVGGGPPAPHMQNQMNGQMPGPNHMPMQGPGPNQLNMTNSSMNMPSSSHGSMGGYNHSVPSSQSMPV

SEQ ID NO: 85893 - protein, 84 aa, Homo sapiens
  Payload ID: 17060
  Gene Symbol: SS18
  Gene Name: synovial sarcoma translocation, chromosome 18
  ENSP ID: ENSP00000462838
MSVAFAAPRQRGKGEITPAAIQKMLDDNNHLIQCIMDSQNKGKTSECSQVMNKPHLLVWFGQWSSENLMSCNHTNTQAKENLKA

SEQ ID NO: 85894 - protein, 70 aa, Homo sapiens
  Payload ID: 17060
  Gene Symbol: SS18
  Gene Name: synovial sarcoma translocation, chromosome 18
  ENSP ID: ENSP00000463586
MLDDNNHLIQCIMDSQNKGKTSECSQYQQMLHTNLVYLATIADSNQNMQSLLPAPPTQNMPMGPGGMNQS

SEQ ID NO: 85895 - protein, 68 aa, Homo sapiens
  Payload ID: 17060
  Gene Symbol: SS18
  Gene Name: synovial sarcoma translocation, chromosome 18
  ENSP ID: ENSP00000463802
MSVAFAAPRQRGKGEITPAAIQKMLDDNNHLIQCIMDSQNKGKTSECSHWRLPIHCLLYMLCPDRWVV

SEQ ID NO: 85896 - protein, 94 aa, Homo sapiens
  Payload ID: 17060
  Gene Symbol: SS18
  Gene Name: synovial sarcoma translocation, chromosome 18
  ENSP ID: ENSP00000463928
MSVAFAAPRQRGKGEITPAAIQKMLDDNNHLIQCIMDSQNKGKTSECSHTKIGWTWWWIPVIPTAWEAEAGESLEPGRRRLQVSQDRTTALQPS

SEQ ID NO: 85897 - protein, 55 aa, Homo sapiens
  Payload ID: 17060
  Gene Symbol: SS18
  Gene Name: synovial sarcoma translocation, chromosome 18
  ENSP ID: ENSP00000463933
MLDDNNHLIQCIMDSQNKGKTSECSQYQQMLHTNLVYLATIADSNQNMQSLLPAV

SEQ ID NO: 85898 - protein, 130 aa, Homo sapiens
  Payload ID: 17060
  Gene Symbol: SS18
  Gene Name: synovial sarcoma translocation, chromosome 18
  ENSP ID: ENSP00000463943
MLDDNNHLIQCIMDSQNKGKTSECSQYQQMLHTNLVYLATIADSNQNMQSLLPAPPTQNMPMGPGGMNQSGPPPPPRSHNMPSDGMVGGGPPAPHMQNQMNGQMPGPNHMPMQGPGPNQLNMTNSSMNMP

SEQ ID NO: 85899 - protein, 60 aa, Homo sapiens
  Payload ID: 17060
  Gene Symbol: SS18
  Gene Name: synovial sarcoma translocation, chromosome 18
  ENSP ID: ENSP00000464049
MSVAFAAPRQRGKGEITPAAIQKMLDDNNHLIQCIMDSQNKGKTSECSQSGQWEPLKLAS

SEQ ID NO: 85900 - protein, 60 aa, Homo sapiens; identical to SEQ ID NO: 85899
  Payload ID: 17060
  Gene Symbol: SS18
  Gene Name: synovial sarcoma translocation, chromosome 18
  ENSP ID: ENSP00000464556

SEQ ID NO: 85901 - protein, 35 aa, Homo sapiens
  Payload ID: 17060
  Gene Symbol: SS18
  Gene Name: synovial sarcoma translocation, chromosome 18
  ENSP ID: ENSP00000464609
MLDDNNHLIQCIMDSQNKGKTSECSQVSPNYSRVA

SEQ ID NO: 85902 - protein, 60 aa, Homo sapiens; identical to SEQ ID NO: 85899
  Payload ID: 17060
  Gene Symbol: SS18
  Gene Name: synovial sarcoma translocation, chromosome 18
  ENSP ID: ENSP00000464664

SEQ ID NO: 85903 - protein, 45 aa, Homo sapiens
  Payload ID: 17060
  Gene Symbol: SS18
  Gene Name: synovial sarcoma translocation, chromosome 18
  ENSP ID: ENSP00000464673
MLDDNNHLIQCIMDSQNKGKTSECSHWRLPIHCLLYMLCPDRWVV

SEQ ID NO: 85904 - protein, 188 aa, Homo sapiens
  Payload ID: 17061
  Gene Symbol: SSX1
  Gene Name: synovial sarcoma, X breakpoint 1
  Uniprot ID: Q16384
  ENSP ID: ENSP00000366118
MNGDDTFAKRPRDDAKASEKRSKAFDDIATYFSKKEWKKMKYSEKISYVYMKRNYKAMTKLGFKVTLPPFMCNKQATDFQGNDFDNDHNRRIQVEHPQMTFGRLHRIIPKIMPKKPAEDENDSKGVSEASGPQNDGKQLHPPGKANISEKINKRSGPKRGKHAWTHRLRERKQLVIYEEISDPEEDDE

SEQ ID NO: 85905 - protein, 188 aa, Homo sapiens
  Payload ID: 17062
  Gene Symbol: SSX2
  Gene Name: synovial sarcoma, X breakpoint 2
  Uniprot ID: Q16385
  ENSP ID: ENSP00000338561
MNGDDAFARRPTVGAQIPEKIQKAFDDIAKYFSKEEWEKMKASEKIFYVYMKRKYEAMTKLGFKATLPPFMCNKRAEDFQGNDLDNDPNRGNQVERPQMTFGRLQGISPKIMPKKPAEEGNDSEEVPEASGPQNDGKELCPPGKPTTSEKIHERSGPKRGEHAWTHRLRERKQLVIYEEISDPEEDDE

SEQ ID NO: 85906 - protein, 223 aa, Homo sapiens
  Payload ID: 17062
  Gene Symbol: SSX2
  Gene Name: synovial sarcoma, X breakpoint 2
  Uniprot ID: Q16385
  ENSP ID: ENSP00000338796
MNGDDAFARRPTVGAQIPEKIQKAFDDIAKYFSKEEWEKMKASEKIFYVYMKRKYEAMTKLGFKATLPPFMCNKRAEDFQGNDLDNDPNRGNQVERPQMTFGRLQGISPKIMPKKPAEEGNDSEEVPEASGPQNDGKELCPPGKPTTSEKIHERSGNREAQEKEERRGTAHRWSSQNTHNIGRFSLSTSMGAVHGTPKTITHNRDPKGGNMPGPTDCVRENSW

SEQ ID NO: 85907 - protein, 188 aa, Homo sapiens
  Payload ID: 17062
  Gene Symbol: SSX2
  Gene Name: synovial sarcoma, X breakpoint 2
  ENSP ID: ENSP00000479759
MNGDDAFARRPTVGAQIPEKIQKAFDDIAKYFSKEEWEKMKASEKIFYVYMKRKYEAMTKLGFKATLPPFMCNKRAEDFQGNDLDNDPNRGNQVERPQMTFGRLQGISPKIMPKKPAEEGNDSKGVPEASGSQNDGKHLCPPGKPSTSEKINKTSGPKRGKHAWTHRLRERKQLVIYEEISDPEEDDE

SEQ ID NO: 85908 - protein, 614 aa, Homo sapiens
  Payload ID: 17063
  Gene Symbol: SSX2IP
  Gene Name: synovial sarcoma, X breakpoint 2 interacting protein
  Uniprot ID: Q9Y2D8
  ENSP ID: ENSP00000340279
MGDWMTVTDPGLSSESKTISQYTSETKMSPSSLYSQQVLCSSIPLSKNVHSFFSAFCTEDNIEQSISYLDQELTTFGFPSLYEESKGKETKRELNIVAVLNCMNELLVLQRKNLLAQENVETQNLKLGSDMDHLQSCYSKLKEQLETSRREMIGLQERDRQLQCKNRNLHQLLKNEKDEVQKLQNIIASRATQYNHDMKRKEREYNKLKERLHQLVMNKKDKKIAMDILNYVGRADGKRGSWRTGKTEARNEDEMYKILLNDYEYRQKQILMENAELKKVLQQMKKEMISLLSPQKKKPRERVDDSTGTVISDVEEDAGELSRESMWDLSCETVREQLTNSIRKQWRILKSHVEKLDNQVSKVHLEGFNDEDVISRQDHEQETEKLELEIQQCKEMIKTQQQLLQQQLATAYDDDTTSLLRDCYLLEEKERLKEEWSLFKEQKKNFERERRSFTEAAIRLGLERKAFEEERASWLKQQFLNMTTFDHQNSENVKLFSAFSGSSDWDNLIVHSRQPQKKPHSVSNGSPVCMSKLTKSLPASPSTSDFCQTRSCISEHSSINVLNITAEEIKPNQVGGECTNQKWSVASRPGSQEGCYSGCSLSYTNSHVEKDDLP

SEQ ID NO: 85909 - protein, 587 aa, Homo sapiens
  Payload ID: 17063
  Gene Symbol: SSX2IP
  Gene Name: synovial sarcoma, X breakpoint 2 interacting protein
  Uniprot ID: Q9Y2D8
  ENSP ID: ENSP00000412781
MSPSSLYSQQVLCSSIPLSKNVHSFFSAFCTEDNIEQSISYLDQELTTFGFPSLYEESKGKETKRELNIVAVLNCMNELLVLQRKNLLAQENVETQNLKLGSDMDHLQSCYSKLKEQLETSRREMIGLQERDRQLQCKNRNLHQLLKNEKDEVQKLQNIIASRATQYNHDMKRKEREYNKLKERLHQLVMNKKDKKIAMDILNYVGRADGKRGSWRTGKTEARNEDEMYKILLNDYEYRQKQILMENAELKKVLQQMKKEMISLLSPQKKKPRERVDDSTGTVISDVEEDAGELSRESMWDLSCETVREQLTNSIRKQWRILKSHVEKLDNQVSKVHLEGFNDEDVISRQDHEQETEKLELEIQQCKEMIKTQQQLLQQQLATAYDDDTTSLLRDCYLLEEKERLKEEWSLFKEQKKNFERERRSFTEAAIRLGLERKAFEEERASWLKQQFLNMTTFDHQNSENVKLFSAFSGSSDWDNLIVHSRQPQKKPHSVSNGSPVCMSKLTKSLPASPSTSDFCQTRSCISEHSSINVLNITAEEIKPNQVGGECTNQKWSVASRPGSQEGCYSGCSLSYTNSHVEKDDLP

SEQ ID NO: 85910 - protein, 180 aa, Homo sapiens
  Payload ID: 17063
  Gene Symbol: SSX2IP
  Gene Name: synovial sarcoma, X breakpoint 2 interacting protein
  ENSP ID: ENSP00000416067
MGDWMTVTDPGLSSESKTISQYTSETKMSPSSLYSQQVLCSSIPLSKNVHSFFSAFCTEDNIEQSISYLDQELTTFGFPSLYEESKGKETKRELNIVAVLNCMNELLVLQRKNLLAQENVETQNLKLGSDMDHLQSCYSKLKEQLETSRREMIGLQERDRQLQCKNRNLHQLLKNEKDEV

SEQ ID NO: 85911 - protein, 560 aa, Homo sapiens
  Payload ID: 17063
  Gene Symbol: SSX2IP
  Gene Name: synovial sarcoma, X breakpoint 2 interacting protein
  Uniprot ID: Q9Y2D8
  ENSP ID: ENSP00000432261
MGDWMTVTDPGLSSESKTISQYTSETKMSPSSLYSQQVLCSSIPLSKNVHSFFSAFCTEDNIEQSISYLDQELTTFGFPSLYEESKGKETKRELNIVAVLNCMNELLVLQRKNLLAQENVETQNLKLGSDMDHLQSCYSKLKEQLETSRREMIGLQERDRQLQCKNRNLHQLLKNEKDEVQKLQNIIASRATQYNHDMKRKEREYNKLKERLHQLVMNKKDKKIAMDILNYVGRADGKRGSWRTGKTEARNEDEMYKILLNDYEYRQKQILMENAELKKVLQQMKKEMISLLSPQKKKPRERVDDSTGTVISDVEEDAGELSRESMWDLSCETVREQLTNSIRKQWRILKSHVEKLDNQVSKVHLEGFNDEDVISRQDHEQETEKLELEIQQCKEMIKTQQQLLQQQLATAYDDDTTSLLRDCYLLEEKERLKEEWSLFKEQKKNFERERRSFTEAAIRLGLERKAFEEERASWLKQQFLNMTTFDHQNSENVKLFSAFSGSSDWDNLIVHSRQPQKKPHSVSNGSPVCMSKLTKSLPASPSTSDFCQTRSCISEHRAKN

SEQ ID NO: 85912 - protein, 87 aa, Homo sapiens
  Payload ID: 17063
  Gene Symbol: SSX2IP
  Gene Name: synovial sarcoma, X breakpoint 2 interacting protein
  ENSP ID: ENSP00000473763
MTTFDHQNSENVKLFSAFSGSSDWDNLIVHSRQPQKKPHSVSNGSPVCMSKLTKSLPASPSTSDFCQTRSCISEHRYLSIGDLFTCF

SEQ ID NO: 85913 - protein, 587 aa, Homo sapiens; identical to SEQ ID NO: 85909
  Payload ID: 17063
  Gene Symbol: SSX2IP
  Gene Name: synovial sarcoma, X breakpoint 2 interacting protein
  Uniprot ID: Q9Y2D8
  ENSP ID: ENSP00000474480

SEQ ID NO: 85914 - protein, 504 aa, Homo sapiens
  Payload ID: 17063
  Gene Symbol: SSX2IP
  Gene Name: synovial sarcoma, X breakpoint 2 interacting protein
  ENSP ID: ENSP00000474925
MGDWMTVTDPESKTISQYTSETKMSPSSLYSQQVLCSSIPLSKNVHSFFSAFCTEDNIEQSISYLDQELTTFGFPSLYEESKGKETKRELNIVAVLNCMNELLVLQRKNLLAQENVETQNLKLGSDMDHLQSCYSKLKEQLETSRREMIGLQERDRQLQCKNRNLHQLLKNEKDEVQKLQNIIASRATQYNHDMKRKEREYNKLKERLHQLVMNKKDKKIAMDILNYVGRADGKRGSWRTGKTEARNEDEMYKILLNDYEYRQKQILMENAELKKVLQQMKKEMISLLSPQKKKPRERVDDSTGTVISDVEEDAGELSRESMWDLSCETVREQLTNSIRKQWRILKSHVEKLDNQVSKVHLEGFNDEDVISRQDHEQETEKLELEIQQCKEMIKTQQQLLQQQLATAYDDDTTSLLRDCYLLEEKERLKEEWSLFKEQKKNFERERRSFTEAAIRLGLEIGFLLLSVLHKKSLLGIHHSSTVSRCGVRRQCNQDYICCLKKKGI

SEQ ID NO: 85915 - protein, 188 aa, Homo sapiens; identical to SEQ ID NO: 85905
  Payload ID: 17064
  Gene Symbol: SSX2B
  Gene Name: synovial sarcoma, X breakpoint 2B
  Uniprot ID: Q16385
  ENSP ID: ENSP00000470740

SEQ ID NO: 85916 - protein, 223 aa, Homo sapiens; identical to SEQ ID NO: 85906
  Payload ID: 17064
  Gene Symbol: SSX2B
  Gene Name: synovial sarcoma, X breakpoint 2B
  Uniprot ID: Q16385
  ENSP ID: ENSP00000477922

SEQ ID NO: 85917 - protein, 188 aa, Homo sapiens; identical to SEQ ID NO: 85905
  Payload ID: 17064
  Gene Symbol: SSX2B
  Gene Name: synovial sarcoma, X breakpoint 2B
  Uniprot ID: Q16385
  ENSP ID: ENSP00000478714

SEQ ID NO: 85918 - protein, 188 aa, Homo sapiens
  Payload ID: 17065
  Gene Symbol: SSX3
  Gene Name: synovial sarcoma, X breakpoint 3
  Uniprot ID: Q99909
  ENSP ID: ENSP00000298396
MNGDDTFARRPTVGAQIPEKIQKAFDDIAKYFSKEEWEKMKVSEKIVYVYMKRKYEAMTKLGFKAILPSFMRNKRVTDFQGNDFDNDPNRGNQVQRPQMTFGRLQGIFPKIMPKKPAEEGNVSKEVPEASGPQNDGKQLCPPGKPTTSEKINMISGPKRGEHAWTHRLRERKQLVIYEEISDPEEDDE

SEQ ID NO: 85919 - protein, 170 aa, Homo sapiens
  Payload ID: 17065
  Gene Symbol: SSX3
  Gene Name: synovial sarcoma, X breakpoint 3
  Uniprot ID: Q99909
  ENSP ID: ENSP00000366090
MNGDDTFARRPTVGAQIPEKIQKAFDDIAKYFSKEEWEKMKVSEKIVYVYMKRKYEAMTKLGFKAILPSFMRNKRVTDFQGNDFDNDPNRGNQVQRPQMTFGRLQGIFPKIMPKKPAEEGNVSKEVPEASGPQNDGKQLCPPGKPTTSEKINMISGVLQRYCRFGSRPLQ

SEQ ID NO: 85920 - protein, 202 aa, Homo sapiens
  Payload ID: 17065
  Gene Symbol: SSX3
  Gene Name: synovial sarcoma, X breakpoint 3
  ENSP ID: ENSP00000480427
MNGDDTFARRPTVGAQIPEKIQKAFDDIAKYFSKEEWEKMKVSEKIVYVYMKRKYEAMTKLGFKAILPSFMRNKRVTDFQGNDFDNDPNRGNQVQRPQMTFGRLQGIFPKIMPKKPAEEGNVSKEVPEASGPQNDGKQLCPPGKPTTSEKINMISGKRKQFRNNPTGFPGDVQVCGLGVWHGSQITLGPGWAEELAQLQMRC

SEQ ID NO: 85921 - protein, 188 aa, Homo sapiens
  Payload ID: 17066
  Gene Symbol: SSX4
  Gene Name: synovial sarcoma, X breakpoint 4
  Uniprot ID: O60224
  ENSP ID: ENSP00000469011
MNGDDAFARRPRDDAQISEKLRKAFDDIAKYFSKKEWEKMKSSEKIVYVYMKLNYEVMTKLGFKVTLPPFMRSKRAADFHGNDFGNDRNHRNQVERPQMTFGSLQRIFPKIMPKKPAEEENGLKEVPEASGPQNDGKQLCPPGNPSTLEKINKTSGPKRGKHAWTHRLRERKQLVVYEEISDPEEDDE

SEQ ID NO: 85922 - protein, 153 aa, Homo sapiens
  Payload ID: 17066
  Gene Symbol: SSX4
  Gene Name: synovial sarcoma, X breakpoint 4
  Uniprot ID: O60224
  ENSP ID: ENSP00000483262
MNGDDAFARRPRDDAQISEKLRKAFDDIAKYFSKKEWEKMKSSEKIVYVYMKLNYEVMTKLGFKVTLPPFMRSKRAADFHGNDFGNDRNHRNQVERPQMTFGSLQRIFPKDPKGGNMPGPTDCVRESSWWFMKRSATLRKMTSNSPRGYDTCP

SEQ ID NO: 85923 - protein, 188 aa, Homo sapiens; identical to SEQ ID NO: 85921
  Payload ID: 17067
  Gene Symbol: SSX4B
  Gene Name: synovial sarcoma, X breakpoint 4B
  Uniprot ID: O60224
  ENSP ID: ENSP00000469394

SEQ ID NO: 85924 - protein, 153 aa, Homo sapiens; identical to SEQ ID NO: 85922
  Payload ID: 17067
  Gene Symbol: SSX4B
  Gene Name: synovial sarcoma, X breakpoint 4B
  Uniprot ID: O60224
  ENSP ID: ENSP00000481765

SEQ ID NO: 85925 - protein, 188 aa, Homo sapiens
  Payload ID: 17068
  Gene Symbol: SSX5
  Gene Name: synovial sarcoma, X breakpoint 5
  Uniprot ID: O60225
  ENSP ID: ENSP00000290558
MNGDDAFVRRPRVGSQIPEKMQKAFDDIAKYFSEKEWEKMKASEKIIYVYMKRKYEAMTKLGFKATLPPFMRNKRVADFQGNDFDNDPNRGNQVEHPQMTFGRLQGIFPKITPEKPAEEGNDSKGVPEASGPQNNGKQLRPSGKLNTSEKVNKTSGPKRGKHAWTHRVRERKQLVIYEEISDPQEDDE

SEQ ID NO: 85926 - protein, 229 aa, Homo sapiens
  Payload ID: 17068
  Gene Symbol: SSX5
  Gene Name: synovial sarcoma, X breakpoint 5
  Uniprot ID: O60225
  ENSP ID: ENSP00000312415
MNGDDAFVRRPRVGSQIPEKMQKHPWRQVCDRGIHLVNLSPFWKVGREPASSIKALLCGRGEARAFDDIAKYFSEKEWEKMKASEKIIYVYMKRKYEAMTKLGFKATLPPFMRNKRVADFQGNDFDNDPNRGNQVEHPQMTFGRLQGIFPKITPEKPAEEGNDSKGVPEASGPQNNGKQLRPSGKLNTSEKVNKTSGPKRGKHAWTHRVRERKQLVIYEEISDPQEDDE

SEQ ID NO: 85927 - protein, 188 aa, Homo sapiens; identical to SEQ ID NO: 85925
  Payload ID: 17068
  Gene Symbol: SSX5
  Gene Name: synovial sarcoma, X breakpoint 5
  Uniprot ID: O60225
  ENSP ID: ENSP00000366122

SEQ ID NO: 85928 - protein, 128 aa, Homo sapiens
  Payload ID: 17068
  Gene Symbol: SSX5
  Gene Name: synovial sarcoma, X breakpoint 5
  ENSP ID: ENSP00000385051
LITSAAECPHATEVSLEFGNLYQQRKILMYSLSVEHPQMTFGRLQGIFPKITPEKPAEEGNDSKGVPEASGPQNNGKQLRPSGKLNTSEKVNKTSGPKRGKHAWTHRVRERKQLVIYEEISDPQEDDE

SEQ ID NO: 85929 - protein, 188 aa, Homo sapiens
  Payload ID: 17068
  Gene Symbol: SSX5
  Gene Name: synovial sarcoma, X breakpoint 5
  ENSP ID: ENSP00000482104
MNGDDAFARRPRVDAQIPEKIQKAFDDIAKYFSKEEWEKMKASEKILYVYMKRKYEAMTKLGFKATLPPFMRNKRVADFQGNDFDNDPNRGNQVEHPQMTFGRLQGIFPKITPEKPAEEGNDSKGVPEASGPQNNGKQLRPSGKLNTSEKVNKTSGPKRGKHAWTHRVRERKQLVIYEEISDPQEDDE

SEQ ID NO: 85930 - protein, 188 aa, Homo sapiens
  Payload ID: 17069
  Gene Symbol: SSX7
  Gene Name: synovial sarcoma, X breakpoint 7
  Uniprot ID: Q7RTT5
  ENSP ID: ENSP00000298181
MNGDDAFARRPRAGAQIPEKIQKSFDDIAKYFSKKEWEKMKSLEKISYVYMKRKYEAMTKLGFKATLPPFMHNTGATDLQGNDFDNDRNQGNQVERPQMTFCRLQRIFPKIMPKKPAEEGNDSKGVPEASGSQNDGKHLCPPGKPSTSEKINKTSGPKRGKHAWTHRLRERKQLVIYEEISDPEEDDE

SEQ ID NO: 85931 - protein, 663 aa, Homo sapiens
  Payload ID: 17070
  Gene Symbol: SYBU
  Gene Name: syntabulin (syntaxin-interacting)
  Uniprot ID: Q9NX95
  ENSP ID: ENSP00000276646
MGPLRESKKEHRVQHHDKEISRSRIPRLILRPHMPQQQHKVSPASESPFSEEESREFNPSSSGRSARTVSSNSFCSDDTGCPSSQSVSPVKTPSDAGNSPIGFCPGSDEGFTRKKCTIGMVGEGSIQSSRYKKESKSGLVKPGSEADFSSSSSTGSISAPEVHMSTAGSKRSSSSRNRGPHGRSNGASSHKPGSSPSSPREKDLLSMLCRNQLSPVNIHPSYAPSSPSSSNSGSYKGSDCSPIMRRSGRYMSCGENHGVRPPNPEQYLTPLQQKEVTVRHLKTKLKESERRLHERESEIVELKSQLARMREDWIEEECHRVEAQLALKEARKEIKQLKQVIETMRSSLADKDKGIQKYFVDINIQNKKLESLLQSMEMAHSGSLRDELCLDFPCDSPEKSLTLNPPLDTMADGLSLEEQVTGEGADRELLVGDSIANSTDLFDEIVTATTTESGDLELVHSTPGANVLELLPIVMGQEEGSVVVERAVQTDVVPYSPAISELIQSVLQKLQDPCPSSLASPDESEPDSMESFPESLSALVVDLTPRNPNSAILLSPVETPYANVDAEVHANRLMRELDFAACVEERLDGVIPLARGGVVRQYWSSSFLVDLLAVAAPVVPTVLWAFSTQRGGTDPVYNIGALLRGCCVVALHSLRRTAFRIKT

SEQ ID NO: 85932 - protein, 660 aa, Homo sapiens
  Payload ID: 17070
  Gene Symbol: SYBU
  Gene Name: syntabulin (syntaxin-interacting)
  Uniprot ID: Q9NX95
  ENSP ID: ENSP00000382019
MSNFEKEHRVQHHDKEISRSRIPRLILRPHMPQQQHKVSPASESPFSEEESREFNPSSSGRSARTVSSNSFCSDDTGCPSSQSVSPVKTPSDAGNSPIGFCPGSDEGFTRKKCTIGMVGEGSIQSSRYKKESKSGLVKPGSEADFSSSSSTGSISAPEVHMSTAGSKRSSSSRNRGPHGRSNGASSHKPGSSPSSPREKDLLSMLCRNQLSPVNIHPSYAPSSPSSSNSGSYKGSDCSPIMRRSGRYMSCGENHGVRPPNPEQYLTPLQQKEVTVRHLKTKLKESERRLHERESEIVELKSQLARMREDWIEEECHRVEAQLALKEARKEIKQLKQVIETMRSSLADKDKGIQKYFVDINIQNKKLESLLQSMEMAHSGSLRDELCLDFPCDSPEKSLTLNPPLDTMADGLSLEEQVTGEGADRELLVGDSIANSTDLFDEIVTATTTESGDLELVHSTPGANVLELLPIVMGQEEGSVVVERAVQTDVVPYSPAISELIQSVLQKLQDPCPSSLASPDESEPDSMESFPESLSALVVDLTPRNPNSAILLSPVETPYANVDAEVHANRLMRELDFAACVEERLDGVIPLARGGVVRQYWSSSFLVDLLAVAAPVVPTVLWAFSTQRGGTDPVYNIGALLRGCCVVALHSLRRTAFRIKT

SEQ ID NO: 85933 - protein, 663 aa, Homo sapiens; identical to SEQ ID NO: 85931
  Payload ID: 17070
  Gene Symbol: SYBU
  Gene Name: syntabulin (syntaxin-interacting)
  Uniprot ID: Q9NX95
  ENSP ID: ENSP00000386154

SEQ ID NO: 85934 - protein, 544 aa, Homo sapiens
  Payload ID: 17070
  Gene Symbol: SYBU
  Gene Name: syntabulin (syntaxin-interacting)
  Uniprot ID: Q9NX95
  ENSP ID: ENSP00000386196
MVGEGSIQSSRYKKESKSGLVKPGSEADFSSSSSTGSISAPEVHMSTAGSKRSSSSRNRGPHGRSNGASSHKPGSSPSSPREKDLLSMLCRNQLSPVNIHPSYAPSSPSSSNSGSYKGSDCSPIMRRSGRYMSCGENHGVRPPNPEQYLTPLQQKEVTVRHLKTKLKESERRLHERESEIVELKSQLARMREDWIEEECHRVEAQLALKEARKEIKQLKQVIETMRSSLADKDKGIQKYFVDINIQNKKLESLLQSMEMAHSGSLRDELCLDFPCDSPEKSLTLNPPLDTMADGLSLEEQVTGEGADRELLVGDSIANSTDLFDEIVTATTTESGDLELVHSTPGANVLELLPIVMGQEEGSVVVERAVQTDVVPYSPAISELIQSVLQKLQDPCPSSLASPDESEPDSMESFPESLSALVVDLTPRNPNSAILLSPVETPYANVDAEVHANRLMRELDFAACVEERLDGVIPLARGGVVRQYWSSSFLVDLLAVAAPVVPTVLWAFSTQRGGTDPVYNIGALLRGCCVVALHSLRRTAFRIKT

SEQ ID NO: 85935 - protein, 663 aa, Homo sapiens; identical to SEQ ID NO: 85931
  Payload ID: 17070
  Gene Symbol: SYBU
  Gene Name: syntabulin (syntaxin-interacting)
  Uniprot ID: Q9NX95
  ENSP ID: ENSP00000403544

SEQ ID NO: 85936 - protein, 663 aa, Homo sapiens; identical to SEQ ID NO: 85931
  Payload ID: 17070
  Gene Symbol: SYBU
  Gene Name: syntabulin (syntaxin-interacting)
  Uniprot ID: Q9NX95
  ENSP ID: ENSP00000404369

SEQ ID NO: 85937 - protein, 663 aa, Homo sapiens; identical to SEQ ID NO: 85931
  Payload ID: 17070
  Gene Symbol: SYBU
  Gene Name: syntabulin (syntaxin-interacting)
  Uniprot ID: Q9NX95
  ENSP ID: ENSP00000407118

SEQ ID NO: 85938 - protein, 662 aa, Homo sapiens
  Payload ID: 17070
  Gene Symbol: SYBU
  Gene Name: syntabulin (syntaxin-interacting)
  Uniprot ID: Q9NX95
  ENSP ID: ENSP00000414748
MGPLRESKEHRVQHHDKEISRSRIPRLILRPHMPQQQHKVSPASESPFSEEESREFNPSSSGRSARTVSSNSFCSDDTGCPSSQSVSPVKTPSDAGNSPIGFCPGSDEGFTRKKCTIGMVGEGSIQSSRYKKESKSGLVKPGSEADFSSSSSTGSISAPEVHMSTAGSKRSSSSRNRGPHGRSNGASSHKPGSSPSSPREKDLLSMLCRNQLSPVNIHPSYAPSSPSSSNSGSYKGSDCSPIMRRSGRYMSCGENHGVRPPNPEQYLTPLQQKEVTVRHLKTKLKESERRLHERESEIVELKSQLARMREDWIEEECHRVEAQLALKEARKEIKQLKQVIETMRSSLADKDKGIQKYFVDINIQNKKLESLLQSMEMAHSGSLRDELCLDFPCDSPEKSLTLNPPLDTMADGLSLEEQVTGEGADRELLVGDSIANSTDLFDEIVTATTTESGDLELVHSTPGANVLELLPIVMGQEEGSVVVERAVQTDVVPYSPAISELIQSVLQKLQDPCPSSLASPDESEPDSMESFPESLSALVVDLTPRNPNSAILLSPVETPYANVDAEVHANRLMRELDFAACVEERLDGVIPLARGGVVRQYWSSSFLVDLLAVAAPVVPTVLWAFSTQRGGTDPVYNIGALLRGCCVVALHSLRRTAFRIKT

SEQ ID NO: 85939 - protein, 668 aa, Homo sapiens
  Payload ID: 17070
  Gene Symbol: SYBU
  Gene Name: syntabulin (syntaxin-interacting)
  ENSP ID: ENSP00000415654
MGPLRESKMSNFEKEHRVQHHDKEISRSRIPRLILRPHMPQQQHKVSPASESPFSEEESREFNPSSSGRSARTVSSNSFCSDDTGCPSSQSVSPVKTPSDAGNSPIGFCPGSDEGFTRKKCTIGMVGEGSIQSSRYKKESKSGLVKPGSEADFSSSSSTGSISAPEVHMSTAGSKRSSSSRNRGPHGRSNGASSHKPGSSPSSPREKDLLSMLCRNQLSPVNIHPSYAPSSPSSSNSGSYKGSDCSPIMRRSGRYMSCGENHGVRPPNPEQYLTPLQQKEVTVRHLKTKLKESERRLHERESEIVELKSQLARMREDWIEEECHRVEAQLALKEARKEIKQLKQVIETMRSSLADKDKGIQKYFVDINIQNKKLESLLQSMEMAHSGSLRDELCLDFPCDSPEKSLTLNPPLDTMADGLSLEEQVTGEGADRELLVGDSIANSTDLFDEIVTATTTESGDLELVHSTPGANVLELLPIVMGQEEGSVVVERAVQTDVVPYSPAISELIQSVLQKLQDPCPSSLASPDESEPDSMESFPESLSALVVDLTPRNPNSAILLSPVETPYANVDAEVHANRLMRELDFAACVEERLDGVIPLARGGVVRQYWSSSFLVDLLAVAAPVVPTVLWAFSTQRGGTDPVYNIGALLRGCCVVALHSLRRTAFRIKT

SEQ ID NO: 85940 - protein, 162 aa, Homo sapiens
  Payload ID: 17070
  Gene Symbol: SYBU
  Gene Name: syntabulin (syntaxin-interacting)
  ENSP ID: ENSP00000431469
MGPLRESKEHRVQHHDKEISRSRIPRLILRPHMPQQQHKVSPASESPFSEEESREFNPSSSGRSARTVSSNSFCSDDTGCPSSQSVSPVKTPSDAGNSPIGFCPGSDEGFTRKKCTIGMVGEGSIQSSRYKKESKSGLVKPGSEADFSSSSSTGSISAPEVH

SEQ ID NO: 85941 - protein, 144 aa, Homo sapiens
  Payload ID: 17070
  Gene Symbol: SYBU
  Gene Name: syntabulin (syntaxin-interacting)
  ENSP ID: ENSP00000431492
MSTAGSKRSSSSRNRGPHGRSNGASSHKPGSSPSSPREKDLLSMLCRNQLSPVNIHPSYAPSSPSSSNSGSYKGSDCSPIMRRSGRYMSCGENHGVRPPNPEQYLTPLQQKEVTVRHLKTKLKESERRLHERESEIVELKSQLA

SEQ ID NO: 85942 - protein, 76 aa, Homo sapiens
  Payload ID: 17070
  Gene Symbol: SYBU
  Gene Name: syntabulin (syntaxin-interacting)
  ENSP ID: ENSP00000431895
MGPLRESKKEHRVQHHDKEISRSRIPRLILRPHMPQQQHKVSPASESPFSEEESREFNPSSSGRSARTVSSNSFCS

SEQ ID NO: 85943 - protein, 103 aa, Homo sapiens
  Payload ID: 17070
  Gene Symbol: SYBU
  Gene Name: syntabulin (syntaxin-interacting)
  ENSP ID: ENSP00000432291
MGPLRESKEHRVQHHDKEISRSRIPRLILRPHMPQQQHKVSPASESPFSEEESREFNPSSSGRSARTVSSNSFCSDDTGCPSSQSVSPVKTPSDAGNSPIGFC

SEQ ID NO: 85944 - protein, 662 aa, Homo sapiens; identical to SEQ ID NO: 85938
  Payload ID: 17070
  Gene Symbol: SYBU
  Gene Name: syntabulin (syntaxin-interacting)
  Uniprot ID: Q9NX95
  ENSP ID: ENSP00000432501

SEQ ID NO: 85945 - protein, 204 aa, Homo sapiens
  Payload ID: 17070
  Gene Symbol: SYBU
  Gene Name: syntabulin (syntaxin-interacting)
  ENSP ID: ENSP00000432835
MGPLRESKEHRVQHHDKEISRSRIPRLILRPHMPQQQHKVSPASESPFSEEESREFNPSSSGRSARTVSSNSFCSDDTGCPSSQSVSPVKTPSDAGNSPIGFCPGSDEGFTRKKCTIGMVGEGSIQSSRYKKESKSGLVKPGSEADFSSSSSTGSISAPEVHMSTAGSKRSSSSRNRGPHGRSNGASSHKPGSSPSSPREKDLL

SEQ ID NO: 85946 - protein, 544 aa, Homo sapiens; identical to SEQ ID NO: 85934
  Payload ID: 17070
  Gene Symbol: SYBU
  Gene Name: syntabulin (syntaxin-interacting)
  Uniprot ID: Q9NX95
  ENSP ID: ENSP00000432962

SEQ ID NO: 85947 - protein, 662 aa, Homo sapiens; identical to SEQ ID NO: 85938
  Payload ID: 17070
  Gene Symbol: SYBU
  Gene Name: syntabulin (syntaxin-interacting)
  Uniprot ID: Q9NX95
  ENSP ID: ENSP00000433446

SEQ ID NO: 85948 - protein, 533 aa, Homo sapiens
  Payload ID: 17070
  Gene Symbol: SYBU
  Gene Name: syntabulin (syntaxin-interacting)
  ENSP ID: ENSP00000433941
MFAMKVYGAYLLSSEADFSSSSSTGSISAPEVHMSTAGSKRSSSSRNRGPHGRSNGASSHKPGSSPSSPREKDLLSMLCRNQLSPVNIHPSYAPSSPSSSNSGSYKGSDCSPIMRRSGRYMSCGENHGVRPPNPEQYLTPLQQKEVTVRHLKTKLKESERRLHERESEIVELKSQLARMREDWIEEECHRVEAQLALKEARKEIKQLKQVIETMRSSLADKDKGIQKYFVDINIQNKKLESLLQSMEMAHSGSLRDELCLDFPCDSPEKSLTLNPPLDTMADGLSLEEQVTGEGADRELLVGDSIANSTDLFDEIVTATTTESGDLELVHSTPGANVLELLPIVMGQEEGSVVVERAVQTDVVPYSPAISELIQSVLQKLQDPCPSSLASPDESEPDSMESFPESLSALVVDLTPRNPNSAILLSPVETPYANVDAEVHANRLMRELDFAACVEERLDGVIPLARGGVVRQYWSSSFLVDLLAVAAPVVPTVLWAFSTQRGGTDPVYNIGALLRGCCVVALHSLRRTAFRIKT

SEQ ID NO: 85949 - protein, 76 aa, Homo sapiens; identical to SEQ ID NO: 85942
  Payload ID: 17070
  Gene Symbol: SYBU
  Gene Name: syntabulin (syntaxin-interacting)
  ENSP ID: ENSP00000434061

SEQ ID NO: 85950 - protein, 80 aa, Homo sapiens
  Payload ID: 17070
  Gene Symbol: SYBU
  Gene Name: syntabulin (syntaxin-interacting)
  ENSP ID: ENSP00000434074
MVGEGSIQSSRYKKESKSGLVKPGSEADFSSSSSTGSISAPEVHMSTAGSKRSSSSRNRGPHGRSNGASSHKPGSSPSSP

SEQ ID NO: 85951 - protein, 34 aa, Homo sapiens
  Payload ID: 17070
  Gene Symbol: SYBU
  Gene Name: syntabulin (syntaxin-interacting)
  ENSP ID: ENSP00000434158
MVGEGSIQSSRYKKESKSGLVKPGSEADFSSSSS

SEQ ID NO: 85952 - protein, 73 aa, Homo sapiens
  Payload ID: 17070
  Gene Symbol: SYBU
  Gene Name: syntabulin (syntaxin-interacting)
  ENSP ID: ENSP00000434612
MGPLRESKKEHRVQHHDKEISRSRIPRLILRPHMPQQQHKVSPASESPFSEEESREFNPSSSGRSARTVSSNS

SEQ ID NO: 85953 - protein, 663 aa, Homo sapiens; identical to SEQ ID NO: 85931
  Payload ID: 17070
  Gene Symbol: SYBU
  Gene Name: syntabulin (syntaxin-interacting)
  Uniprot ID: Q9NX95
  ENSP ID: ENSP00000434679

SEQ ID NO: 85954 - protein, 151 aa, Homo sapiens
  Payload ID: 17070
  Gene Symbol: SYBU
  Gene Name: syntabulin (syntaxin-interacting)
  ENSP ID: ENSP00000434840
MGPLRESKKEHRVQHHDKEISRSRIPRLILRPHMPQQQHKVSPASESPFSEEESREFNPSSSGRSARTVSSNSFCSDDTGCPSSQSVSPVKTPSDAGNSPIGFCPGSDEGFTRKKCTIGMVGEGSIQSSRYKKESKSGLVKPGSEADFSSS

SEQ ID NO: 85955 - protein, 457 aa, Homo sapiens
  Payload ID: 17070
  Gene Symbol: SYBU
  Gene Name: syntabulin (syntaxin-interacting)
  ENSP ID: ENSP00000434871
MLCRNQLSPVNIHPSYAPSSPSSSNSGSYKGSDCSPIMRRSGRYMSCGENHGVRPPNPEQYLTPLQQKEVTVRHLKTKLKESERRLHERESEIVELKSQLARMREDWIEEECHRVEAQLALKEARKEIKQLKQVIETMRSSLADKDKGIQKYFVDINIQNKKLESLLQSMEMAHSGSLRDELCLDFPCDSPEKSLTLNPPLDTMADGLSLEEQVTGEGADRELLVGDSIANSTDLFDEIVTATTTESGDLELVHSTPGANVLELLPIVMGQEEGSVVVERAVQTDVVPYSPAISELIQSVLQKLQDPCPSSLASPDESEPDSMESFPESLSALVVDLTPRNPNSAILLSPVETPYANVDAEVHANRLMRELDFAACVEERLDGVIPLARGGVVRQYWSSSFLVDLLAVAAPVVPTVLWAFSTQRGGTDPVYNIGALLRGCCVVALHSLRRTAFRIKT

SEQ ID NO: 85956 - protein, 137 aa, Homo sapiens
  Payload ID: 17070
  Gene Symbol: SYBU
  Gene Name: syntabulin (syntaxin-interacting)
  ENSP ID: ENSP00000435224
MGPLRESKKEHRVQHHDKEISRSRIPRLILRPHMPQQQHKVSPASESPFSEEESREFNPSSSGRSARTVSSNSFCSDDTGCPSSQSVSPVKTPSDAGNSPIGFCPGSDEGFTRKKCTIGMVGEGSIQSSRYKKESKS

SEQ ID NO: 85957 - protein, 35 aa, Homo sapiens
  Payload ID: 17070
  Gene Symbol: SYBU
  Gene Name: syntabulin (syntaxin-interacting)
  ENSP ID: ENSP00000435433
MVGEGSIQSSRYKKESKSGLVKPGSEADFSSSSST

SEQ ID NO: 85958 - protein, 544 aa, Homo sapiens; identical to SEQ ID NO: 85934
  Payload ID: 17070
  Gene Symbol: SYBU
  Gene Name: syntabulin (syntaxin-interacting)
  Uniprot ID: Q9NX95
  ENSP ID: ENSP00000436041

SEQ ID NO: 85959 - protein, 595 aa, Homo sapiens
  Payload ID: 17070
  Gene Symbol: SYBU
  Gene Name: syntabulin (syntaxin-interacting)
  Uniprot ID: Q9NX95
  ENSP ID: ENSP00000436266
MGPFWARKDDTGCPSSQSVSPVKTPSDAGNSPIGFCPGSDEGFTRKKCTIGMVGEGSIQSSRYKKESKSGLVKPGSEADFSSSSSTGSISAPEVHMSTAGSKRSSSSRNRGPHGRSNGASSHKPGSSPSSPREKDLLSMLCRNQLSPVNIHPSYAPSSPSSSNSGSYKGSDCSPIMRRSGRYMSCGENHGVRPPNPEQYLTPLQQKEVTVRHLKTKLKESERRLHERESEIVELKSQLARMREDWIEEECHRVEAQLALKEARKEIKQLKQVIETMRSSLADKDKGIQKYFVDINIQNKKLESLLQSMEMAHSGSLRDELCLDFPCDSPEKSLTLNPPLDTMADGLSLEEQVTGEGADRELLVGDSIANSTDLFDEIVTATTTESGDLELVHSTPGANVLELLPIVMGQEEGSVVVERAVQTDVVPYSPAISELIQSVLQKLQDPCPSSLASPDESEPDSMESFPESLSALVVDLTPRNPNSAILLSPVETPYANVDAEVHANRLMRELDFAACVEERLDGVIPLARGGVVRQYWSSSFLVDLLAVAAPVVPTVLWAFSTQRGGTDPVYNIGALLRGCCVVALHSLRRTAFRIKT

SEQ ID NO: 85960 - protein, 95 aa, Homo sapiens
  Payload ID: 17070
  Gene Symbol: SYBU
  Gene Name: syntabulin (syntaxin-interacting)
  ENSP ID: ENSP00000436520
MGPLRESKKEHRVQHHDKEISRSRIPRLILRPHMPQQQHKVSPASESPFSEEESREFNPSSSGRSARTVSSNSFCSDDTGCPSSQSVSPVKTPSD

SEQ ID NO: 85961 - protein, 125 aa, Homo sapiens
  Payload ID: 17070
  Gene Symbol: SYBU
  Gene Name: syntabulin (syntaxin-interacting)
  ENSP ID: ENSP00000436797
MVGEGSIQSSRYKKESKSGLVKPGSEADFSSSSSTGSISAPEVHMSTAGSKRSSSSRNRGPHGRSNGASSHKPGSSPSSPREKDLLSMLCRNQLSPVNIHPSYAPSSPSSSNSGSYKGSDCSPIM

SEQ ID NO: 85962 - protein, 47 aa, Homo sapiens
  Payload ID: 17070
  Gene Symbol: SYBU
  Gene Name: syntabulin (syntaxin-interacting)
  ENSP ID: ENSP00000436850
MFAMKVYGAYLLSSEADFSSSSSTGSISAPEVHMSTAGSKRSSSSRK

SEQ ID NO: 85963 - protein, 80 aa, Homo sapiens; identical to SEQ ID NO: 85950
  Payload ID: 17070
  Gene Symbol: SYBU
  Gene Name: syntabulin (syntaxin-interacting)
  ENSP ID: ENSP00000436908

SEQ ID NO: 85964 - protein, 538 aa, Homo sapiens
  Payload ID: 17071
  Gene Symbol: SNPH
  Gene Name: syntaphilin
  Uniprot ID: O15079
  ENSP ID: ENSP00000371291
MPGSGPSERMTWPGPALSAGPPTRPLSSAPGIPPIPPLTRTHSLMAMSLPGSRRTSAGSRRRTSPPVSVRDAYGTSSLSSSSNSGSYKGSDSSPTPRRSMKYTLCSDNHGIKPPTPEQYLTPLQQKEVCIRHLKARLKDTQDRLQDRDTEIDDLKTQLSRMQEDWIEEECHRVEAQLALKEARKEIKQLKQVIDTVKNNLIDKDKGLQKYFVDINIQNKKLETLLHSMEVAQNGMAKEDGTGESAGGSPARSLTRSSTYTKLSDPAVCGDRQPGDPSSGSAEDGADSGFAAADDTLSRTDALEASSLLSSGVDCGTEETSLHSSFGLGPRFPASNTYEKLLCGMEAGVQASCMQERAIQTDFVQYQPDLDTILEKVTQAQVCGTDPESGDRCPELDAHPSGPRDPNSAVVVTVGDELEAPEPITRGPTPQRPGANPNPGQSVSVVCPMEEEEEAAVAEKEPKSYWSRHYIVDLLAVVVPAVPTVAWLCRSQRRQGQPIYNISSLLRGCCTVALHSIRRISCRSLSQPSPSPAGGGSQL

SEQ ID NO: 85965 - protein, 494 aa, Homo sapiens
  Payload ID: 17071
  Gene Symbol: SNPH
  Gene Name: syntaphilin
  Uniprot ID: O15079
  ENSP ID: ENSP00000371297
MAMSLPGSRRTSAGSRRRTSPPVSVRDAYGTSSLSSSSNSGSYKGSDSSPTPRRSMKYTLCSDNHGIKPPTPEQYLTPLQQKEVCIRHLKARLKDTQDRLQDRDTEIDDLKTQLSRMQEDWIEEECHRVEAQLALKEARKEIKQLKQVIDTVKNNLIDKDKGLQKYFVDINIQNKKLETLLHSMEVAQNGMAKEDGTGESAGGSPARSLTRSSTYTKLSDPAVCGDRQPGDPSSGSAEDGADSGFAAADDTLSRTDALEASSLLSSGVDCGTEETSLHSSFGLGPRFPASNTYEKLLCGMEAGVQASCMQERAIQTDFVQYQPDLDTILEKVTQAQVCGTDPESGDRCPELDAHPSGPRDPNSAVVVTVGDELEAPEPITRGPTPQRPGANPNPGQSVSVVCPMEEEEEAAVAEKEPKSYWSRHYIVDLLAVVVPAVPTVAWLCRSQRRQGQPIYNISSLLRGCCTVALHSIRRISCRSLSQPSPSPAGGGSQL

SEQ ID NO: 85966 - protein, 538 aa, Homo sapiens; identical to SEQ ID NO: 85964
  Payload ID: 17071
  Gene Symbol: SNPH
  Gene Name: syntaphilin
  Uniprot ID: O15079
  ENSP ID: ENSP00000479696

SEQ ID NO: 85967 - protein, 220 aa, Homo sapiens
  Payload ID: 17072
  Gene Symbol: STX10
  Gene Name: syntaxin 10
  ENSP ID: ENSP00000242770
MSLEDPFFVVRGEVQKAVNTARGLYQRWCELLQESAAVGREELDWTTNELRNGLRSIEWDLEDLEETIGIVEANPGKFKLPAGDLQERKVFVERMREAVQEMKDHMVSPTAVAFLERNNREILAGKPAAQKSPSDLLDASAVSATSRYIEEQQATQQLIMDEQDQQLEMVSGSIQVLKHMSGRVGEELDEQACWMPSPKRWTTPSPAWTGSSGSWPKYPT

SEQ ID NO: 85968 - protein, 200 aa, Homo sapiens
  Payload ID: 17072
  Gene Symbol: STX10
  Gene Name: syntaxin 10
  Uniprot ID: O60499
  ENSP ID: ENSP00000339350
MSLEDPFFVVRGEVQKAVNTARGLYQRWCELLQESAAVGREELDWTTNELRNGLRSIEWDLEDLEETIGIVEANPGKPAAQKSPSDLLDASAVSATSRYIEEQQATQQLIMDEQDQQLEMVSGSIQVLKHMSGRVGEELDEQGIMLDAFAQEMDHTQSRMDGVLRKLAKVSHMTSDRRQWCAIAVLVGVLLLVLILLFSL

SEQ ID NO: 85969 - protein, 73 aa, Homo sapiens
  Payload ID: 17072
  Gene Symbol: STX10
  Gene Name: syntaxin 10
  ENSP ID: ENSP00000415176
MSLEDPFFVVRGEVQKAVNTARGLYQRWCELLQESAAVGREELDWTTNELRNGLRSIEWDLEDLEETIVSAHV

SEQ ID NO: 85970 - protein, 228 aa, Homo sapiens
  Payload ID: 17072
  Gene Symbol: STX10
  Gene Name: syntaxin 10
  ENSP ID: ENSP00000464943
  MOD_RES (1)..(1): Any amino acid
XAVNTARGLYQRWCELLQESAAVGREELDWTTNELRNGLRSIEWDLEDLEETIGIVEANPGKFKLPAGDLQERKVFVERMREAVQEMKDHMVSPTAVAFLERNNREILAGKPAAQKSPSDLLDASAVSATSRYIEEQQATQQLIMDEQDQQLEMVSGSIQVLKHMSGRVGEELDEQGIMLDAFAQEMDHTQSRMDGVLRKLAKVSHMTSVPGPQSHLPLCLIHVPTWK

SEQ ID NO: 85971 - protein, 58 aa, Homo sapiens
  Payload ID: 17072
  Gene Symbol: STX10
  Gene Name: syntaxin 10
  ENSP ID: ENSP00000464970
MREAVQEMKDHMVSPTAVAFLERNNREILAGKPAAQKSPSDLLDASAVSATSRYIEEQ

SEQ ID NO: 85972 - protein, 246 aa, Homo sapiens
  Payload ID: 17072
  Gene Symbol: STX10
  Gene Name: syntaxin 10
  ENSP ID: ENSP00000465398
MSLEDPFFVVRGEVQKAVNTARGLYQRWCELLQESAAVGREELDWTTNELRNGLRSIEWDLEDLEETIGIVEANPGKFKLPAGDLQERKVFVERMREAVQEMKDHMVSPTAVAFLERNNREILAGKPAAQKSPSDLLDASAVSATSRYIEEQQATQQLIMDEQDQQLEMVSGSIQVLKHMSGRVGEELDEQGIMLDAFAQEMDHTQSRMDGVLRKLAKVSHMTSGESPQGRGQSWWGQVVGGTLSP

SEQ ID NO: 85973 - protein, 113 aa, Homo sapiens
  Payload ID: 17072
  Gene Symbol: STX10
  Gene Name: syntaxin 10
  ENSP ID: ENSP00000465495
MSLEDPFFVVRGEVQKAVNTARGLYQRWCELLQESAAVGREELDWTTNELRNGLRSIEWDLEDLEETIDILGLYTRRQASCPEVTQRPAGCQRSLGHISLHRGAAGHTAADHG

SEQ ID NO: 85974 - protein, 201 aa, Homo sapiens
  Payload ID: 17072
  Gene Symbol: STX10
  Gene Name: syntaxin 10
  ENSP ID: ENSP00000466272
LQESAAVGREELDWTTNELRNGLRSIEWDLEDLEETIGIVEANPGKFKLPAGDLQERKVFVERMREAVQEMKDHMVSPTAVAFLERNNREILAGKPAAQKSPSDLLDASAVSATSRYIEEQQATQQLIMDEQDQQLEMVSGSIQVLKHMSGRVGEELDEQGIMLDAFAQEMDHTQSRMDGVLRKLAKVSHMTSALPGRLVP

SEQ ID NO: 85975 - protein, 249 aa, Homo sapiens
  Payload ID: 17072
  Gene Symbol: STX10
  Gene Name: syntaxin 10
  Uniprot ID: O60499
  ENSP ID: ENSP00000466298
MSLEDPFFVVRGEVQKAVNTARGLYQRWCELLQESAAVGREELDWTTNELRNGLRSIEWDLEDLEETIGIVEANPGKFKLPAGDLQERKVFVERMREAVQEMKDHMVSPTAVAFLERNNREILAGKPAAQKSPSDLLDASAVSATSRYIEEQQATQQLIMDEQDQQLEMVSGSIQVLKHMSGRVGEELDEQGIMLDAFAQEMDHTQSRMDGVLRKLAKVSHMTSDRRQWCAIAVLVGVLLLVLILLFSL

SEQ ID NO: 85976 - protein, 122 aa, Homo sapiens
  Payload ID: 17072
  Gene Symbol: STX10
  Gene Name: syntaxin 10
  ENSP ID: ENSP00000467479
MREAVQEMKDHMVSPTAVAFLERNNREILAGKPAAQKSPSDLLDASAVSATSRYIEEQQATQQLIMDEQDQQLEMVSGSIQVLKHMSGRVGEELDEQGIMLDAFAQEMDHTQSRMDGVLRKL

SEQ ID NO: 85977 - protein, 97 aa, Homo sapiens
  Payload ID: 17072
  Gene Symbol: STX10
  Gene Name: syntaxin 10
  ENSP ID: ENSP00000467713
  MOD_RES (1)..(1): Any amino acid
XCCVPLQILAGKPAAQKSPSDLLDASAVSATSRYIEEQQATQQLIMDEQDQQLEMVSGSIQVLKHMSGRVGEELDEQGIMLDAFAQEMDHTQSRMDG

SEQ ID NO: 85978 - protein, 287 aa, Homo sapiens
  Payload ID: 17073
  Gene Symbol: STX11
  Gene Name: syntaxin 11
  Uniprot ID: O75558
  ENSP ID: ENSP00000356540
MKDRLAELLDLSKQYDQQFPDGDDEFDSPHEDIVFETDHILESLYRDIRDIQDENQLLVADVKRLGKQNARFLTSMRRLSSIKRDTNSIAKAIKARGEVIHCKLRAMKELSEAAEAQHGPHSAVARISRAQYNALTLTFQRAMHDYNQAEMKQRDNCKIRIQRQLEIMGKEVSGDQIEDMFEQGKWDVFSENLLADVKGARAALNEIESRHRELLRLESRIRDVHELFLQMAVLVEKQADTLNVIELNVQKTVDYTGQAKAQVRKAVQYEEKNPCRTLCCFCCPCLK

SEQ ID NO: 85979 - protein, 276 aa, Homo sapiens
  Payload ID: 17074
  Gene Symbol: STX12
  Gene Name: syntaxin 12
  Uniprot ID: Q86Y82
  ENSP ID: ENSP00000363054
MSYGPLDMYRNPGPSGPQLRDFSSIIQTCSGNIQRISQATAQIKNLMSQLGTKQDSSKLQENLQQLQHSTNQLAKETNELLKELGSLPLPLSTSEQRQQRLQKERLMNDFSAALNNFQAVQRRVSEKEKESIARARAGSRLSAEERQREEQLVSFDSHEEWNQMQSQEDEVAITEQDLELIKERETAIRQLEADILDVNQIFKDLAMMIHDQGDLIDSIEANVESSEVHVERATEQLQRAAYYQKKSRKKMCILVLVLSVIILILGLIIWLVYKTK

SEQ ID NO: 85980 - protein, 215 aa, Homo sapiens
  Payload ID: 17074
  Gene Symbol: STX12
  Gene Name: syntaxin 12
  ENSP ID: ENSP00000392577
MSYGPLDMYRNPGPSGPQLRDFSSIIQTCSGNIQRISQATAQIKNLMSQLGTKQDSSKLQENLQQLQHSTNQLAKETNELLKELGSLPLPLSTSEQRQQRLQKERLMNDFSAALNNFQAVQRRVSEKEKESIARARAGSRLSAEERQREEQLVSFDSSLLLDMKNVALQDFIDSRGLEPCHEEWNQMQSQEDEVAITEQDLELIKERETAIRQLE

SEQ ID NO: 85981 - protein, 204 aa, Homo sapiens
  Payload ID: 17075
  Gene Symbol: STX16
  Gene Name: syntaxin 16
  ENSP ID: ENSP00000312086
MALVSGISLDPEAAIGVTKRPPPKWVDGVDEIQYDVGRIKQKMKELASLHDKHLNRPTLDDSSEEEHAIEITTQEITQLFHRCQRAVQALPSRARACSEQEGRLLGNVVASLAQALQELSTSFRHAQSGYLKRMKNREERSQHFFDTSVPLMDDGDDNTLYHRGFTEDQLVLVEQNTLMVEEREREIRQIVQSISDLNEIFRDL

SEQ ID NO: 85982 - protein, 308 aa, Homo sapiens
  Payload ID: 17075
  Gene Symbol: STX16
  Gene Name: syntaxin 16
  Uniprot ID: O14662
  ENSP ID: ENSP00000348229
MATRRLTDAFLLLRNNSIQNRQLLAEQELDELADDRMALVSGISLDPEAAIGVTKRPPPKWVDGVDEIQYDVGRIKQKMKELASLHDKHLNRPTLDDSSEEEHAIEITTQEITQLFHRCQRAVQALPSRARACSEQEGRLLGNVVASLAQALQELSTSFRHAQSGYLKRMKNREERSQHFFDTSVPLMDDGDDNTLYHRGFTEDQLVLVEQNTLMVEEREREIRQIVQSISDLNEIFRDLGAMIVEQGTVLDRIDYNVEQSCIKTEDGLKQLHKAEQYQKKNRKMLVILILFVIIIVLIVVLVGVKSR

SEQ ID NO: 85983 - protein, 321 aa, Homo sapiens
  Payload ID: 17075
  Gene Symbol: STX16
  Gene Name: syntaxin 16
  Uniprot ID: O14662
  ENSP ID: ENSP00000350723
MATRRLTDAFLLLRNNSIQNRQLLAEQVSSHITSSPLHSRSIAALADDRMALVSGISLDPEAAIGVTKRPPPKWVDGVDEIQYDVGRIKQKMKELASLHDKHLNRPTLDDSSEEEHAIEITTQEITQLFHRCQRAVQALPSRARACSEQEGRLLGNVVASLAQALQELSTSFRHAQSGYLKRMKNREERSQHFFDTSVPLMDDGDDNTLYHRGFTEDQLVLVEQNTLMVEEREREIRQIVQSISDLNEIFRDLGAMIVEQGTVLDRIDYNVEQSCIKTEDGLKQLHKAEQYQKKNRKMLVILILFVIIIVLIVVLVGVKSR

SEQ ID NO: 85984 - protein, 272 aa, Homo sapiens
  Payload ID: 17075
  Gene Symbol: STX16
  Gene Name: syntaxin 16
  Uniprot ID: O14662
  ENSP ID: ENSP00000352634
MALVSGISLDPEAAIGVTKRPPPKWVDGVDEIQYDVGRIKQKMKELASLHDKHLNRPTLDDSSEEEHAIEITTQEITQLFHRCQRAVQALPSRARACSEQEGRLLGNVVASLAQALQELSTSFRHAQSGYLKRMKNREERSQHFFDTSVPLMDDGDDNTLYHRGFTEDQLVLVEQNTLMVEEREREIRQIVQSISDLNEIFRDLGAMIVEQGTVLDRIDYNVEQSCIKTEDGLKQLHKAEQYQKKNRKMLVILILFVIIIVLIVVLVGVKSR

SEQ ID NO: 85985 - protein, 272 aa, Homo sapiens; identical to SEQ ID NO: 85984
  Payload ID: 17075
  Gene Symbol: STX16
  Gene Name: syntaxin 16
  Uniprot ID: O14662
  ENSP ID: ENSP00000354445

SEQ ID NO: 85986 - protein, 307 aa, Homo sapiens
  Payload ID: 17075
  Gene Symbol: STX16
  Gene Name: syntaxin 16
  ENSP ID: ENSP00000355408
MATRRLTDAFLLLRNNSIQNRQLLAEQELDELADDRMALVSGISLDPEAAIGVTKRPPPKWVDGVDEIQYDVGRIKQKMKELASLHDKHLNRPTLDDSSEEEHAIEITTQEITQLFHRCQRAVQPCRAGPGPAPSRRGGCLGTWGLLAQALQELSTSFRHAQSGYLKRMKNREERSQHFFDTSVPLMDDGDDNTLYHRGFTEDQLVLVEQNTLMVEEREREIRQIVQSISDLNEIFRDLGAMIVEQGTVLDRIDYNVEQSCIKTEDGLKQLHKAEQYQKKNRKMLVILILFVIIIVLIVVLVGVKSR

SEQ ID NO: 85987 - protein, 304 aa, Homo sapiens
  Payload ID: 17075
  Gene Symbol: STX16
  Gene Name: syntaxin 16
  Uniprot ID: O14662
  ENSP ID: ENSP00000360173
MATRRLTDAFLLLRNNSIQNRQLLAEQLADDRMALVSGISLDPEAAIGVTKRPPPKWVDGVDEIQYDVGRIKQKMKELASLHDKHLNRPTLDDSSEEEHAIEITTQEITQLFHRCQRAVQALPSRARACSEQEGRLLGNVVASLAQALQELSTSFRHAQSGYLKRMKNREERSQHFFDTSVPLMDDGDDNTLYHRGFTEDQLVLVEQNTLMVEEREREIRQIVQSISDLNEIFRDLGAMIVEQGTVLDRIDYNVEQSCIKTEDGLKQLHKAEQYQKKNRKMLVILILFVIIIVLIVVLVGVKSR

SEQ ID NO: 85988 - protein, 325 aa, Homo sapiens
  Payload ID: 17075
  Gene Symbol: STX16
  Gene Name: syntaxin 16
  Uniprot ID: O14662
  ENSP ID: ENSP00000360183
MATRRLTDAFLLLRNNSIQNRQLLAEQVSSHITSSPLHSRSIAAELDELADDRMALVSGISLDPEAAIGVTKRPPPKWVDGVDEIQYDVGRIKQKMKELASLHDKHLNRPTLDDSSEEEHAIEITTQEITQLFHRCQRAVQALPSRARACSEQEGRLLGNVVASLAQALQELSTSFRHAQSGYLKRMKNREERSQHFFDTSVPLMDDGDDNTLYHRGFTEDQLVLVEQNTLMVEEREREIRQIVQSISDLNEIFRDLGAMIVEQGTVLDRIDYNVEQSCIKTEDGLKQLHKAEQYQKKNRKMLVILILFVIIIVLIVVLVGVKSR

SEQ ID NO: 85989 - protein, 122 aa, Homo sapiens
  Payload ID: 17075
  Gene Symbol: STX16
  Gene Name: syntaxin 16
  ENSP ID: ENSP00000388348
MALVSGISLDPEAAIGVTKRPPPKWVDGVDEIQYDVGRIKQKMKELASLHDKHLNRPTLDDSSEEEHAIEITTQEITQLFHRCQRAVQALPSRARACSEQEGRLLGNVVASLAQALQELSTS

SEQ ID NO: 85990 - protein, 219 aa, Homo sapiens
  Payload ID: 17075
  Gene Symbol: STX16
  Gene Name: syntaxin 16
  ENSP ID: ENSP00000401801
GISLDPEAAIGVTKRPPPKWVDGVDEIQYDVGRIKQKMKELASLHDKHLNRPTLDDSSEEEHAIEITTQEITQLFHRCQRAVQALPSRARACSEQEGRLLGNVVASLAQALQELSTSFRHAQSGYLKRMKNREERSQHFFDTSVPLMDDGDDNTLYHRGTVLDRIDYNVEQSCIKTEDGLKQLHKAEQYQKKNRKMLVILILFVIIIVLIVVLVGVKSR

SEQ ID NO: 85991 - protein, 120 aa, Homo sapiens
  Payload ID: 17075
  Gene Symbol: STX16
  Gene Name: syntaxin 16
  ENSP ID: ENSP00000416852
MALVSGISLDPEAAIGVTKRPPPKWVDGVDEIQYDVGRIKQKMKELASLHDKHLNRPTLDDSSEEEHAIEITTQEITQLFHRCQRAVQALPSRARACSEQEGRLLGNVVASLAQALQELS

SEQ ID NO: 85992 - protein, 202 aa, Homo sapiens
  Payload ID: 17075
  Gene Symbol: STX16
  Gene Name: syntaxin 16
  ENSP ID: ENSP00000432414
MATRRLTDAFLLLRNNSIQNRQLLAEQELDELADDRMALVSGISLDPEAAIGVTKRPPPKWVDGVDEIQYDVGRIKQKMKELASLHDKHLNRPTLDDSSEEEHAIEITTQEITQLFHRCQRAVQALPSRARACSEQEGRLLGNVVASLAQALQELSTSFRHAQSGYLKRMKNREERSQHFFDTSVPLMDDGDDNTLYHRRTS

SEQ ID NO: 85993 - protein, 79 aa, Homo sapiens
  Payload ID: 17075
  Gene Symbol: STX16
  Gene Name: syntaxin 16
  ENSP ID: ENSP00000432823
MALVSGISLDPEAAIGVTKRPPPKWVDGVDEIQYDVGRIKQKMKELASLHDKHLNRPTLDDSSEEEHAIEITTQEITQA

SEQ ID NO: 85994 - protein, 115 aa, Homo sapiens
  Payload ID: 17075
  Gene Symbol: STX16
  Gene Name: syntaxin 16
  Uniprot ID: O14662
  ENSP ID: ENSP00000434369
MATRRLTDAFLLLRNNSIQNRQLLAEQELDELADDRMALVSGISLDPEAAIGVTKRPPPKWVDGVDEIQYDVGRIKQKMKELASLHDKHLNRPTLDDSSEEEHAIEITTQEITQA

SEQ ID NO: 85995 - protein, 46 aa, Homo sapiens
  Payload ID: 17075
  Gene Symbol: STX16
  Gene Name: syntaxin 16
  ENSP ID: ENSP00000435118
MALVSGISLDPEAAIGVTKRPPPKWVDGVDEVSSIFSMMLAGLSRR

SEQ ID NO: 85996 - protein, 126 aa, Homo sapiens
  Payload ID: 17075
  Gene Symbol: STX16
  Gene Name: syntaxin 16
  ENSP ID: ENSP00000436667
  MOD_RES (1)..(1): Any amino acid
XDAFLLLRNNSIQNRQLLAEQVSSHITSSPLHSRSIAAELDELADDRMALVSGISLDPEAAIGVTKRPPPKWVDGVDEIQYDVGRIKQKMKELASLHDKHLNRPTLDDSSEEEHAIEITTQEITQA

SEQ ID NO: 85997 - protein, 79 aa, Homo sapiens; identical to SEQ ID NO: 85993
  Payload ID: 17075
  Gene Symbol: STX16
  Gene Name: syntaxin 16
  ENSP ID: ENSP00000437209

SEQ ID NO: 85998 - protein, 302 aa, Homo sapiens
  Payload ID: 17076
  Gene Symbol: STX17
  Gene Name: syntaxin 17
  Uniprot ID: P56962
  ENSP ID: ENSP00000259400
MSEDEEKVKLRRLEPAIQKFIKIVIPTDLERLRKHQINIEKYQRCRIWDKLHEEHINAGRTVQQLRSNIREIEKLCLKVRKDDLVLLKRMIDPVKEEASAATAEFLQLHLESVEELKKQFNDEETLLQPPLTRSMTVGGAFHTTEAEASSQSLTQIYALPEIPQDQNAAESWETLEADLIELSQLVTDFSLLVNSQQEKIDSIADHVNSAAVNVEEGTKNLGKAAKYKLAALPVAGALIGGMVGGPIGLLAGFKVAGIAAALGGGVLGFTGGKLIQRKKQKMMEKLTSSCPDLPSQTDKKCS

SEQ ID NO: 85999 - protein, 302 aa, Homo sapiens; identical to SEQ ID NO: 85998
  Payload ID: 17076
  Gene Symbol: STX17
  Gene Name: syntaxin 17
  Uniprot ID: P56962
  ENSP ID: ENSP00000433484

SEQ ID NO: 86000 - protein, 41 aa, Homo sapiens
  Payload ID: 17076
  Gene Symbol: STX17
  Gene Name: syntaxin 17
  ENSP ID: ENSP00000433694
MSEDEEKVKLRRLEPAIQKFIKIVIPTDLERLRKHQINIEK

SEQ ID NO: 86001 - protein, 68 aa, Homo sapiens
  Payload ID: 17076
  Gene Symbol: STX17
  Gene Name: syntaxin 17
  ENSP ID: ENSP00000433701
MSEDEEKVKLRRLEPAIQKFIKIVIPTDLERLRKHQINIEKYQRCRIWDKLHEEHINAGRTVQFRNYI

SEQ ID NO: 86002 - protein, 45 aa, Homo sapiens
  Payload ID: 17076
  Gene Symbol: STX17
  Gene Name: syntaxin 17
  ENSP ID: ENSP00000434323
MSEDEEKVKLRRLEPAIQKFIKIVIPTDLERLRKHQINIEKVYIH

SEQ ID NO: 86003 - protein, 41 aa, Homo sapiens; identical to SEQ ID NO: 86000
  Payload ID: 17076
  Gene Symbol: STX17
  Gene Name: syntaxin 17
  ENSP ID: ENSP00000434547

SEQ ID NO: 86004 - protein, 302 aa, Homo sapiens; identical to SEQ ID NO: 85998
  Payload ID: 17076
  Gene Symbol: STX17
  Gene Name: syntaxin 17
  Uniprot ID: P56962
  ENSP ID: ENSP00000435981

SEQ ID NO: 86005 - protein, 141 aa, Homo sapiens
  Payload ID: 17076
  Gene Symbol: STX17
  Gene Name: syntaxin 17
  ENSP ID: ENSP00000436666
MSEDEEKVKLRRLEPAIQKFIKIVIPTDLERLRKHQINIEKYQRCRIWDKLHEEHINAGRTVQQLRSNIREIEKLCLKVRKDDLVLLKRMIDPVKEEASAATAEFLQLHLESVEELKKQFNDEETLLQPPLTRSMTVGGLN

SEQ ID NO: 86006 - protein, 335 aa, Homo sapiens
  Payload ID: 17077
  Gene Symbol: STX18
  Gene Name: syntaxin 18
  Uniprot ID: Q9P2W9
  ENSP ID: ENSP00000305810
MAVDITLLFRASVKTVKTRNKALGVAVGGGVDGSRDELFRRSPRPKGDFSSRAREVISHIGKLRDFLLEHRKDYINAYSHTMSEYGRMTDTERDQIDQDAQIFMRTCSEAIQQLRTEAHKEIHSQQVKEHRTAVLDFIEDYLKRVCKLYSEQRAIRVKRVVDKKRLSKLEPEPNTKTRESTSSEKVSQSPSKDSEENPATEERPEKILAETQPELGTWGDGKGEDELSPEEIQMFEQENQRLIGEMNSLFDEVRQIEGRVVEISRLQEIFTEKVLQQEAEIDSIHQLVVGATENIKEGNEDIREAIKNNAGFRVWILFFLVMCSFSLLFLDWYDS

SEQ ID NO: 86007 - protein, 169 aa, Homo sapiens
  Payload ID: 17077
  Gene Symbol: STX18
  Gene Name: syntaxin 18
  ENSP ID: ENSP00000422376
MSEYGRMTDTERDQIDQDAQIFMRTCSEAIQQLRTEAHKEIHSQQVKEHRTAVLDFIEDYLKRVCKLYSEQRAIRVKRVVDKKRLSKLEPEPNTKTRESTSSEKVSQSPSKDSEENPATEERPEKILAETQPELGTWGDGKGEDELSPEEIQMFEQENQRLIGEMNSLF

SEQ ID NO: 86008 - protein, 308 aa, Homo sapiens
  Payload ID: 17077
  Gene Symbol: STX18
  Gene Name: syntaxin 18
  ENSP ID: ENSP00000426648
MAVDITLLFRASVKTVKTRNKALGVAVGGGVDGSRDELFRRSPRPKGDFSSRAREVISHIGKLRDFLLEHRKDYINAYSHTMSEYGRMTDTERDQIDQDAQIFMRTCSEAIQQLRTEAHKEIHSQQVKEHRTAVLDFIEDYLKRVCKLYSEQRAIRVKRVVDKKRLSKLEPEPNTKTRESTSSEKVSQSPSKDSEENPATEERPEKILAETQPELGTWGDGKGEDELSPEEIQMFEQENQRLIGEMNSLFDEVRQIEGRVVEISRLQEIFTEKVLQQEAEIDSIHQLVVGATENIKEGNEDIREVPHL

SEQ ID NO: 86009 - protein, 294 aa, Homo sapiens
  Payload ID: 17078
  Gene Symbol: STX19
  Gene Name: syntaxin 19
  Uniprot ID: Q8N4C7
  ENSP ID: ENSP00000320679
MKDRLQELKQRTKEIELSRDSHVSTTETEEQGVFLQQAVIYEREPVAERHLHEIQKLQESINNLADNVQKFGQQQKSLVASMRRFSLLKRESTITKEIKIQAEYINRSLNDLVKEVKKSEVENGPSSVVTRILKSQHAAMFRHFQQIMFIYNDTIAAKQEKCKTFILRQLEVAGKEMSEEDVNDMLHQGKWEVFNESLLTEINITKAQLSEIEQRHKELVNLENQIKDLRDLFIQISLLVEEQGESINNIEMTVNSTKEYVNNTKEKFGLAVKYKKRNPCRVLCCWCCPCCSSK

SEQ ID NO: 86010 - protein, 288 aa, Homo sapiens
  Payload ID: 17079
  Gene Symbol: STX1A
  Gene Name: syntaxin 1A (brain)
  Uniprot ID: Q16623
  ENSP ID: ENSP00000222812
MKDRTQELRTAKDSDDDDDVAVTVDRDRFMDEFFEQVEEIRGFIDKIAENVEEVKRKHSAILASPNPDEKTKEELEELMSDIKKTANKVRSKLKSIEQSIEQEEGLNRSSADLRIRKTQHSTLSRKFVEVMSEYNATQSDYRERCKGRIQRQLEITGRTTTSEELEDMLESGNPAIFASGIIMDSSISKQALSEIETRHSEIIKLENSIRELHDMFMDMAMLVESQGEMIDRIEYNVEHAVDYVERAVSDTKKAVKYQSKARRKKIMIIICCVILGIVIASTVGGIFA

SEQ ID NO: 86011 - protein, 280 aa, Homo sapiens
  Payload ID: 17079
  Gene Symbol: STX1A
  Gene Name: syntaxin 1A (brain)
  ENSP ID: ENSP00000378583
MKDRTQELRTAKDSDDDDDVAVTVDRDRFMDEFFEQVEEIRGFIDKIAENVEEVKRKHSAILASPNPDEKTKEELEELMSDIKKTANKVRSKLKSIEQSIEQEEGLNRSSADLRIRKTQHSTLSRKFVEVMSEYNATQSDYRERCKGRIQRQLEITGRTTTSEELEDMLESGNPAIFASGIIMDSSISKQALSEIETRHSEIIKLENSIRELHDMFMDMAMLVESQVSAGPPCPPLQPTPAPRAALTSPFLPDTLPCRGGTKFSASGCFPEVLPRAPTQP

SEQ ID NO: 86012 - protein, 260 aa, Homo sapiens
  Payload ID: 17079
  Gene Symbol: STX1A
  Gene Name: syntaxin 1A (brain)
  ENSP ID: ENSP00000378584
MKDRTQELRTAKDSDDDDDVAVTVDRDRFMDEFFEQVEEIRGFIDKIAENVEEVKRKHSAILASPNPDEKTKEELEELMSDIKKTANKVRSKLKSIEQSIEQEEGLNRSSADLRIRKTQHSTLSRKFVEVMSEYNATQSDYRERCKGRIQRQLEITGRTTTSEELEDMLESGNPAIFASGIIMDSSISKQALSEIETRHSEIIKLENSIRELHDMFMDMAMLVESQPQGAFLKSCPEPQPNPEEGALWSSGAPGPAGRDD

SEQ ID NO: 86013 - protein, 251 aa, Homo sapiens
  Payload ID: 17079
  Gene Symbol: STX1A
  Gene Name: syntaxin 1A (brain)
  Uniprot ID: Q16623
  ENSP ID: ENSP00000378585
MKDRTQELRTAKDSDDDDDVAVTVDRDRFMDEFFEQVEEIRGFIDKIAENVEEVKRKHSAILASPNPDEKTKEELEELMSDIKKTANKVRSKLKSIEQSIEQEEGLNRSSADLRIRKTQHSTLSRKFVEVMSEYNATQSDYRERCKGRIQRQLEITGRTTTSEELEDMLESGNPAIFASGIIMDSSISKQALSEIETRHSEIIKLENSIRELHDMFMDMAMLVESQTMWRGPCLTPRRPSSTRARRAGRKS

SEQ ID NO: 86014 - protein, 288 aa, Homo sapiens
  Payload ID: 17080
  Gene Symbol: STX1B
  Gene Name: syntaxin 1B
  Uniprot ID: P61266
  ENSP ID: ENSP00000215095
MKDRTQELRSAKDSDDEEEVVHVDRDHFMDEFFEQVEEIRGCIEKLSEDVEQVKKQHSAILAAPNPDEKTKQELEDLTADIKKTANKVRSKLKAIEQSIEQEEGLNRSSADLRIRKTQHSTLSRKFVEVMTEYNATQSKYRDRCKDRIQRQLEITGRTTTNEELEDMLESGKLAIFTDDIKMDSQMTKQALNEIETRHNEIIKLETSIRELHDMFVDMAMLVESQGEMIDRIEYNVEHSVDYVERAVSDTKKAVKYQSKARRKKIMIIICCVVLGVVLASSIGGTLGL

SEQ ID NO: 86015 - protein, 277 aa, Homo sapiens
  Payload ID: 17080
  Gene Symbol: STX1B
  Gene Name: syntaxin 1B
  Uniprot ID: P61266
  ENSP ID: ENSP00000455899
MKDRTQELRSAKDSDDEEEVVHVDRDHFMDEFFEQVEEIRGCIEKLSEDVEQVKKQHSAILAAPNPDEKTKQELEDLTADIKKTANKVRSKLKAIEQSIEQEEGLNRSSADLRIRKTQHSTLSRKFVEVMTEYNATQSKYRDRCKDRIQRQLEITGRTTTNEELEDMLESGKLAIFTDDIKMDSQMTKQALNEIETRHNEIIKLETSIRELHDMFVDMAMLVESQGEMIDRIEYNVEHSVDYVERAVSDTKKAVKYQSKARRVSGAGGLGVGGGAQG

SEQ ID NO: 86016 - protein, 204 aa, Homo sapiens
  Payload ID: 17080
  Gene Symbol: STX1B
  Gene Name: syntaxin 1B
  ENSP ID: ENSP00000457067
ANKVRSKLKAIEQSIEQEEGLNRSSADLRIRKTQHSTLSRKFVEVMTEYNATQSKYRDRCKDRIQRQLEITGRTTTNEELEDMLESGKLAIFTDDIKMDSQMTKQALNEIETRHNEIIKLETSIRELHDMFVDMAMLVESQGEMIDRIEYNVEHSVDYVERAVSDTKKAVKYQSKARRKKIMIIICCVVLGVVLASSIGGTLGL

SEQ ID NO: 86017 - protein, 287 aa, Homo sapiens
  Payload ID: 17081
  Gene Symbol: STX2
  Gene Name: syntaxin 2
  Uniprot ID: P32856
  ENSP ID: ENSP00000261653
MRDRLPDLTACRKNDDGDTVVVVEKDHFMDDFFHQVEEIRNSIDKITQYVEEVKKNHSIILSAPNPEGKIKEELEDLNKEIKKTANKIRAKLKAIEQSFDQDESGNRTSVDLRIRRTQHSVLSRKFVEAMAEYNEAQTLFRERSKGRIQRQLEITGRTTTDDELEEMLESGKPSIFTSDIISDSQITRQALNEIESRHKDIMKLETSIRELHEMFMDMAMFVETQGEMINNIERNVMNATDYVEHAKEETKKAIKYQSKARRKLMFIIICVIVLLVILGIILATTLS

SEQ ID NO: 86018 - protein, 112 aa, Homo sapiens
  Payload ID: 17081
  Gene Symbol: STX2
  Gene Name: syntaxin 2
  ENSP ID: ENSP00000342554
  MOD_RES (1)..(1): Any amino acid
XGDTVVVVEKDHFMDDFFHQVEEIRNSIDKITQYVEEVKKNHSIILSAPNPEGKIKEELEDLNKEIKKTANKIRAKLKGFRCVQKQREATTSRPPSSTVLHELPPAPAPRLF

SEQ ID NO: 86019 - protein, 288 aa, Homo sapiens
  Payload ID: 17081
  Gene Symbol: STX2
  Gene Name: syntaxin 2
  Uniprot ID: P32856
  ENSP ID: ENSP00000376178
MRDRLPDLTACRKNDDGDTVVVVEKDHFMDDFFHQVEEIRNSIDKITQYVEEVKKNHSIILSAPNPEGKIKEELEDLNKEIKKTANKIRAKLKAIEQSFDQDESGNRTSVDLRIRRTQHSVLSRKFVEAMAEYNEAQTLFRERSKGRIQRQLEITGRTTTDDELEEMLESGKPSIFTSDIISDSQITRQALNEIESRHKDIMKLETSIRELHEMFMDMAMFVETQGEMINNIERNVMNATDYVEHAKEETKKAIKYQSKARRKKWIIIAVSVVLVAIIALIIGLSVGK

SEQ ID NO: 86020 - protein, 258 aa, Homo sapiens
  Payload ID: 17082
  Gene Symbol: STX3
  Gene Name: syntaxin 3
  ENSP ID: ENSP00000300150
MDEFFSEIEETRLNIDKISEHVEEAKKLYSIILSAPIPEPKTKDDLEQLTTEIKKRANNVRNKLKSMEKHIEEDEVRSSADLRIRKSQHSVLSRKFVEVMTKYNEAQVDFRERSKGRIQRQLEITGKKTTDEELEEMLESGNPAIFTSGIIDSQISKQALSEIEGRHKDIVRLESSIKELHDMFMDIAMLVENQGEMLDNIELNVMHTVDHVEKARDETKKAVKYQSQARKKLIIIIVLVVVLLGILALIIGLSVGLN

SEQ ID NO: 86021 - protein, 289 aa, Homo sapiens
  Payload ID: 17082
  Gene Symbol: STX3
  Gene Name: syntaxin 3
  Uniprot ID: Q13277
  ENSP ID: ENSP00000338562
MKDRLEQLKAKQLTQDDDTDAVEIAIDNTAFMDEFFSEIEETRLNIDKISEHVEEAKKLYSIILSAPIPEPKTKDDLEQLTTEIKKRANNVRNKLKSMEKHIEEDEVRSSADLRIRKSQHSVLSRKFVEVMTKYNEAQVDFRERSKGRIQRQLEITGKKTTDEELEEMLESGNPAIFTSGIIDSQISKQALSEIEGRHKDIVRLESSIKELHDMFMDIAMLVENQGEMLDNIELNVMHTVDHVEKARDETKKAVKYQSQARKKLIIIIVLVVVLLGILALIIGLSVGLN

SEQ ID NO: 86022 - protein, 204 aa, Homo sapiens
  Payload ID: 17082
  Gene Symbol: STX3
  Gene Name: syntaxin 3
  ENSP ID: ENSP00000431386
ISEHVEEAKKLYSIILSAPIPEPKTKDDLEQLTTEIKKRANNVRNKLKSMEKHIEEDEVRSSADLRIRKSQHSVLSRKFVEVMTKYNEAQVDFRERSKGRIQRQLEITGKKTTDEELEEMLESGNPAIFTSGIIDSQISKQALSEIEGRHKDIVRLESSIKELHDMFMDIAMLVENQKLIIIIVLVVVLLGILALIIGLSVGLN

SEQ ID NO: 86023 - protein, 277 aa, Homo sapiens
  Payload ID: 17082
  Gene Symbol: STX3
  Gene Name: syntaxin 3
  Uniprot ID: Q13277
  ENSP ID: ENSP00000433248
MKDRLEQLKAKQLTQDDDTDAVEIAIDNTAFMDEFFSEIEETRLNIDKISEHVEEAKKLYSIILSAPIPEPKTKDDLEQLTTEIKKRANNVRNKLKSMEKHIEEDEVRSSADLRIRKSQHSVLSRKFVEVMTKYNEAQVDFRERSKGRIQRQLEITGKKTTDEELEEMLESGNPAIFTSGIIDSQISKQALSEIEGRHKDIVRLESSIKELHDMFMDIAMLVENQGEMLDNIELNVMHTVDHVEKARDETKKAVKYQSQARKKLISLQTGVATLVFR

SEQ ID NO: 86024 - protein, 76 aa, Homo sapiens
  Payload ID: 17082
  Gene Symbol: STX3
  Gene Name: syntaxin 3
  ENSP ID: ENSP00000434836
MFMDIAMLVENQGEMLDNIELNVMHTVDHVEKARDETKKAVKYQSQARKKLIIIIVLVVVLLGILALIIGLSVGLN

SEQ ID NO: 86025 - protein, 43 aa, Homo sapiens
  Payload ID: 17082
  Gene Symbol: STX3
  Gene Name: syntaxin 3
  ENSP ID: ENSP00000436200
MKDRLEQLKAKQLTQDDDTDAVEIAIDNTAFMDEFFSEKPRMT

SEQ ID NO: 86026 - protein, 287 aa, Homo sapiens
  Payload ID: 17082
  Gene Symbol: STX3
  Gene Name: syntaxin 3
  ENSP ID: ENSP00000487790
MKDRLEQLKAKQLTQDDDTDAVEIAIDNTAFMDEFFSEIEETRLNIDKISEHVEEAKKLYSIILSAPIPEPKTKDDLEQLTTEIKKRANNVRNKLKSMEKHIEEDEVRSSADLRIRKSQHSVLSRKFVEVMTKYNEAQVDFRERSKGRIQRQLEITGKKTTDEELEEMLESGNPAIFTSGIIDSQISKQALSEIEGRHKDIVRLESSIKELHDMFMDIAMLVENQGSMIDRIENNMDQSVGFVERAVADTKKAVKYQSEARRKKIMIMICCIILAIILASTIGSIFA

SEQ ID NO: 86027 - protein, 297 aa, Homo sapiens
  Payload ID: 17083
  Gene Symbol: STX4
  Gene Name: syntaxin 4
  Uniprot ID: Q12846
  ENSP ID: ENSP00000317714
MRDRTHELRQGDDSSDEEDKERVALVVHPGTARLGSPDEEFFHKVRTIRQTIVKLGNKVQELEKQQVTILATPLPEESMKQELQNLRDEIKQLGREIRLQLKAIEPQKEEADENYNSVNTRMRKTQHGVLSQQFVELINKCNSMQSEYREKNVERIRRQLKITNAGMVSDEELEQMLDSGQSEVFVSNILKDTQVTRQALNEISARHSEIQQLERSIRELHDIFTFLATEVEMQGEMINRIEKNILSSADYVERGQEHVKTALENQKKARKKKVLIAICVSITVVLLAVIIGVTVVG

SEQ ID NO: 86028 - protein, 295 aa, Homo sapiens
  Payload ID: 17083
  Gene Symbol: STX4
  Gene Name: syntaxin 4
  Uniprot ID: Q12846
  ENSP ID: ENSP00000378447
MGMTARTKRTRSGSRWWCTRARHGWGARTRSSSTSPLGHPPQVRTIRQTIVKLGNKVQELEKQQVTILATPLPEESMKQELQNLRDEIKQLGREIRLQLKAIEPQKEEADENYNSVNTRMRKTQHGVLSQQFVELINKCNSMQSEYREKNVERIRRQLKITNAGMVSDEELEQMLDSGQSEVFVSNILKDTQVTRQALNEISARHSEIQQLERSIRELHDIFTFLATEVEMQGEMINRIEKNILSSADYVERGQEHVKTALENQKKARKKKVLIAICVSITVVLLAVIIGVTVVG

SEQ ID NO: 86029 - protein, 175 aa, Homo sapiens
  Payload ID: 17083
  Gene Symbol: STX4
  Gene Name: syntaxin 4
  ENSP ID: ENSP00000390788
MLSRQSAHALDPKAIKARFPLEDATVPVTVASSRVQASPLPLGAQQLPTPPSQPRARKRRDHGDDSSDEEDKERVALVVHPGTARLGSPDEEFFHKVRTIRQTIVKLGNKVQELEKQQVTILATPLPEESMKQELQNLRDEIKQLGREIRLQLKAIEPQKEEADENYNSVNTRMR

SEQ ID NO: 86030 - protein, 64 aa, Homo sapiens
  Payload ID: 17083
  Gene Symbol: STX4
  Gene Name: syntaxin 4
  ENSP ID: ENSP00000454419
MRDRTHELRQGDDSSDEEDKERVALVVHPGTARLGSPDEEFFHKPSRSPSPGPDNSADYCQTGE

SEQ ID NO: 86031 - protein, 64 aa, Homo sapiens; identical to SEQ ID NO: 86030
  Payload ID: 17083
  Gene Symbol: STX4
  Gene Name: syntaxin 4
  ENSP ID: ENSP00000454841

SEQ ID NO: 86032 - protein, 115 aa, Homo sapiens
  Payload ID: 17083
  Gene Symbol: STX4
  Gene Name: syntaxin 4
  ENSP ID: ENSP00000480544
  MOD_RES (1)..(1): Any amino acid
XMRDRTHELRQGDDSSDEEDKERVALVVHPGTARLGSPDEEFFHKVRTIRQTIVKLGNKVQELEKQQVTILATPLPEESMKQELQNLRDEIKQLGREIRLQLKGELLGPQTDPSL

SEQ ID NO: 86033 - protein, 355 aa, Homo sapiens
  Payload ID: 17084
  Gene Symbol: STX5
  Gene Name: syntaxin 5
  Uniprot ID: Q13190
  ENSP ID: ENSP00000294179
MIPRKRYGSKNTDQGVYLGLSKTQVLSPATAGSSSSDIAPLPPPVTLVPPPPDTMSCRDRTQEFLSACKSLQTRQNGIQTNKPALRAVRQRSEFTLMAKRIGKDLSNTFAKLEKLTILAKRKSLFDDKAVEIEELTYIIKQDINSLNKQIAQLQDFVRAKGSQSGRHLQTHSNTIVVSLQSKLASMSNDFKSVLEVRTENLKQQRSRREQFSRAPVSALPLAPNHLGGGAVVLGAESHASKDVAIDMMDSRTSQQLQLIDEQDSYIQSRADTMQNIESTIVELGSIFQQLAHMVKEQEETIQRIDENVLGAQLDVEAAHSEILKYFQSVTSNRWLMVKIFLILIVFFIIFVVFLA

SEQ ID NO: 86034 - protein, 321 aa, Homo sapiens
  Payload ID: 17084
  Gene Symbol: STX5
  Gene Name: syntaxin 5
  Uniprot ID: Q13190
  ENSP ID: ENSP00000367129
MIPRKRYGSKNTDQGVYLGLSKTQVLSPATAGSSSSDIAPLPPPVTLVPPPPDTMSCRDRTQEFLSACKSLQTRQNGIQTNKPALRAVRQRSEFTLMAKRIGKDLSNTFAKLEKLTILAKRKSLFDDKAVEIEELTYIIKQDINSLNKQIAQLQDFVRAKGSQSGRHLQTHSNTIVVSLQSKLASMSNDFKSVLEVRTENLKQQRSRREQFSRAPVSALPLAPNHLGGGAVVLGAESHASKDVAIDMMDSRTSQQLQLIDEQDSYIQSRADTMQNIESTIVELGSIFQQLAHMVKEQEETIQSVLLFPLLPALSPGSTRTC

SEQ ID NO: 86035 - protein, 301 aa, Homo sapiens
  Payload ID: 17084
  Gene Symbol: STX5
  Gene Name: syntaxin 5
  Uniprot ID: Q13190
  ENSP ID: ENSP00000378182
MSCRDRTQEFLSACKSLQTRQNGIQTNKPALRAVRQRSEFTLMAKRIGKDLSNTFAKLEKLTILAKRKSLFDDKAVEIEELTYIIKQDINSLNKQIAQLQDFVRAKGSQSGRHLQTHSNTIVVSLQSKLASMSNDFKSVLEVRTENLKQQRSRREQFSRAPVSALPLAPNHLGGGAVVLGAESHASKDVAIDMMDSRTSQQLQLIDEQDSYIQSRADTMQNIESTIVELGSIFQQLAHMVKEQEETIQRIDENVLGAQLDVEAAHSEILKYFQSVTSNRWLMVKIFLILIVFFIIFVVFLA

SEQ ID NO: 86036 - protein, 158 aa, Homo sapiens
  Payload ID: 17084
  Gene Symbol: STX5
  Gene Name: syntaxin 5
  ENSP ID: ENSP00000414289
  MOD_RES (1)..(1): Any amino acid
XNKQIAQLQDFVRAKGSQSGRHLQTHSNTIVVSLQSKLASMSNDFKSVLEVRTENLKQQRSRREQFSRAPVSALPLAPNHLGGGAVVLGAESHASKDVAIDMMDSRTSQQLQLIDEQDSYIQSRADTMQNIESTIVELGSIFQQLAHMVKEQEETIQR

SEQ ID NO: 86037 - protein, 250 aa, Homo sapiens
  Payload ID: 17084
  Gene Symbol: STX5
  Gene Name: syntaxin 5
  ENSP ID: ENSP00000432748
MIPRKRYGSKNTDQGVYLGLSKTQVLSPATAGSSSSDIAPLPPPVTLVPPPPDTMSCRDRTQEFLSACKSLQTRQNGIQTNKPALRAVRQRSEFTLMAKRIGKDLSNTFAKLEKLTILAKRKSLFDDKAVEIEELTYIIKQDINSLNKQIAQLQDFVRAKGSQSGRHLQTHSNTIVVSLQSKLASMSNDFKSVLEVRTENLKQQRSRREQFSRAPVSALPLAPNHLGKSQAVVLWFWGQSPMPPRMSPST

SEQ ID NO: 86038 - protein, 81 aa, Homo sapiens
  Payload ID: 17084
  Gene Symbol: STX5
  Gene Name: syntaxin 5
  ENSP ID: ENSP00000434107
MIPRKRYGSKNTDQGVYLGLSKTQVLSPATAGSSSSDIAPLPPPVTLVPPPPDTMSCRDRTQEFLSACKSLQTRQAHWERP

SEQ ID NO: 86039 - protein, 67 aa, Homo sapiens
  Payload ID: 17084
  Gene Symbol: STX5
  Gene Name: syntaxin 5
  ENSP ID: ENSP00000435973
  MOD_RES (1)..(1): Any amino acid
XVFGRVSAASVLGEEAVTAGEIGSGGGGRRQRGVTLVPPPPDTMSCRDRTQEFLSACKSLQTRQAGV

SEQ ID NO: 86040 - protein, 78 aa, Homo sapiens
  Payload ID: 17084
  Gene Symbol: STX5
  Gene Name: syntaxin 5
  ENSP ID: ENSP00000436495
MIPRKRYGSKNTDQGVYLGLSKTQVLSPATAGSSSSDIAPLPPPVTLVPPPPDTMSCRDRTQEFLSACKSLQTRQAGV

SEQ ID NO: 86041 - protein, 255 aa, Homo sapiens
  Payload ID: 17085
  Gene Symbol: STX6
  Gene Name: syntaxin 6
  Uniprot ID: O43752
  ENSP ID: ENSP00000258301
MSMEDPFFVVKGEVQKAVNTAQGLFQRWTELLQDPSTATREEIDWTTNELRNNLRSIEWDLEDLDETISIVEANPRKFNLDATELSIRKAFITSTRQVVRDMKDQMSTSSVQALAERKNRQALLGDSGSQNWSTGTTDKYGRLDRELQRANSHFIEEQQAQQQLIVEQQDEQLELVSGSIGVLKNMSQRIGGELEEQAVMLEDFSHELESTQSRLDNVMKKLAKVSHMTSDRRQWCAIAILFAVLLVVLILFLVL

SEQ ID NO: 86042 - protein, 154 aa, Homo sapiens
  Payload ID: 17085
  Gene Symbol: STX6
  Gene Name: syntaxin 6
  Uniprot ID: O43752
  ENSP ID: ENSP00000440188
MKDQMSTSSVQALAERKNRQALLGDSGSQNWSTGTTDKYGRLDRELQRANSHFIEEQQAQQQLIVEQQDEQLELVSGSIGVLKNMSQRIGGELEEQAVMLEDFSHELESTQSRLDNVMKKLAKVSHMTSDRRQWCAIAILFAVLLVVLILFLVL

SEQ ID NO: 86043 - protein, 239 aa, Homo sapiens
  Payload ID: 17086
  Gene Symbol: STX7
  Gene Name: syntaxin 7
  Uniprot ID: O15400
  ENSP ID: ENSP00000356914
MSYTPGVGGDPAQLAQRISSNIQKITQCSVEIQRTLNQLGTPQDSPELRQQLQQKQQYTNQLAKETDKYIKEFGSLPTTPSEQRQRKIQKDRLVAEFTTSLTNFQKVQRQAAEREKEFVARVRASSRVSGSFPEDSSKERNLVSWESQTQPQVQVQDEEITEDDLRLIHERESSIRQLEADIMDINEIFKDLGMMIHEQGDVIDSIEANVENAEVHVQQANQQLSRAADYQKKDSCMLM

SEQ ID NO: 86044 - protein, 261 aa, Homo sapiens
  Payload ID: 17086
  Gene Symbol: STX7
  Gene Name: syntaxin 7
  Uniprot ID: O15400
  ENSP ID: ENSP00000356918
MSYTPGVGGDPAQLAQRISSNIQKITQCSVEIQRTLNQLGTPQDSPELRQQLQQKQQYTNQLAKETDKYIKEFGSLPTTPSEQRQRKIQKDRLVAEFTTSLTNFQKVQRQAAEREKEFVARVRASSRVSGSFPEDSSKERNLVSWESQTQPQVQVQDEEITEDDLRLIHERESSIRQLEADIMDINEIFKDLGMMIHEQGDVIDSIEANVENAEVHVQQANQQLSRAADYQRKSRKTLCIIILILVIGVAIISLIIWGLNH

SEQ ID NO: 86045 - protein, 236 aa, Homo sapiens
  Payload ID: 17087
  Gene Symbol: STX8
  Gene Name: syntaxin 8
  Uniprot ID: Q9UNK0
  ENSP ID: ENSP00000305255
MAPDPWFSTYDSTCQIAQEIAEKIQQRNQYERKGEKAPKLTVTIRALLQNLKEKIALLKDLLLRAVSTHQITQLEGDRRQNLLDDLVTRERLLLASFKNEGAEPDLIRSSLMSEEAKRGAPNPWLFEEPEETRGLGFDEIRQQQQKIIQEQDAGLDALSSIISRQKQMGQEIGNELDEQNEIIDDLANLVENTDEKLRNETRRVNMVDRKSASCGMIMVILLLLVAIVVVAVWPTN

SEQ ID NO: 86046 - protein, 112 aa, Homo sapiens
  Payload ID: 17087
  Gene Symbol: STX8
  Gene Name: syntaxin 8
  ENSP ID: ENSP00000460073
MAPDPWFSTYDSTCQIAQEIAEKIQQRNQYERKGEKAPKLTVTIRALLQNLKEKIALLKDLLLRAVSTHQITQLEGDRRQNLLDDLVTRERLLLASFKNEGAEPDLIRSSLM

SEQ ID NO: 86047 - protein, 44 aa, Homo sapiens
  Payload ID: 17087
  Gene Symbol: STX8
  Gene Name: syntaxin 8
  ENSP ID: ENSP00000460355
MAPDPWFSTYDSTCQIAQEIAEKIQQRNQYERKGEKAPKVQPDE

SEQ ID NO: 86048 - protein, 125 aa, Homo sapiens
  Payload ID: 17087
  Gene Symbol: STX8
  Gene Name: syntaxin 8
  ENSP ID: ENSP00000467749
MSEEAKRGAPNPWLFEEPEETRGLGFDEIRQQQQKIIQEQDAGLDALSSIISRQKQMGQEIGNELDEQNEIIDDLANLVENTDEKLRNETRRVNMVDRKSASCGMIMVILLLLVAIVVVAVWPTN

SEQ ID NO: 86049 - protein, 51 aa, Homo sapiens
  Payload ID: 17087
  Gene Symbol: STX8
  Gene Name: syntaxin 8
  ENSP ID: ENSP00000468093
MAPDPWFSTYDSTCQIAQEIAEKIQQRNQYERKGEKAPKNRTQALMPFPLS

SEQ ID NO: 86050 - protein, 594 aa, Homo sapiens
  Payload ID: 17088
  Gene Symbol: STXBP1
  Gene Name: syntaxin binding protein 1
  Uniprot ID: P61764
  ENSP ID: ENSP00000362396
MAPIGLKAVVGEKIMHDVIKKVKKKGEWKVLVVDQLSMRMLSSCCKMTDIMTEGITIVEDINKRREPLPSLEAVYLITPSEKSVHSLISDFKDPPTAKYRAAHVFFTDSCPDALFNELVKSRAAKVIKTLTEINIAFLPYESQVYSLDSADSFQSFYSPHKAQMKNPILERLAEQIATLCATLKEYPAVRYRGEYKDNALLAQLIQDKLDAYKADDPTMGEGPDKARSQLLILDRGFDPSSPVLHELTFQAMSYDLLPIENDVYKYETSGIGEARVKEVLLDEDDDLWIALRHKHIAEVSQEVTRSLKDFSSSKRMNTGEKTTMRDLSQMLKKMPQYQKELSKYSTHLHLAEDCMKHYQGTVDKLCRVEQDLAMGTDAEGEKIKDPMRAIVPILLDANVSTYDKIRIILLYIFLKNGITEENLNKLIQHAQIPPEDSEIITNMAHLGVPIVTDSTLRRRSKPERKERISEQTYQLSRWTPIIKDIMEDTIEDKLDTKHYPYISTRSSASFSTTAVSARYGHWHKNKAPGEYRSGPRLIIFILGGVSLNEMRCAYEVTQANGKWEVLIGSTHILTPQKLLDTLKKLNKTDEEISS

SEQ ID NO: 86051 - protein, 603 aa, Homo sapiens [sequence omitted]

SEQ ID NO: 86052 - protein, 75 aa, Homo sapiens
  Payload ID: 17088
  Gene Symbol: STXBP1
  Gene Name: syntaxin binding protein 1
  ENSP ID: ENSP00000485361
  MOD_RES (1)..(1): Any amino acid
XKSRAAKVIKTLTEINIAFLPYESQVYSLDSADSFQSFYSPHKAQMKNPILERLAEQIATLCATLKEYPAVRYRG

SEQ ID NO: 86053 - protein, 119 aa, Homo sapiens
  Payload ID: 17088
  Gene Symbol: STXBP1
  Gene Name: syntaxin binding protein 1
  ENSP ID: ENSP00000485397
IMEDTIEDKLDTKHYPYISTRSSASFSTTAVSARYGHWHKNKAPGEYRSGPRLIIFILGGVSLNEMRCAYEVTQANGKWEVLIGSTHILTPTKFLMDLRHPDFRESSRVSFEDQAPTME

SEQ ID NO: 86054 - protein, 102 aa, Homo sapiens
  Payload ID: 17088
  Gene Symbol: STXBP1
  Gene Name: syntaxin binding protein 1
  ENSP ID: ENSP00000485680
MHDVIKKVKKKGEWKVLVVDQLSMRMLSSCCKMTDIMTEGITIVEDINKRREPLPSLEAVYLITPSEKSVHSLISDFKDPPTAKYRAAHVFFTDSCPDALFN

SEQ ID NO: 86055 - protein, 100 aa, Homo sapiens
  Payload ID: 17088
  Gene Symbol: STXBP1
  Gene Name: syntaxin binding protein 1
  ENSP ID: ENSP00000485895
MRMLSSCCKMTDIMTEGITIVEDINKRREPLPSLEAVYLITPSEKSVHSLISDFKDPPTAKYRAAHVFFTDSCPDALFNELVKSRAAKVIKTLTEINIAF

SEQ ID NO: 86056 - protein, 147 aa, Homo sapiens
  Payload ID: 17088
  Gene Symbol: STXBP1
  Gene Name: syntaxin binding protein 1
  ENSP ID: ENSP00000486814
MHDVIKKVKKKGEWKVLVVDQLSMRMLSSCCKMTDIMTEGITIVEDINKRREPLPSLEAVYLITPSEKSVHSLISDFKDPPTAKYRAAHVFFTDSCPDALFNELVKSRAAKVIKTLTEINIAFLPYESQVYSLDSADSFQSFYSPHK

SEQ ID NO: 86057 - protein, 149 aa, Homo sapiens
  Payload ID: 17088
  Gene Symbol: STXBP1
  Gene Name: syntaxin binding protein 1
  ENSP ID: ENSP00000486944
MHDVIKKVKKKGEWKVLVVDQLSMRMLSSCCKMTDIMTEGITIVEDINKRREPLPSLEAVYLITPSEKSVHSLISDFKDPPTAKYRAAHVFFTDSCPDALFNELVKSRAAKVIKTLTEINIAFLPYESQVYSLDSADSFQSFYSPHKAQ

SEQ ID NO: 86058 - protein, 143 aa, Homo sapiens
  Payload ID: 17088
  Gene Symbol: STXBP1
  Gene Name: syntaxin binding protein 1
  ENSP ID: ENSP00000487211
MHDVIKKVKKKGEWKVLVVDQLSMRMLSSCCKMTDIMTEGITIVEDINKRREPLPSLEAVYLITPSEKSVHSLISDFKDPPTAKYRAAHVFFTDSCPDALFNELVKSRAAKVIKTLTEINIAFLPYESQVYSLDSADSFQSFY

SEQ ID NO: 86059 - protein, 593 aa, Homo sapiens
  Payload ID: 17089
  Gene Symbol: STXBP2
  Gene Name: syntaxin binding protein 2
  Uniprot ID: Q15833
  ENSP ID: ENSP00000221283
MAPSGLKAVVGEKILSGVIRSVKKDGEWKVLIMDHPSMRILSSCCKMSDILAEGITIVEDINKRREPIPSLEAIYLLSPTEKSVQALIKDFQGTPTFTYKAAHIFFTDTCPEPLFSELGRSRLAKVVKTLKEIHLAFLPYEAQVFSLDAPHSTYNLYCPFRAEERTRQLEVLAQQIATLCATLQEYPAIRYRKGPEDTAQLAHAVLAKLNAFKADTPSLGEGPEKTRSQLLIMDRAADPVSPLLHELTFQAMAYDLLDIEQDTYRYETTGLSEAREKAVLLDEDDDLWVELRHMHIADVSKKVTELLRTFCESKRLTTDKANIKDLSQILKKMPQYQKELNKYSTHLHLADDCMKHFKGSVEKLCSVEQDLAMGSDAEGEKIKDSMKLIVPVLLDAAVPAYDKIRVLLLYILLRNGVSEENLAKLIQHANVQAHSSLIRNLEQLGGTVTNPGGSGTSSRLEPRERMEPTYQLSRWTPVIKDVMEDAVEDRLDRNLWPFVSDPAPTASSQAAVSARFGHWHKNKAGIEARAGPRLIVYVMGGVAMSEMRAAYEVTRATEGKWEVLIGSSHILTPTRFLDDLKALDKKLEDIALP

SEQ ID NO: 86060 - protein, 590 aa, Homo sapiens
  Payload ID: 17089
  Gene Symbol: STXBP2
  Gene Name: syntaxin binding protein 2
  Uniprot ID: Q15833
  ENSP ID: ENSP00000409471
MAPSGLKAVVGEKILSGVIRSVKKDGEWKVLIMDHPSMRILSSCCKMSDILAEGITIVEDINKRREPIPSLEAIYLLSPTEKALIKDFQGTPTFTYKAAHIFFTDTCPEPLFSELGRSRLAKVVKTLKEIHLAFLPYEAQVFSLDAPHSTYNLYCPFRAEERTRQLEVLAQQIATLCATLQEYPAIRYRKGPEDTAQLAHAVLAKLNAFKADTPSLGEGPEKTRSQLLIMDRAADPVSPLLHELTFQAMAYDLLDIEQDTYRYETTGLSEAREKAVLLDEDDDLWVELRHMHIADVSKKVTELLRTFCESKRLTTDKANIKDLSQILKKMPQYQKELNKYSTHLHLADDCMKHFKGSVEKLCSVEQDLAMGSDAEGEKIKDSMKLIVPVLLDAAVPAYDKIRVLLLYILLRNGVSEENLAKLIQHANVQAHSSLIRNLEQLGGTVTNPGGSGTSSRLEPRERMEPTYQLSRWTPVIKDVMEDAVEDRLDRNLWPFVSDPAPTASSQAAVSARFGHWHKNKAGIEARAGPRLIVYVMGGVAMSEMRAAYEVTRATEGKWEVLIGSSHILTPTRFLDDLKALDKKLEDIALP

SEQ ID NO: 86061 - protein, 604 aa, Homo sapiens
  Payload ID: 17089
  Gene Symbol: STXBP2
  Gene Name: syntaxin binding protein 2
  Uniprot ID: Q15833
  ENSP ID: ENSP00000413606
MAPSGLKAVVGEKILSGVIRSVKKDGEWKVLIMDHPSMRILSSCCKMSDILAEGITIVEDINKRREPIPSLEAIYLLSPTEKAQAQRVIHLPQSVQALIKDFQGTPTFTYKAAHIFFTDTCPEPLFSELGRSRLAKVVKTLKEIHLAFLPYEAQVFSLDAPHSTYNLYCPFRAEERTRQLEVLAQQIATLCATLQEYPAIRYRKGPEDTAQLAHAVLAKLNAFKADTPSLGEGPEKTRSQLLIMDRAADPVSPLLHELTFQAMAYDLLDIEQDTYRYETTGLSEAREKAVLLDEDDDLWVELRHMHIADVSKKVTELLRTFCESKRLTTDKANIKDLSQILKKMPQYQKELNKYSTHLHLADDCMKHFKGSVEKLCSVEQDLAMGSDAEGEKIKDSMKLIVPVLLDAAVPAYDKIRVLLLYILLRNGVSEENLAKLIQHANVQAHSSLIRNLEQLGGTVTNPGGSGTSSRLEPRERMEPTYQLSRWTPVIKDVMEDAVEDRLDRNLWPFVSDPAPTASSQAAVSARFGHWHKNKAGIEARAGPRLIVYVMGGVAMSEMRAAYEVTRATEGKWEVLIGSSHILTPTRFLDDLKALDKKLEDIALP

SEQ ID NO: 86062 - protein, 111 aa, Homo sapiens
  Payload ID: 17089
  Gene Symbol: STXBP2
  Gene Name: syntaxin binding protein 2
  ENSP ID: ENSP00000470313
MDHPSMRILSSCCKMSDILAEGITIVEDINKRREPIPSLEAIYLLSPTEKSVQALIKDFQGTPTFTYKAAHIFFTDTCPEPLFSELGRSRLAKVVKTLKEIHLAFLPYEAQ

SEQ ID NO: 86063 - protein, 169 aa, Homo sapiens
  Payload ID: 17089
  Gene Symbol: STXBP2
  Gene Name: syntaxin binding protein 2
  ENSP ID: ENSP00000471161
MAPSGLKAVVGEKILSGVIRSVKKDGEWKVLIMDHPSMRILSSCCKMSDILAEGITTCPEPLFSELGRSRLAKVVKTLKEIHLAFLPYEAQVFSLDAPHSTYNLYCPFRAEERTRQLEVLAQQIATLCATLQEYPAIRYRKGPEDTAQLAHAVLAKLNAFKADTPSLGE

SEQ ID NO: 86064 - protein, 408 aa, Homo sapiens
  Payload ID: 17089
  Gene Symbol: STXBP2
  Gene Name: syntaxin binding protein 2
  ENSP ID: ENSP00000471327
MAPSGLKAVVGEKILSGVIRSVKKDGEWKVLIMDHPSMRILSSCCKMSDILAEGITIVEDINKRREPIPSLEAIYLLSPTEKSVQALIKDFQGTPTFTYKAAHIFFTDTCPEPLFSELGRSRLAKVVKTLKEIHLAFLPYEAQVFSLDAPHSTYNLYCPFRAEERTRQLEVLAQQIATLCATLQEYPAIRYRKGPEDTAQLAHAVLAKLNAFKADTPSLGEGPEKTRSQLLIMDRAADPVSPLLHELTFQAMAYDLLDIEQDTYRYETTGLSEAREKAVLLDEDDDLWVELRHMHIADVSKKVTELLRTFCESKRLTTDKANIKDLSQILKKMPQYQKELNKDLAMGSDAEGEKIKDSMKLIVPVLLDAAVPAYDKIRVLLLYILLRNATPLDPGTLLHWLGDSSTEV

SEQ ID NO: 86065 - protein, 171 aa, Homo sapiens
  Payload ID: 17089
  Gene Symbol: STXBP2
  Gene Name: syntaxin binding protein 2
  ENSP ID: ENSP00000471585
GVIRSVKKDGEWKVLIMDHPSMRILSSCCKMSDILAEGITIVEDINKRREPIPSLEAIYLLSPTEKSVQALIKDFQGTPTFTYKAAHIFFTDTCPEPLFSELGRSRLAKVVKTLKEIHLAFLPYEAQGPRGHSPVGPRRPGQAERLQGRHSQSGRGPRENPLPAADNGPGS

SEQ ID NO: 86066 - protein, 220 aa, Homo sapiens
  Payload ID: 17089
  Gene Symbol: STXBP2
  Gene Name: syntaxin binding protein 2
  ENSP ID: ENSP00000471737
  MOD_RES (1)..(1): Any amino acid
XLRTFCESKRLTTDKANIKDLSQILKKMPQYQKELNKYSTHLHLADDCMKHFKGSVEKLCSVEQDLAMGSDAEGEKIKDSMKLIVPVLLDAAVPAYDKIRVLLLYILLRNGVSEENLAKLIQHANVQAHSSLIRNLEQLGGTVTNPGGSGTSSRLEPRERMEPTYQLSRWTPVIKDVMEDAVEDRLDRNLWPFVSDPAPTASSQAAVRLLTHPHPDPLPG

SEQ ID NO: 86067 - protein, 149 aa, Homo sapiens
  Payload ID: 17089
  Gene Symbol: STXBP2
  Gene Name: syntaxin binding protein 2
  ENSP ID: ENSP00000473040
  MOD_RES (1)..(1): Any amino acid
XSVEKLCSVEQDLAMGSDAEGEKIKDSMKLIVPVLLDAAVPAYDKIRVLLLYILLRNGVSEENLAKLIQHANVQAHSSLIRNLEQLGGTVTNPGPHQAQPLCDQPPSPQSPCCPPCPACRARGPPAGWSRENAWSPPISCPAGPRSSRM

SEQ ID NO: 86068 - protein, 128 aa, Homo sapiens
  Payload ID: 17089
  Gene Symbol: STXBP2
  Gene Name: syntaxin binding protein 2
  ENSP ID: ENSP00000473406
MEPTYQLSRWTPVIKDVMEDAVEDRLDRNLWPFVSDPAPTASSQAAVSARFGHWHKNKAGIEARAGPRLIVYVMGGVAMSEMRAAYEVTRATEGKWEVLIGSSHILTPTRFLDDLKALDKKLEDIALP

SEQ ID NO: 86069 - protein, 395 aa, Homo sapiens [sequence omitted]

SEQ ID NO: 86070 - protein, 579 aa, Homo sapiens
  Payload ID: 17089
  Gene Symbol: STXBP2
  Gene Name: syntaxin binding protein 2
  ENSP ID: ENSP00000480468
MAPSGLKAVVGEKILSGVIRSVKKDGEWKVLIMDHPSMRILSSCCKMSDILAEGITIVEDINKRREPIPSLEAIYLLSPTEKSVQALIKDFQGTPTFTYKAAHIFFTDTCPEPLFSELGRSRLAKVVKTLKEIHLAFLPYEAQVFSLDAPHSTYNLYCPFRAEERTRQLEVLAQQIATLCATLQEYPAIRYRKGPEDTAQLAHAVLAKLNAFKADTPSLGEGPEKTRSQLLIMDRAADPVSPLLHELTFQAMAYDLLDIEQDTYRYETTGLSEAREKAVLLDEDDDLWVELRHMHIADVSKKVTELLRTFCESKRLTTDKANIKDLSQILKKMPQYQKELNKYSTHLHLADDCMKHFKGSVEKLCSVEQDLAMGSDAEGEKIKDSMKLIVPVLLDAAVPAYDKIRVLLLYILLRNGVSEENLAKLIQHANVQAHSSLIRNLEQLGGTVTNPGGSGTSSRLEPRERMEPTYQLSRWTPVIKDVMEDAVEDRLDRNLWPFVSDPAPTASSQAAVSARFGHWHKNKAGIEARAGPRLIVYVMGGVAMSEMRAAYEVTRATEGSGRCSLAPHTSSPRPASWMT

SEQ ID NO: 86071 - protein, 592 aa, Homo sapiens
  Payload ID: 17090
  Gene Symbol: STXBP3
  Gene Name: syntaxin binding protein 3
  Uniprot ID: O00186
  ENSP ID: ENSP00000359025
MAPPVAERGLKSVVWQKIKATVFDDCKKEGEWKIMLLDEFTTKLLASCCKMTDLLEEGITVVENIYKNREPVRQMKALYFITPTSKSVDCFLHDFASKSENKYKAAYIYFTDFCPDNLFNKIKASCSKSIRRCKEINISFIPHESQVYTLDVPDAFYYCYSPDPGNAKGKDAIMETMADQIVTVCATLDENPGVRYKSKPLDNASKLAQLVEKKLEDYYKIDEKSLIKGKTHSQLLIIDRGFDPVSTVLHELTFQAMAYDLLPIENDTYKYKTDGKEKEAILEEEDDLWVRIRHRHIAVVLEEIPKLMKEISSTKKATEGKTSLSALTQLMKKMPHFRKQITKQVVHLNLAEDCMNKFKLNIEKLCKTEQDLALGTDAEGQKVKDSMRVLLPVLLNKNHDNCDKIRAILLYIFSINGTTEENLDRLIQNVKIENESDMIRNWSYLGVPIVPQSQQGKPLRKDRSAEETFQLSRWTPFIKDIMEDAIDNRLDSKEWPYCSQCPAVWNGSGAVSARQKPRANYLEDRKNGSKLIVFVIGGITYSEVRCAYEVSQAHKSCEVIIGSTHVLTPKKLLDDIKMLNKPKDKVSLIKDE

SEQ ID NO: 86072 - protein, 553 aa, Homo sapiens
  Payload ID: 17091
  Gene Symbol: STXBP4
  Gene Name: syntaxin binding protein 4
  Uniprot ID: Q6ZWJ1
  ENSP ID: ENSP00000365530
MNKNTSTVVSPSLLEKDPAFQMITIAKETGLGLKVLGGINRNEGPLVYIQEIIPGGDCYKDGRLKPGDQLVSVNKESMIGVSFEEAKSIITGAKLRLESAWEIAFIRQKSDNIQPENLSCTSLIEASGEYGPQASTLSLFSSPPEILIPKTSSTPKTNNDILSSCEIKTGYNKTVQIPITSENSTVGLSNTDVASAWTENYGLQEKISLNPSVRFKAEKLEMALNYLGIQPTKEQHQALRQQVQADSKGTVSFGDFVQVARNLFCLQLDEVNVGAHEISNILDSQLLPCDSSEADEMERLKCERDDALKEVNTLKEKLLESDKQRKQLTEELQNVKQEAKAVVEETRALRSRIHLAEAAQRQAHGMEMDYEEVIRLLEAKITELKAQLADYSDQNKESVQDLKKRIMVLDCQLRKSEMARKTFEASTEKLLHFVEAIQEVFSDNSTPLSNLSERRAVLASQTSLTPLGRNGRSIPATLALESKELVKSVRALLDMDCLPYGWEEAYTADGIKYFINHVTQTTSWIHPVMSVLNLSRSEENEEDCSRELPNQKS

SEQ ID NO: 86073 - protein, 245 aa, Homo sapiens
  Payload ID: 17091
  Gene Symbol: STXBP4
  Gene Name: syntaxin binding protein 4
  Uniprot ID: Q6ZWJ1
  ENSP ID: ENSP00000381427
MIGVSFEEAKSIITGAKLSTRLESAWEIAFIRQKSDNIQPENLSCTSLIEASGEYGPQASTLSLFSSPPEILIPKTSSTPKTNNDILSSCEIKTGYNKTVQIPITSENSTVGLSNTDVASAWTENYGLQEKISLNPSVRFKAEKLEMALNYLGIQPTKEQHQALRQQVQADSKGTVSFGDFVQVARNLFCLQLDEVNVGAHEISNILDSQLLPCDSSEADEMERLKCERDDALKEVNTLKWPGQN

SEQ ID NO: 86074 - protein, 320 aa, Homo sapiens
  Payload ID: 17091
  Gene Symbol: STXBP4
  Gene Name: syntaxin binding protein 4
  ENSP ID: ENSP00000385944
MNKNTSTVVSPSLLEKDPAFQMITIAKETGLGLKVLGGINRNEGPLVYIQEIIPGGDCYKDGRLKPGDQLVSVNKESMIGVSFEEAKSIITGAKLRLESAWEIAFIRQKSDNIQPENLSCTSLIEASGEYGPQASTLSLFSSPPEILIPKTSSTPKTNNDILSSCEIKTGYNKTVQIPITSENSTVGLSNTDVASAWTENYGLQEKISLNPSVRFKAEKLEMALNYLGIQPTKEQHQALRQQVQADSKGTVSFGDFVQVARNLFCLQLDEVNVGAHEISNILDSQLLPCDSSEADEMERLKCERDDALKEVNTLKWPGQN

SEQ ID NO: 86075 - protein, 531 aa, Homo sapiens
  Payload ID: 17091
  Gene Symbol: STXBP4
  Gene Name: syntaxin binding protein 4
  ENSP ID: ENSP00000391087
MNKNTSTVVSPSLLEKDPAFQMITIAKETGLGLKVLGGINRNEGPLVYIQEIIPGGDCYKDGRLKPGDQLVSVNKESMIGVSFEEAKSIITGAKLRLESAWEIAFIRQKSDNIQPENLSCTSLIEASGEYGPQASTLSLFSSPPEILIPKTSSTPKTNNDILSSCEIKTGYNKTVQIPITSENSTVGLSNTDVASAWTENYGLQEKISLNPSVRFKAEKLEMALNYLGIQPTKEQHQALRQQVQADSKGTVSFGDFVQVARNLFCLQLDEVNVGAHEISNILDSQLLPCDSSEADEMERLKCERDDALKEVNTLKEAKAVVEETRALRSRIHLAEAAQRQAHGMEMDYEEVIRLLEAKITELKAQLADYSDQNKESVQDLKKRIMVLDCQLRKSEMARKTFEASTEKLLHFVEAIQEVFSDNSTPLSNLSERRAVLASQTSLTPLGRNGRSIPATLALESKELVKSVRALLDMDCLPYGWEEAYTADGIKYFINHVTQTTSWIHPVMSVLNLSRSEENEEDCSRELPNQKS

SEQ ID NO: 86076 - protein, 81 aa, Homo sapiens
  Payload ID: 17091
  Gene Symbol: STXBP4
  Gene Name: syntaxin binding protein 4
  ENSP ID: ENSP00000468799
NNDILSSCEIKTGYNKTVQIPITSENSTVGLSNTGSKLSWYSAHKGTTPSPETASTSRLKRDSVFWRFCPGCQKLVLLAVG

SEQ ID NO: 86077 - protein, 1151 aa, Homo sapiens
  Payload ID: 17092
  Gene Symbol: STXBP5
  Gene Name: syntaxin binding protein 5 (tomosyn)
  Uniprot ID: Q5T5C0
  ENSP ID: ENSP00000321826
MRKFNIRKVLDGLTAGSSSASQQQQQQHPPGNREPEIQETLQSEHFQLCKTVRHGFPYQPSALAFDPVQKILAVGTQTGALRLFGRPGVECYCQHDSGAAVIQLQFLINEGALVSALADDTLHLWNLRQKRPAILHSLKFCRERVTFCHLPFQSKWLYVGTERGNIHIVNVESFTLSGYVIMWNKAIELSSKSHPGPVVHISDNPMDEGKLLIGFESGTVVLWDLKSKKADYRYTYDEAIHSVAWHHEGKQFICSHSDGTLTIWNVRSPAKPVQTITPHGKQLKDGKKPEPCKPILKVEFKTTRSGEPFIILSGGLSYDTVGRRPCLTVMHGKSTAVLEMDYSIVDFLTLCETPYPNDFQEPYAVVVLLEKDLVLIDLAQNGYPIFENPYPLSIHESPVTCCEYFADCPVDLIPALYSVGARQKRQGYSKKEWPINGGNWGLGAQSYPEIIITGHADGSVKFWDASAITLQVLYKLKTSKVFEKSRNKDDRPNTDIVDEDPYAIQIISWCPESRMLCIAGVSAHVIIYRFSKQEVITEVIPMLEVRLLYEINDVETPEGEQPPPLPTPVGGSNPQPIPPQSHPSTSSSSSDGLRDNVPCLKVKNSPLKQSPGYQTELVIQLVWVGGEPPQQITSLAVNSSYGLVVFGNCNGIAMVDYLQKAVLLNLGTIELYGSNDPYRREPRSPRKSRQPSGAGLCDISEGTVVPEDRCKSPTSGSSSPHNSDDEQKMNNFIEKVKTKSRKFSKMVANDIAKMSRKLSLPTDLKPDLDVKDNSFSRSRSSSVTSIDKESREAISALHFCETFTRKTDSSPSPCLWVGTTLGTVLVIALNLPPGGEQRLLQPVIVSPSGTILRLKGAILRMAFLDTTGCLIPPAYEPWREHNVPEEKDEKEKLKKRRPVSVSPSSSQEISENQYAVICSEKQAKVISLPTQNCAYKQNITETSFVLRGDIVALSNSICLACFCANGHIMTFSLPSLRPLLDVYYLPLTNMRIARTFCFTNNGQALYLVSPTEIQRLTYSQETCENLQEMLGELFTPVETPEAPNRGFFKGLFGGGAQSLDREELFGESSSGKASRSLAQHIPGPGGIEGVKGAASGVVGELARARLALDERGQKLGDLEERTAAMLSSAESFSKHAHEIMLKYKDKKWYQF

SEQ ID NO: 86078 - protein, 174 aa, Homo sapiens
  Payload ID: 17092
  Gene Symbol: STXBP5
  Gene Name: syntaxin binding protein 5 (tomosyn)
  ENSP ID: ENSP00000356445
  MOD_RES (1)..(1): Any amino acid
XKAVLLNLGTIELYGSNDPYRREPRSPRKSRQPSGAGLCDISEGTVVPEDRCKSPTSGSSSPHNSDDEQKMNNFIEKAKMSRKLSLPTDLKPDLDVKDNSFSRSRSSSVTSIDKESREAISALHFCETFTRKTDSSPSPCLWVGTTLGTVLVIALNLPPGGEQRLLQPVIVSPS

SEQ ID NO: 86079 - protein, 1098 aa, Homo sapiens
  Payload ID: 17092
  Gene Symbol: STXBP5
  Gene Name: syntaxin binding protein 5 (tomosyn)
  Uniprot ID: Q5T5C0
  ENSP ID: ENSP00000356450
MRKFNIRKVLDGLTAGSSSASQQQQQQHPPGNREPEIQETLQSEHFQLCKTVRHGFPYQPSALAFDPVQKILAVGTQTGALRLFGRPGVECYCQHDSGAAVIQLQFLINEGALVSALADDTLHLWNLRQKRPAILHSLKFCRERVTFCHLPFQSKWLYVGTERGNIHIVNVESFTLSGYVIMWNKAIELSSKSHPGPVVHISDNPMDEGKLLIGFESGTVVLWDLKSKKADYRYTYDEAIHSVAWHHEGKQFICSHSDGTLTIWNVRSPAKPVQTITPHGKQLKDGKKPEPCKPILKVEFKTTRSGEPFIILSGGLSYDTVGRRPCLTVMHGKSTAVLEMDYSIVDFLTLCETPYPNDFQEPYAVVVLLEKDLVLIDLAQNGYPIFENPYPLSIHESPVTCCEYFADCPVDLIPALYSVGARQKRQGYSKKEWPINGGNWGLGAQSYPEIIITGHADGSVKFWDASAITLQVLYKLKTSKVFEKSRNKDDRPNTDIVDEDPYAIQIISWCPESRMLCIAGVSAHVIIYRFSKQEVITEVIPMLEVRLLYEINDVETPEGEQPPPLPTPVGGSNPQPIPPQSHPSTSSSSSDGLRDNVPCLKVKNSPLKQSPGYQTELVIQLVWVGGEPPQQITSLAVNSSYGLVVFGNCNGIAMVDYLQKAVLLNLGTIELYGSNDPYRREPRSPRKSRQPSGAGLCDISEGTVVPEDRCKSPTSDVKDNSFSRSRSSSVTSIDKESREAISALHFCETFTRKTDSSPSPCLWVGTTLGTVLVIALNLPPGGEQRLLQPVIVSPSGTILRLKGAILRMAFLDTTGCLIPPAYEPWREHNVPEEKDEKEKLKKRRPVSVSPSSSQEISENQYAVICSEKQAKVISLPTQNCAYKQNITETSFVLRGDIVALSNSICLACFCANGHIMTFSLPSLRPLLDVYYLPLTNMRIARTFCFTNNGQALYLVSPTEIQRLTYSQETCENLQEMLGELFTPVETPEAPNRGFFKGLFGGGAQSLDREELFGESSSGKASRSLAQHIPGPGGIEGVKGAASGVVGELARARLALDERGQKLGDLEERTAAMLSSAESFSKHAHEIMLKYKDKKWYQF

SEQ ID NO: 86080 - protein, 1115 aa, Homo sapiens
  Payload ID: 17092
  Gene Symbol: STXBP5
  Gene Name: syntaxin binding protein 5 (tomosyn)
  Uniprot ID: Q5T5C0
  ENSP ID: ENSP00000356451
MRKFNIRKVLDGLTAGSSSASQQQQQQHPPGNREPEIQETLQSEHFQLCKTVRHGFPYQPSALAFDPVQKILAVGTQTGALRLFGRPGVECYCQHDSGAAVIQLQFLINEGALVSALADDTLHLWNLRQKRPAILHSLKFCRERVTFCHLPFQSKWLYVGTERGNIHIVNVESFTLSGYVIMWNKAIELSSKSHPGPVVHISDNPMDEGKLLIGFESGTVVLWDLKSKKADYRYTYDEAIHSVAWHHEGKQFICSHSDGTLTIWNVRSPAKPVQTITPHGKQLKDGKKPEPCKPILKVEFKTTRSGEPFIILSGGLSYDTVGRRPCLTVMHGKSTAVLEMDYSIVDFLTLCETPYPNDFQEPYAVVVLLEKDLVLIDLAQNGYPIFENPYPLSIHESPVTCCEYFADCPVDLIPALYSVGARQKRQGYSKKEWPINGGNWGLGAQSYPEIIITGHADGSVKFWDASAITLQVLYKLKTSKVFEKSRNKDDRPNTDIVDEDPYAIQIISWCPESRMLCIAGVSAHVIIYRFSKQEVITEVIPMLEVRLLYEINDVETPEGEQPPPLPTPVGGSNPQPIPPQSHPSTSSSSSDGLRDNVPCLKVKNSPLKQSPGYQTELVIQLVWVGGEPPQQITSLAVNSSYGLVVFGNCNGIAMVDYLQKAVLLNLGTIELYGSNDPYRREPRSPRKSRQPSGAGLCDISEGTVVPEDRCKSPTSAKMSRKLSLPTDLKPDLDVKDNSFSRSRSSSVTSIDKESREAISALHFCETFTRKTDSSPSPCLWVGTTLGTVLVIALNLPPGGEQRLLQPVIVSPSGTILRLKGAILRMAFLDTTGCLIPPAYEPWREHNVPEEKDEKEKLKKRRPVSVSPSSSQEISENQYAVICSEKQAKVISLPTQNCAYKQNITETSFVLRGDIVALSNSICLACFCANGHIMTFSLPSLRPLLDVYYLPLTNMRIARTFCFTNNGQALYLVSPTEIQRLTYSQETCENLQEMLGELFTPVETPEAPNRGFFKGLFGGGAQSLDREELFGESSSGKASRSLAQHIPGPGGIEGVKGAASGVVGELARARLALDERGQKLGDLEERTAAMLSSAESFSKHAHEIMLKYKDKKWYQF

SEQ ID NO: 86081 - protein, 263 aa, Homo sapiens
  Payload ID: 17092
  Gene Symbol: STXBP5
  Gene Name: syntaxin binding protein 5 (tomosyn)
  ENSP ID: ENSP00000376112
IELYGSNDPYRREPRSPRKSRQPSGGVLIVTSCMCGLSSLYSESMKKLRSSFLTGLCDISEGTVVPEDRCKSPTSAKMSRKLSLPTDLKPDLDVKDNSFSRSRSSSVTSIDKESREAISALHFCETFTRKTDSSPSPCLWVGTTLGTVLVIALNLPPGGEQRLLQPVIVSPSGTILRLKGAILRMAFLDTTGCLIPPAYEPWREHNVPEEKDEKEKLKKRRPVSVSPSSSQEISENQYAVICSEKQAKVISLPTQNCAYKQNI

SEQ ID NO: 86082 - protein, 308 aa, Homo sapiens
  Payload ID: 17092
  Gene Symbol: STXBP5
  Gene Name: syntaxin binding protein 5 (tomosyn)
  ENSP ID: ENSP00000441479
MRKFNIRKVLDGLTAGSSSASQQQQQQHPPGNREPEIQETLQSEHFQLCKTVRHGFPYQPSALAFDPVQKILAVGTQTGALRLFGRPGVECYCQHDSGAAVIQLQFLINEGALVSALADDTLHLWNLRQKRPAILHSLKFCRERVTFCHLPFQSKWLYVGTERGNIHIVNVESFTLSGYVIMWNKAIELSSKSHPGPVVHISDNPMDEGKLLIGFESGTVVLWDLKSKKADYRYTYDEAIHSVAWHHEGKQFICSHSDGTLTIWNVRSPAKPVQTITPHGKQLKDGKKPEPCKPILKVEFKTTRSGVC

SEQ ID NO: 86083 - protein, 1186 aa, Homo sapiens
  Payload ID: 17093
  Gene Symbol: STXBP5L
  Gene Name: syntaxin binding protein 5-like
  Uniprot ID: Q9Y2K9
  ENSP ID: ENSP00000273666
MKKFNFRKVLDGLTASSPGSGSSSGSNSGGGAGSGSVHPAGTAGVLREEIQETLTSEYFQICKTVRHGFPHQPTALAFDPVQKILAIGTRTGAIRILGRPGVDCYCQHESGAAVLQLQFLINEGALVSASSDDTLHLWNLRQKRPAILHSLKFNRERITYCHLPFQSKWLYVGTERGNTHIVNIESFILSGYVIMWNKAIELSTKTHPGPVVHLSDSPRDEGKLLIGYENGTVVFWDLKSKRAELRVYYDEAIHSIDWHHEGKQFMCSHSDGSLTLWNLKSPSRPFQTTIPHGKSQREGRKSESCKPILKVEYKTCKNSEPFIIFSGGLSYDKACRRPSLTIMHGKAITVLEMDHPIVEFLTLCETPYPNEFQEPYAVVVLLEKDLIVVDLTQSNFPIFENPYPMDIHESPVTCTAYFADCPPDLILVLYSIGVKHKKQGYSNKEWPISGGAWNLGAQTYPEIIITGHADGSIKFWDASAITLQMLYKLKTSKVFEKQKVGEGKQTCEIVEEDPFAIQMIYWCPESRIFCVSGVSAYVIIYKFSRHEITTEIVSLEVRLQYDVEDIITPEPETSPPFPDLSAQLPSSRSLSGSTNTVASEGVTKDSIPCLNVKTRPVRMPPGYQAELVIQLVWVDGEPPQQITSLAVSSAYGIVAFGNCNGLAVVDFIQKTVLLSMGTIDLYRSSDLYQRQPRSPRKNKQFIADNFCMRGLSNFYPDLTKRIRTSYQSLTELNDSPVPLELERCKSPTSDHVNGHCTSPTSQSCSSGKRLSSADVSKVNRWGPGRPPFRKAQSAACMEISLPVTTEENRENSYNRSRSSSISSIDKDSKEAITALYFMDSFARKNDSTISPCLFVGTSLGMVLIISLNLPLADEQRFTEPVMVLPSGTFLSLKGAVLTFSCMDRMGGLMQPPYEVWRDPNNIDENEKSWRRKVVMNSSSASQEIGDHQYTIICSEKQAKVFSLPSQTCLYVHNITETSFILQANVVVMCSSACLACFCANGHIMIMSLPSLRPMLDVNYLPLTDMRIARTFCFTNEGQALYLVSPTEIQRLTYSQEMCDNLQDMLGDLFTPIETPEAQNRGFLKGLFGGSGQTFDREELFGEASAGKASRSLAQHIPGPGSIEGMKGAAGGVMGELTRARIALDERGQRLGELEEKTAGMMTSAEAFSKHAHELMLKYKDKKWYQF

SEQ ID NO: 86084 - protein, 127 aa, Homo sapiens
  Payload ID: 17093
  Gene Symbol: STXBP5L
  Gene Name: syntaxin binding protein 5-like
  ENSP ID: ENSP00000419404
MKKFNFRKVLDGLTASSPGSGSSSGSNSGGGAGSGSVHPAGTAGVLREEIQETLTSEYFQICKTVRHGFPHQPTALAFDPVQKILAIGTRTGAIRILGRPGVDCYCQHESGAAVLQLQFLINEGALV

SEQ ID NO: 86085 - protein, 1002 aa, Homo sapiens
  Payload ID: 17093
  Gene Symbol: STXBP5L
  Gene Name: syntaxin binding protein 5-like
  ENSP ID: ENSP00000419627
MKKFNFRKVLDGLTASSPGSGSSSGSNSGGGAGSGSVHPAGTAGVLREEIQETLTSEYFQICKTVRHGFPHQPTALAFDPVQKILAIGTRTGAIRILGRPGVDCYCQHESGAAVLQLQFLINEGALVSASSDDTLHLWNLRQKRPAILHSLKFNRERITYCHLPFQSKWLYVGTERGNTHIVNIESFILSGYVIMWNKAIELSTKTHPGPVVHLSDSPRDEGKLLIGYENGTVVFWDLKSKRAELRVYYDEAIHSIDWHHEGKQFMCSHSDGSLTLWNLKSPSRPFQTTIPHGKSQREGRKSESCKPILKVEYKTCKNSEPFIIFSGGLSYDKACRRPSLTIMHGKAITVLEMDHPIVEFLTLCETPYPNEFQEPYAVVVLLEKDLIVVDLTQSNFPIFENPYPMDIHESPVTCTAYFADCPPDLILVLYSIGVKHKKQGYSNKEWPISGGAWNLGAQTYPEIIITGHADGSIKFWDASAITLQMLYKLKTSKVFEKQKVGEGKQTCEIVEEDPFAIQMIYWCPESRIFCVSGVSAYVIIYKFSRHEITTEIVSLEVRLQYDVEDIITPEPETSPPFPDLSAQLPSSRSLSGSTNTVASEGVTKDSIPCLNVKTRPVRMPPGYQAELVIQLVWVDGEPPQQITSLAVSSAYGIVAFGNCNGLAVVDFIQKTVLLSMGTIDLYRSSDLYQRQPRSPRKNKQFIAGLTELNDSPVPLELERCKSPTSDHVNGHCTSPTSQSCSSGKRLSSADVSKVNRWGPGRPPFRKAQSAACMEISLPVTTEENRENSYNRSRSSSISSIDKDSKEAITALYFMDSFARKNDSTISPCLFVGTSLGMVLIISLNLPLADEQRFTEPVMVLPSGTFLSLKGAVLTFSCMDRMGGLMQPPYEVWRDPNNIDENEKSWRRKVVMNSSSASQEIGDHQYTIICSEKQAKVFSLPSQTCLYVHNITETSFILQANVVVMCSSACLACFCANGHIMIMRYLPSYKLSGNHNNTSKVQS

SEQ ID NO: 86086 - protein, 1162 aa, Homo sapiens
  Payload ID: 17093
  Gene Symbol: STXBP5L
  Gene Name: syntaxin binding protein 5-like
  ENSP ID: ENSP00000420019
MKKFNFRKVLDGLTASSPGSGSSSGSNSGGGAGSGSVHPAGTAGVLREEIQETLTSEYFQICKTVRHGFPHQPTALAFDPVQKILAIGTRTGAIRILGRPGVDCYCQHESGAAVLQLQFLINEGALVSASSDDTLHLWNLRQKRPAILHSLKFNRERITYCHLPFQSKWLYVGTERGNTHIVNIESFILSGYVIMWNKAIELSTKTHPGPVVHLSDSPRDEGKLLIGYENGTVVFWDLKSKRAELRVYYDEAIHSIDWHHEGKQFMCSHSDGSLTLWNLKSPSRPFQTTIPHGKSQREGRKSESCKPILKVEYKTCKNSEPFIIFSGGLSYDKACRRPSLTIMHGKAITVLEMDHPIVEFLTLCETPYPNEFQEPYAVVVLLEKDLIVVDLTQSNFPIFENPYPMDIHESPVTCTAYFADCPPDLILVLYSIGVKHKKQGYSNKEWPISGGAWNLGAQTYPEIIITGHADGSIKFWDASAITLQMLYKLKTSKVFEKQKVGEGKQTCEIVEEDPFAIQMIYWCPESRIFCVSGVSAYVIIYKFSRHEITTEIVSLEVRLQYDVEDIITPEPETSPPFPDLSAQLPSSRSLSGSTNTVASEGVTKDSIPCLNVKTRPVRMPPGYQAELVIQLVWVDGEPPQQITSLAVSSAYGIVAFGNCNGLAVVDFIQKTVLLSMGTIDLYRSSDLYQRQPRSPRKNKQFIAGLTELNDSPVPLELERCKSPTSDHVNGHCTSPTSQSCSSGKRLSSADVSKVNRWGPGRPPFRKAQSAACMEISLPVTTEENRENSYNRSRSSSISSIDKDSKEAITALYFMDSFARKNDSTISPCLFVGTSLGMVLIISLNLPLADEQRFTEPVMVLPSGTFLSLKGAVLTFSCMDRMGGLMQPPYEVWRDPNNIDENEKSWRRKVVMNSSSASQEIGDHQYTIICSEKQAKVFSLPSQTCLYVHNITETSFILQANVVVMCSSACLACFCANGHIMIMSLPSLRPMLDVNYLPLTDMRIARTFCFTNEGQALYLVSPTEIQRLTYSQEMCDNLQDMLGDLFTPIETPEAQNRGFLKGLFGGSGQTFDREELFGEASAGKASRSLAQHIPGPGSIEGMKGAAGGVMGELTRARIALDERGQRLGELEEKTAGMMTSAEAFSKHAHELMLKYKDKKWYQF

SEQ ID NO: 86087 - protein, 1129 aa, Homo sapiens
  Payload ID: 17093
  Gene Symbol: STXBP5L
  Gene Name: syntaxin binding protein 5-like
  ENSP ID: ENSP00000420167
MKKFNFRKVLDGLTASSPGSGSSSGSNSGGGAGSGSVHPAGTAGVLREEIQETLTSEYFQICKTVRHGFPHQPTALAFDPVQKILAIGTRTGAIRILGRPGVDCYCQHESGAAVLQLQFLINEGALVSASSDDTLHLWNLRQKRPAILHSLKFNRERITYCHLPFQSKWLYVGTERGNTHIVNIESFILSGYVIMWNKAIELSTKTHPGPVVHLSDSPRDEGKLLIGYENGTVVFWDLKSKRAELRVYYDEAIHSIDWHHEGKQFMCSHSDGSLTLWNLKSPSRPFQTTIPHGKSQREGRKSESCKPILKVEYKTCKNSEPFIIFSGGLSYDKACRRPSLTIMHGKAITVLEMDHPIVEFLTLCETPYPNEFQEPYAVVVLLEKDLIVVDLTQSNFPIFENPYPMDIHESPVTCTAYFADCPPDLILVLYSIGVKHKKQGYSNKEWPISGGAWNLGAQTYPEIIITGHADGSIKFWDASAITLQMLYKLKTSKVFEKQKVGEGKQTCEIVEEDPFAIQMIYWCPESRIFCVSGVSAYVIIYKFSRHEITTEIVSLEVRLQYDVEDIITPEPETSPPFPDLSAQLPSSRSLSGSTNTVASEGVTKDSIPCLNVKTRPVRMPPGYQAELVIQLVWVDGEPPQQITSLAVSSAYGIVAFGNCNGLAVVDFIQKTVLLSMGTIDLYRSSDLYQRQPRSPRKNKQFIADNFCMRGLSNFYPDLTKRIRTSYQSLTELNDSPVPLELERCKSPTSENRENSYNRSRSSSISSIDKDSKEAITALYFMDSFARKNDSTISPCLFVGTSLGMVLIISLNLPLADEQRFTEPVMVLPSGTFLSLKGAVLTFSCMDRMGGLMQPPYEVWRDPNNIDENEKSWRRKVVMNSSSASQEIGDHQYTIICSEKQAKVFSLPSQTCLYVHNITETSFILQANVVVMCSSACLACFCANGHIMIMSLPSLRPMLDVNYLPLTDMRIARTFCFTNEGQALYLVSPTEIQRLTYSQEMCDNLQDMLGDLFTPIETPEAQNRGFLKGLFGGSGQTFDREELFGEASAGKASRSLAQHIPGPGSIEGMKGAAGGVMGELTRARIALDERGQRLGELEEKTAGMMTSAEAFSKHAHELMLKYKDKKWYQF

SEQ ID NO: 86088 - protein, 1000 aa, Homo sapiens
  Payload ID: 17093
  Gene Symbol: STXBP5L
  Gene Name: syntaxin binding protein 5-like
  ENSP ID: ENSP00000420287
MKKFNFRKVLDGLTASSPGSGSSSGSNSGGGAGSGSVHPAGTAGVLREEIQETLTSEYFQICKTVRHGFPHQPTALAFDPVQKILAIGTRTGAIRILGRPGVDCYCQHESGAAVLQLQFLINEGALVSASSDDTLHLWNLRQKRPAILHSLKFNRERITYCHLPFQSKWLYVGTERGNTHIVNIESFILSGYVIMWNKAIELSTKTHPGPVVHLSDSPRDEGKLLIGYENGTVVFWDLKSKRAELRVYYDEAIHSIDWHHEGKQFMCSHSDGSLTLWNLKSPSRPFQTTIPHGKSQREGRKSESCKPILKVEYKTCKNSEPFIIFSGGLSYDKACRRPSLTIMHGKAITVLEMDHPIVEFLTLCETPYPNEFQEPYAVVVLLEKDLIVVDLTQSNFPIFENPYPMDIHESPVTCTAYFADCPPDLILVLYSIGVKHKKQGYSNKEWPISGGAWNLGAQTYPEIIITGHADGSIKFWDASAITLQMLYKLKTSKVFEKQKVGEGKQTCEIVEEDPFAIQMIYWCPESRIFCVSGVSAYVIIYKFSRHEITTEIVSLEVRLQYDVEDIITPEPETSPPFPDLSAQLPSSRSLSGSTNTVASEGVTKDSIPCLNVKTRPVRMPPGYQAELVIQLVWVDGEPPQQITSLAVSSAYGIVAFGNCNGLAVVDFIQKTVLLSMGTIDLYRSSDLYQRQPRSPRKNKQFIADNFCMRGLSNFYPDLTKRIRTSYQSLTELNDSPVPLELERCKSPTSGLATRTPESALGFYRNEISAMRQRNQVYHLPENRENSYNRSRSSSISSIDKDSKEAITALYFMDSFARKNDSTISPCLFVGTSLGMVLIISLNLPLADEQRFTEPVMVLPSGTFLSLKGAVLTFSCMDRMGGLMQPPYEVWRDPNNIDENEKSWRRKVVMNSSSASQEIGDHQYTIICSEKQAKVFSLPSQTCLYVHNITETSFILQANVVVMCSSACLACFCANGHIMIMRYLPSYKLSGNHNNTSKVQS

SEQ ID NO: 86089 - protein, 74 aa, Homo sapiens
  Payload ID: 17093
  Gene Symbol: STXBP5L
  Gene Name: syntaxin binding protein 5-like
  Uniprot ID: Q9Y2K9
  ENSP ID: ENSP00000420642
MKKFNFRKVLDGLTASSPGSGSSSGSNSGGGAGSGSVHPAGTAGVLREEIQETLTSEYFQICKFGMVFLISPQH

SEQ ID NO: 86090 - protein, 1026 aa, Homo sapiens
  Payload ID: 17093
  Gene Symbol: STXBP5L
  Gene Name: syntaxin binding protein 5-like
  ENSP ID: ENSP00000420666
MKKFNFRKVLDGLTASSPGSGSSSGSNSGGGAGSGSVHPAGTAGVLREEIQETLTSEYFQICKTVRHGFPHQPTALAFDPVQKILAIGTRTGAIRILGRPGVDCYCQHESGAAVLQLQFLINEGALVSASSDDTLHLWNLRQKRPAILHSLKFNRERITYCHLPFQSKWLYVGTERGNTHIVNIESFILSGYVIMWNKAIELSTKTHPGPVVHLSDSPRDEGKLLIGYENGTVVFWDLKSKRAELRVYYDEAIHSIDWHHEGKQFMCSHSDGSLTLWNLKSPSRPFQTTIPHGKSQREGRKSESCKPILKVEYKTCKNSEPFIIFSGGLSYDKACRRPSLTIMHGKAITVLEMDHPIVEFLTLCETPYPNEFQEPYAVVVLLEKDLIVVDLTQSNFPIFENPYPMDIHESPVTCTAYFADCPPDLILVLYSIGVKHKKQGYSNKEWPISGGAWNLGAQTYPEIIITGHADGSIKFWDASAITLQMLYKLKTSKVFEKQKVGEGKQTCEIVEEDPFAIQMIYWCPESRIFCVSGVSAYVIIYKFSRHEITTEIVSLEVRLQYDVEDIITPEPETSPPFPDLSAQLPSSRSLSGSTNTVASEGVTKDSIPCLNVKTRPVRMPPGYQAELVIQLVWVDGEPPQQITSLAVSSAYGIVAFGNCNGLAVVDFIQKTVLLSMGTIDLYRSSDLYQRQPRSPRKNKQFIADNFCMRGLSNFYPDLTKRIRTSYQSLTELNDSPVPLELERCKSPTSDHVNGHCTSPTSQSCSSGKRLSSADVSKVNRWGPGRPPFRKAQSAACMEISLPVTTEENRENSYNRSRSSSISSIDKDSKEAITALYFMDSFARKNDSTISPCLFVGTSLGMVLIISLNLPLADEQRFTEPVMVLPSGTFLSLKGAVLTFSCMDRMGGLMQPPYEVWRDPNNIDENEKSWRRKVVMNSSSASQEIGDHQYTIICSEKQAKVFSLPSQTCLYVHNITETSFILQANVVVMCSSACLACFCANGHIMIMRYLPSYKLSGNHNNTSKVQS

SEQ ID NO: 86091 - protein, 210 aa, Homo sapiens
  Payload ID: 17094
  Gene Symbol: STXBP6
  Gene Name: syntaxin binding protein 6 (amisyn)
  Uniprot ID: Q8NFX7
  ENSP ID: ENSP00000324302
MSAKSAISKEIFAPLDERMLGAVQVKRRTKKKIPFLATGGQGEYLTYICLSVTNKKPTQASITKVKQFEGSTSFVRRSQWMLEQLRQVNGIDPNGDSAEFDLLFENAFDQWVASTASEKCTFFQILHHTCQRYLTDRKPEFINCQSKIMGGNSILHSAADSVTSAVQKASQALNERGERLGRAEEKTEDLKNSAQQFAETAHKLAMKHKC

SEQ ID NO: 86092 - protein, 210 aa, Homo sapiens; identical to SEQ ID NO: 86091
  Payload ID: 17094
  Gene Symbol: STXBP6
  Gene Name: syntaxin binding protein 6 (amisyn)
  Uniprot ID: Q8NFX7
  ENSP ID: ENSP00000379928

SEQ ID NO: 86093 - protein, 210 aa, Homo sapiens; identical to SEQ ID NO: 86091
  Payload ID: 17094
  Gene Symbol: STXBP6
  Gene Name: syntaxin binding protein 6 (amisyn)
  Uniprot ID: Q8NFX7
  ENSP ID: ENSP00000397212

SEQ ID NO: 86094 - protein, 65 aa, Homo sapiens
  Payload ID: 17094
  Gene Symbol: STXBP6
  Gene Name: syntaxin binding protein 6 (amisyn)
  ENSP ID: ENSP00000447268
MSAKSAISKEIFAPLDERMLGAVQVKRRTKKKIPFLATGGQGEYLTYICLSDIKSASKEKTFSEF

SEQ ID NO: 86095 - protein, 108 aa, Homo sapiens
  Payload ID: 17094
  Gene Symbol: STXBP6
  Gene Name: syntaxin binding protein 6 (amisyn)
  Uniprot ID: Q8NFX7
  ENSP ID: ENSP00000447655
MSACFLDTRRAAFLQCDLPSSYRILTLPESGHCGSAEPVSDAPALLLSGNSILHSAADSVTSAVQKASQALNERGERLGRAEEKTEDLKNSAQQFAETAHKLAMKHKC

SEQ ID NO: 86096 - protein, 210 aa, Homo sapiens; identical to SEQ ID NO: 86091
  Payload ID: 17094
  Gene Symbol: STXBP6
  Gene Name: syntaxin binding protein 6 (amisyn)
  Uniprot ID: Q8NFX7
  ENSP ID: ENSP00000449379

SEQ ID NO: 86097 - protein, 210 aa, Homo sapiens; identical to SEQ ID NO: 86091
  Payload ID: 17094
  Gene Symbol: STXBP6
  Gene Name: syntaxin binding protein 6 (amisyn)
  Uniprot ID: Q8NFX7
  ENSP ID: ENSP00000449536

SEQ ID NO: 86098 - protein, 505 aa, Homo sapiens
  Payload ID: 17095
  Gene Symbol: SNTA1
  Gene Name: syntrophin, alpha 1
  Uniprot ID: Q13424
  ENSP ID: ENSP00000217381
MASGRRAPRTGLLELRAGAGSGAGGERWQRVLLSLAEDVLTVSPADGDPGPEPGAPREQEPAQLNGAAEPGAGPPQLPEALLLQRRRVTVRKADAGGLGISIKGGRENKMPILISKIFKGLAADQTEALFVGDAILSVNGEDLSSATHDEAVQVLKKTGKEVVLEVKYMKDVSPYFKNSTGGTSVGWDSPPASPLQRQPSSPGPTPRNFSEAKHMSLKMAYVSKRCTPNDPEPRYLEICSADGQDTLFLRAKDEASARSWATAIQAQVNTLTPRVKDELQALLAATSTAGSQDIKQIGWLTEQLPSGGTAPTLALLTEKELLLYLSLPETREALSRPARTAPLIATRLVHSGPSKGSVPYDAELSFALRTGTRHGVDTHLFSVESPQELAAWTRQLVDGCHRAAEGVQEVSTACTWNGRPCSLSVHIDKGFTLWAAEPGAARAVLLRQPFEKLQMSSDDGASLLFLDFGGAEGEIQLDLHSCPKTIVFIIHSFLSAKVTRLGLLA

SEQ ID NO: 86099 - protein, 538 aa, Homo sapiens [sequence omitted]

SEQ ID NO: 86100 - protein, 28 aa, Homo sapiens
  Payload ID: 17096
  Gene Symbol: SNTB1
  Gene Name: syntrophin, beta 1 (dystrophin-associated protein A1, 59kDa, basic component 1)
  ENSP ID: ENSP00000429292
MAVAAAAAAAGPAGAGGGRAQRSGLLEV

SEQ ID NO: 86101 - protein, 538 aa, Homo sapiens [sequence omitted]

SEQ ID NO: 86102 - protein, 540 aa, Homo sapiens
  Payload ID: 17097
  Gene Symbol: SNTB2
  Gene Name: syntrophin, beta 2 (dystrophin-associated protein A1, 59kDa, basic component 2)
  Uniprot ID: Q13425
  ENSP ID: ENSP00000338191
MRVAAATAAAGAGPAMAVWTRATKAGLVELLLRERWVRVVAELSGESLSLTGDAAAAELEPALGPAAAAFNGLPNGGGAGDSLPGSPSRGLGPPSPPAPPRGPAGEAGASPPVRRVRVVKQEAGGLGISIKGGRENRMPILISKIFPGLAADQSRALRLGDAILSVNGTDLRQATHDQAVQALKRAGKEVLLEVKFIREVTPYIKKPSLVSDLPWEGAAPQSPSFSGSEDSGSPKHQNSTKDRKIIPLKMCFAARNLSMPDLENRLIELHSPDSRNTLILRCKDTATAHSWFVAIHTNIMALLPQVLAELNAMLGATSTAGGSKEVKHIAWLAEQAKLDGGRQQWRPVLMAVTEKDLLLYDCMPWTRDAWASPCHSYPLVATRLVHSGSGCRSPSLGSDLTFATRTGSRQGIEMHLFRVETHRDLSSWTRILVQGCHAAAELIKEVSLGCMLNGQEVRLTIHYENGFTISRENGGSSSILYRYPFERLKMSADDGIRNLYLDFGGPEGELTMDLHSCPKPIVFVLHTFLSAKVTRMGLLV

SEQ ID NO: 86103 - protein, 139 aa, Homo sapiens
  Payload ID: 17097
  Gene Symbol: SNTB2
  Gene Name: syntrophin, beta 2 (dystrophin-associated protein A1, 59kDa, basic component 2)
  ENSP ID: ENSP00000353686
  MOD_RES (1)..(1): Any amino acid
XPHLQDLPRAGCRPEPGAAAGRRHPVGERHRPAPGHPRPGRAGAEARGQGVKFIREVTPYIKKPSLVSDLPWEGAAPQSPSFSGSEDSGSPKHQNSTKDRKIIPLKMCFAARNLSMPDLENRLIELHSPDSRNTLILRC

SEQ ID NO: 86104 - protein, 162 aa, Homo sapiens
  Payload ID: 17097
  Gene Symbol: SNTB2
  Gene Name: syntrophin, beta 2 (dystrophin-associated protein A1, 59kDa, basic component 2)
  ENSP ID: ENSP00000432201
  MOD_RES (1)..(1): Any amino acid
XGRENRMPILISKIFPGLAADQSRALRLGDAILSVNGTDLRQATHDQAVQALKRAGKEVLLEVKFIREVTPYIKKPSLVSDLPWEGAAPQSPSFSGSEDSGSPKHQNSTKDRKIIPLKMCFAARNLSMPDLENRLIELHSPDSRNTLILRCKDTATAHSWQN

SEQ ID NO: 86105 - protein, 267 aa, Homo sapiens
  Payload ID: 17097
  Gene Symbol: SNTB2
  Gene Name: syntrophin, beta 2 (dystrophin-associated protein A1, 59kDa, basic component 2)
  Uniprot ID: Q13425
  ENSP ID: ENSP00000436443
MRVAAATAAAGAGPAMAVWTRATKAGLVELLLRERWVRVVAELSGESLSLTGDAAAAELEPALGPAAAAFNGLPNGGGAGDSLPGSPSRGLGPPSPPAPPRGPAGEAGASPPVRRVRVVKQEAGGLGISIKGGRENRMPILISKIFPGLAADQSRALRLGDAILSVNGTDLRQATHDQAVQALKRAGKEVLLEVKFIREVTPYIKKPSLVSDLPWEGAAPQSPSFSGSEDSGSPKHQNSTKDRKIIPLKMCFAARNLSMPDLENRQN

SEQ ID NO: 86106 - protein, 50 aa, Homo sapiens
  Payload ID: 17097
  Gene Symbol: SNTB2
  Gene Name: syntrophin, beta 2 (dystrophin-associated protein A1, 59kDa, basic component 2)
  ENSP ID: ENSP00000458573
  MOD_RES (1)..(1): Any amino acid
XPHLQDLPRAGCRPEPGAAAGRRHPVGERHRPAPGHPRPGRAGAEARGQG

SEQ ID NO: 86107 - protein, 62 aa, Homo sapiens
  Payload ID: 17097
  Gene Symbol: SNTB2
  Gene Name: syntrophin, beta 2 (dystrophin-associated protein A1, 59kDa, basic component 2)
  ENSP ID: ENSP00000459910
  MOD_RES (1)..(1): Any amino acid
XGRENRMPILISKIFPGLAADQSRALRLGDAILSVNGTDLRQATHDQAVQALKRAGKEVLLE

SEQ ID NO: 86108 - protein, 193 aa, Homo sapiens
  Payload ID: 17097
  Gene Symbol: SNTB2
  Gene Name: syntrophin, beta 2 (dystrophin-associated protein A1, 59kDa, basic component 2)
  ENSP ID: ENSP00000461506
MRVAAATAAAGAGPAMAVWTRATKAGLVELLLRERWVRVVAELSGESLSLTGDAAAAELEPALGPAAAAFNGLPNGGGAGDSLPGSPSRGLGPPSPPAPPRGPAGEAGASPPVRRVRVVKQEAGGLGISIKGGRENRMPILISKIFPGLAADQSRALRLGDAILSVNGTDLRQATHDQAVQALKRAGKEVLLE

SEQ ID NO: 86109 - protein, 193 aa, Homo sapiens; identical to SEQ ID NO: 86108
  Payload ID: 17097
  Gene Symbol: SNTB2
  Gene Name: syntrophin, beta 2 (dystrophin-associated protein A1, 59kDa, basic component 2)
  ENSP ID: ENSP00000461734

SEQ ID NO: 86110 - protein, 64 aa, Homo sapiens
  Payload ID: 17097
  Gene Symbol: SNTB2
  Gene Name: syntrophin, beta 2 (dystrophin-associated protein A1, 59kDa, basic component 2)
  ENSP ID: ENSP00000462765
  MOD_RES (1)..(1): Any amino acid
XGRENRMPILISKIFPGLAADQSRALRLGDAILSVNGTDLRQATHDQAVQALKRAGKEVLLEGL

SEQ ID NO: 86111 - protein, 62 aa, Homo sapiens; identical to SEQ ID NO: 86107
  Payload ID: 17097
  Gene Symbol: SNTB2
  Gene Name: syntrophin, beta 2 (dystrophin-associated protein A1, 59kDa, basic component 2)
  ENSP ID: ENSP00000478662
  MOD_RES (1)..(1): Any amino acid

SEQ ID NO: 86112 - protein, 480 aa, Homo sapiens
  Payload ID: 17098
  Gene Symbol: SNTG1
  Gene Name: syntrophin, gamma 1
  Uniprot ID: Q9NSN8
  ENSP ID: ENSP00000276467
MDFRTACEETKTGICLLQDGNQEPFKVRLHLAKDILMIQEQDVICVSGEPFYSGERTVTIRRQTVGGFGLSIKGGAEHNIPVVVSKISKEQRAELSGLLFIGDAILQINGINVRKCRHEEVVQVLRNAGEEVTLTVSFLKRAPAFLKLPLNEDCACAPSDQSSGTSSPLCDSGLHLNYHPNNTDTLSCSSWPTSPGLRWEKRWCDLRLIPLLHSRFSQYVPGTDLSRQNAFQVIAVDGVCTGIIQCLSAEDCVDWLQAIATNISNLTKHNIKKINRNFPVNQQIVYMGWCEAREQDPLQDRVYSPTFLALRGSCLYKFLAPPVTTWDWTRAEKTFSVYEIMCKILKDSDLLDRRKQCFTVQSESGEDLYFSVELESDLAQWERAFQTATFLEVERIQCKTYACVLESHLMGLTIDFSTGFICFDAATKELEFSNLFAVLHCIHSFFAAKVACLDPLFLGNQATASTAASSATTSKAKYTT

SEQ ID NO: 86113 - protein, 348 aa, Homo sapiens
  Payload ID: 17098
  Gene Symbol: SNTG1
  Gene Name: syntrophin, gamma 1
  ENSP ID: ENSP00000428558
MDFRTACEETKTGICLLQDGNQEPFKVRLHLAKDILMIQEQDVICVSGEPFYSGERTVTIRRQTVGGFGLSIKGGAEHNIPVVVSKISKEQRAELSGLLFIGDAILQINGINVRKCRHEEVVQVLRNAGEEVTLTVSFLKRAPAFLKLPLNEDCACAPSDQSSGTSSPLCDSGLHLNYHPNNTDTLSCSSWPTSPGLRWEKRWCDLRLIPLLHSRFSQYVPGTDLSRQNAFQVIAVDGVCTGIIQCLSAEDCVDWLQAIATNISNLTKHNIKKINRNFPVNQQIVYMGWCEAREQDPLQDRVYSPTFLALRGSCLYKFLAPPVTTWDWTRAEKTFSVYEIMCKILKPV

SEQ ID NO: 86114 - protein, 517 aa, Homo sapiens
  Payload ID: 17098
  Gene Symbol: SNTG1
  Gene Name: syntrophin, gamma 1
  Uniprot ID: Q9NSN8
  ENSP ID: ENSP00000429276
MDFRTACEETKTGICLLQDGNQEPFKVRLHLAKDILMIQEQDVICVSGEPFYSGERTVTIRRQTVGGFGLSIKGGAEHNIPVVVSKISKEQRAELSGLLFIGDAILQINGINVRKCRHEEVVQVLRNAGEEVTLTVSFLKRAPAFLKLPLNEDCACAPSDQSSGTSSPLCDSGLHLNYHPNNTDTLSCSSWPTSPGLRWEKRWCDLRLIPLLHSRFSQYVPGTDLSRQNAFQVIAVDGVCTGIIQCLSAEDCVDWLQAIATNISNLTKHNIKKINRNFPVNQQIVYMGWCEAREQDPLQDRVYSPTFLALRGSCLYKFLAPPVTTWDWTRAEKTFSVYEIMCKILKDSDLLDRRKQCFTVQSESGEDLYFSVELESDLAQWERAFQTATFLEVERIQCKTYACVLESHLMGLTIDFSTGFICFDAATKAVLWRYKFSQLKGSSDDGKSKIKFLFQNPDTKQIEAKELEFSNLFAVLHCIHSFFAAKVACLDPLFLGNQATASTAASSATTSKAKYTT

SEQ ID NO: 86115 - protein, 92 aa, Homo sapiens
  Payload ID: 17098
  Gene Symbol: SNTG1
  Gene Name: syntrophin, gamma 1
  ENSP ID: ENSP00000429363
MDFRTACEETKTGICLLQDGNQEPFKVRLHLAKDILMIQEQDVICVSGEPFYSGERTVTIRRQTVGGFGLSIKGGAEHNIPVVVSKISKEQR

SEQ ID NO: 86116 - protein, 517 aa, Homo sapiens; identical to SEQ ID NO: 86114
  Payload ID: 17098
  Gene Symbol: SNTG1
  Gene Name: syntrophin, gamma 1
  Uniprot ID: Q9NSN8
  ENSP ID: ENSP00000429842

SEQ ID NO: 86117 - protein, 120 aa, Homo sapiens
  Payload ID: 17098
  Gene Symbol: SNTG1
  Gene Name: syntrophin, gamma 1
  ENSP ID: ENSP00000430748
  MOD_RES (1)..(1): Any amino acid
XQNAFQVIAVDGVCTGIIQCLSAEDCVDWLQAIATNISNLTKHNIKKINRNFPVNQQIVYMGWCEAREQDPLQDRVYSPTFLALRGSCLYKFLAPPVTTWDWTRAEKTFSVYEIMCKILK

SEQ ID NO: 86118 - protein, 480 aa, Homo sapiens; identical to SEQ ID NO: 86112
  Payload ID: 17098
  Gene Symbol: SNTG1
  Gene Name: syntrophin, gamma 1
  Uniprot ID: Q9NSN8
  ENSP ID: ENSP00000431123

SEQ ID NO: 86119 - protein, 517 aa, Homo sapiens; identical to SEQ ID NO: 86114
  Payload ID: 17098
  Gene Symbol: SNTG1
  Gene Name: syntrophin, gamma 1
  Uniprot ID: Q9NSN8
  ENSP ID: ENSP00000483474

SEQ ID NO: 86120 - protein, 539 aa, Homo sapiens
  Payload ID: 17099
  Gene Symbol: SNTG2
  Gene Name: syntrophin, gamma 2
  Uniprot ID: Q9NY99
  ENSP ID: ENSP00000311837
MGTEGPPPPAASRGRQGCLLVPARTKTTIALLYDEESENAYDIRLKLTKEVLTIQKQDVVCVGGSHQGRNRRTVTLRRQPVGGLGLSIKGGSEHNVPVVISKIFEDQAADQTGMLFVGDAVLQVNGIHVENATHEEVVHLLRNAGDEVTITVEYLREAPAFLKLPLGSPGPSSDHSSGASSPLFDSGLHLNGNSSTTAPSSPSSPIAKDPRYEKRWLDTLSVPLSMARISRYKAGTEKLRWNAFEVLALDGVSSGILRFYTAQDGTDWLRAVSANIRELTLQNMKMANKCCSPSDQVVHMGWVNEKLQGADSSQTFRPKFLALKGPSFYVFSTPPVSTFDWVRAERTYHLCEVLFKVHKFWLTEDCWLQANLYLGLQDFDFEDQRPYCFSIVAGHGKSHVFNVELGSELAMWEKSFQRATFMEVQRTGSRTYMCSWQGEMLCFTVDFALGFTCFESKTKNVLWRFKFSQLKGSSDDGKTRVKLLFQNLDTKQIETKELEFQDLRAVLHCIHSFIAAKVASVDPGFMDSQSLARKYMYSS

SEQ ID NO: 86121 - protein, 412 aa, Homo sapiens
  Payload ID: 17099
  Gene Symbol: SNTG2
  Gene Name: syntrophin, gamma 2
  Uniprot ID: Q9NY99
  ENSP ID: ENSP00000385020
MGTEGPPPPAASRGRQGCLLVPARTKTTIALLYDEESENAYDIRLKLTKEVLTIQKQDVVCVGGSHQGRNAPSSPSSPIAKDPRYEKRWLDTLSVPLSMARISRYKAGTEKLRWNAFEVLALDGVSSGILRFYTAQDGTDWLRAVSANIRELTLQNMKMANKCCSPSDQVVHMGWVNEKLQGADSSQTFRPKFLALKGPSFYVFSTPPVSTFDWVRAERTYHLCEVLFKVHKFWLTEDCWLQANLYLGLQDFDFEDQRPYCFSIVAGHGKSHVFNVELGSELAMWEKSFQRATFMEVQRTGSRTYMCSWQGEMLCFTVDFALGFTCFESKTKNVLWRFKFSQLKGSSDDGKTRVKLLFQNLDTKQIETKELEFQDLRAVLHCIHSFIAAKVASVDPGFMDSQSLARKYMYSS

SEQ ID NO: 86122 - protein, 129 aa, Homo sapiens
  Payload ID: 17099
  Gene Symbol: SNTG2
  Gene Name: syntrophin, gamma 2
  ENSP ID: ENSP00000401997
MGTEGPPPPAASRGRQGCLLVPARTKTTIALLYDEESENAYDIRLKLTKEVLTIQKQDVVCVGGSHQGRNRRTVTLRRQPVGGLGLSIKGGSEHNVPVVISKIFEDQADGVLLCRPGWSAVLTRQGCCS

SEQ ID NO: 86123 - protein, 129 aa, Homo sapiens; identical to SEQ ID NO: 86122
  Payload ID: 17099
  Gene Symbol: SNTG2
  Gene Name: syntrophin, gamma 2
  ENSP ID: ENSP00000412249

SEQ ID NO: 86124 - protein, 80 aa, Homo sapiens
  Payload ID: 17099
  Gene Symbol: SNTG2
  Gene Name: syntrophin, gamma 2
  ENSP ID: ENSP00000486175
NVLWRFKFSQLKGSSDDGKTRVKLLFQNLDTKQIEMKELEFQDLRAVLHCIHSFIAAKVASVDPGFMDSQSLARKYMYSS

SEQ ID NO: 86125 - protein, 231 aa, Homo sapiens
  Payload ID: 17099
  Gene Symbol: SNTG2
  Gene Name: syntrophin, gamma 2
  ENSP ID: ENSP00000486519
APSSPSSPIAKDPRYEKRWLDTLSVPLSMARISRYKAGTEKLRWNAFEVLALDGVSSGILRFYTAQDGTDWLRAVSANIRELTLQNMKMANKCCSPSDQVVHMGWVNEKLQGADSSQTFRPKFLALKGPSFYVFSTPPVSTFDWVRAERTYHLCEVLFKVHKFWLTEDCWLQANLYLGLQDFDFEDQRPYCFSIVAGHGKSHVFNVELGSELAMWEKSFQRATFMEVQRTG

SEQ ID NO: 86126 - protein, 80 aa, Homo sapiens; identical to SEQ ID NO: 86124
  Payload ID: 17099
  Gene Symbol: SNTG2
  Gene Name: syntrophin, gamma 2
  ENSP ID: ENSP00000487429

SEQ ID NO: 86127 - protein, 140 aa, Homo sapiens
  Payload ID: 17100
  Gene Symbol: SNCA
  Gene Name: synuclein, alpha (non A4 component of amyloid precursor)
  Uniprot ID: P37840
  ENSP ID: ENSP00000338345
MDVFMKGLSKAKEGVVAAAEKTKQGVAEAAGKTKEGVLYVGSKTKEGVVHGVATVAEKTKEQVTNVGGAVVTGVTAVAQKTVEGAGSIAAATGFVKKDQLGKNEEGAPQEGILEDMPVDPDNEAYEMPSEEGYQDYEPEA

SEQ ID NO: 86128 - protein, 112 aa, Homo sapiens
  Payload ID: 17100
  Gene Symbol: SNCA
  Gene Name: synuclein, alpha (non A4 component of amyloid precursor)
  Uniprot ID: P37840
  ENSP ID: ENSP00000343683
MDVFMKGLSKAKEGVVAAAEKTKQGVAEAAGKTKEGVLYVGSKTKEGVVHGVATVAEKTKEQVTNVGGAVVTGVTAVAQKTVEGAGSIAAATGFVKKDQLGKEGYQDYEPEA

SEQ ID NO: 86129 - protein, 140 aa, Homo sapiens; identical to SEQ ID NO: 86127
  Payload ID: 17100
  Gene Symbol: SNCA
  Gene Name: synuclein, alpha (non A4 component of amyloid precursor)
  Uniprot ID: P37840
  ENSP ID: ENSP00000378437

SEQ ID NO: 86130 - protein, 126 aa, Homo sapiens
  Payload ID: 17100
  Gene Symbol: SNCA
  Gene Name: synuclein, alpha (non A4 component of amyloid precursor)
  Uniprot ID: P37840
  ENSP ID: ENSP00000378440
MDVFMKGLSKAKEGVVAAAEKTKQGVAEAAGKTKEGVLYVVAEKTKEQVTNVGGAVVTGVTAVAQKTVEGAGSIAAATGFVKKDQLGKNEEGAPQEGILEDMPVDPDNEAYEMPSEEGYQDYEPEA

SEQ ID NO: 86131 - protein, 140 aa, Homo sapiens; identical to SEQ ID NO: 86127
  Payload ID: 17100
  Gene Symbol: SNCA
  Gene Name: synuclein, alpha (non A4 component of amyloid precursor)
  Uniprot ID: P37840
  ENSP ID: ENSP00000378442

SEQ ID NO: 86132 - protein, 112 aa, Homo sapiens; identical to SEQ ID NO: 86128
  Payload ID: 17100
  Gene Symbol: SNCA
  Gene Name: synuclein, alpha (non A4 component of amyloid precursor)
  Uniprot ID: P37840
  ENSP ID: ENSP00000396241

SEQ ID NO: 86133 - protein, 126 aa, Homo sapiens; identical to SEQ ID NO: 86130
  Payload ID: 17100
  Gene Symbol: SNCA
  Gene Name: synuclein, alpha (non A4 component of amyloid precursor)
  Uniprot ID: P37840
  ENSP ID: ENSP00000421485

SEQ ID NO: 86134 - protein, 140 aa, Homo sapiens; identical to SEQ ID NO: 86127
  Payload ID: 17100
  Gene Symbol: SNCA
  Gene Name: synuclein, alpha (non A4 component of amyloid precursor)
  Uniprot ID: P37840
  ENSP ID: ENSP00000422238

SEQ ID NO: 86135 - protein, 66 aa, Homo sapiens
  Payload ID: 17100
  Gene Symbol: SNCA
  Gene Name: synuclein, alpha (non A4 component of amyloid precursor)
  ENSP ID: ENSP00000423445
MDVFMKGLSKAKEGVVAAAEKTKQGVAEAAGKTKEGVLYVGSKTKEGVVHGVATVAEKTKEQVTNV

SEQ ID NO: 86136 - protein, 115 aa, Homo sapiens
  Payload ID: 17100
  Gene Symbol: SNCA
  Gene Name: synuclein, alpha (non A4 component of amyloid precursor)
  ENSP ID: ENSP00000426034
MDVFMKGLSKAKEGVVAAAEKTKQGVAEAAGKTKEGVLYVGSKTKEGVVHGVATVAEKTKEQVTNVGGAVVTGVTAVAQKTVEGAGSIAAATGFVKKDQLGKVWLCTFCVTFISW

SEQ ID NO: 86137 - protein, 140 aa, Homo sapiens; identical to SEQ ID NO: 86127
  Payload ID: 17100
  Gene Symbol: SNCA
  Gene Name: synuclein, alpha (non A4 component of amyloid precursor)
  Uniprot ID: P37840
  ENSP ID: ENSP00000426955

SEQ ID NO: 86138 - protein, 98 aa, Homo sapiens
  Payload ID: 17100
  Gene Symbol: SNCA
  Gene Name: synuclein, alpha (non A4 component of amyloid precursor)
  ENSP ID: ENSP00000479604
MDVFMKGLSKAKEGVVAAAEKTKQGVAEAAGKTKEGVLYVVAEKTKEQVTNVGGAVVTGVTAVAQKTVEGAGSIAAATGFVKKDQLGKEGYQDYEPEA

SEQ ID NO: 86139 - protein, 126 aa, Homo sapiens; identical to SEQ ID NO: 86130
  Payload ID: 17100
  Gene Symbol: SNCA
  Gene Name: synuclein, alpha (non A4 component of amyloid precursor)
  Uniprot ID: P37840
  ENSP ID: ENSP00000484044

SEQ ID NO: 86140 - protein, 1016 aa, Homo sapiens
  Payload ID: 17101
  Gene Symbol: SNCAIP
  Gene Name: synuclein, alpha interacting protein
  Uniprot ID: Q9Y6H5
  ENSP ID: ENSP00000261367
MEAPEYLDLDEIDFSDDISDNRSQGNRLQKLGLEDTDREDAMGFGSHRAKLTVVAALGACHCPENEYSVTSLKTIPELCRRCDTQNEDRSVSSSSWNCGISTLITNTQKPTGIADVYSKFRPVKRVSPLKHQPETLENNESDDQKNQKVVEYQKGGESDLGPQPQELGPGDGVGGPPGKSSEPSTSLGELEHYDLDMDEILDVPYIKSSQQLASFTKVTSEKRILGLCTTINGLSGKACSTGSSESSSSNMAPFCVLSPVKSPHLRKASAVIHDQHKLSTEETEISPPLVKCGSAYEPENQSKDFLNKTFSDPHGRKVEKTTPDCQLRAFHLQSSAAESKPEEQVSGLNRTSSQGPEERSEYLKKVKSILNIVKEGQISLLPHLAADNLDKIHDENGNNLLHIAASQGHAECLQHLTSLMGEDCLNERNTEKLTPAGLAIKNGQLECVRWMVSETEAIAELSCSKDFPSLIHYAGCYGQEKILLWLLQFMQEQGISLDEVDQDGNSAVHVASQHGYLGCIQTLVEYGANVTMQNHAGEKPSQSAERQGHTLCSRYLVVVETCMSLASQVVKLTKQLKEQTVERVTLQNQLQQFLEAQKSEGKSLPSSPSSPSSPASRKSQWKSPDADDDSVAKSKPGVQEGIQVLGSLSASSRARPKAKDEDSDKILRQLLGKEISENVCTQEKLSLEFQDAQASSRNSKKIPLEKRELKLARLRQLMQRSLSESDTDSNNSEDPKTTPVRKADRPRPQPIVESVESMDSAESLHLMIKKHTLASGGRRFPFSIKASKSLDGHSPSPTSESSEPDLESQYPGSGSIPPNQPSGDPQQPSPDSTAAQKVATSPKSALKSPSSKRRTSQNLKLRVTFEEPVVQMEQPSLELNGEKDKDKGRTLQRTSTSNESGDQLKRPFGAFRSIMETLSGNQNNNNNYQAANQLKTSTLPLTSLGRKTDAKGNPASSASKGKNKAEMYSSCINLSSNMLIEEHLCNDTRHNDINRKMKKSYSIKHIAEPESKELFL

SEQ ID NO: 86141 - protein, 919 aa, Homo sapiens
  Payload ID: 17101
  Gene Symbol: SNCAIP
  Gene Name: synuclein, alpha interacting protein
  Uniprot ID: Q9Y6H5
  ENSP ID: ENSP00000261368
MEAPEYLDLDEIDFSDDISYSVTSLKTIPELCRRCDTQNEDRSVSSSSWNCGISTLITNTQKPTGIADVYSKFRPVKRVSPLKHQPETLENNESDDQKNQKVVEYQKGGESDLGPQPQELGPGDGVGGPPGKSSEPSTSLGELEHYDLDMDEILDVPYIKSSQQLASFTKVTSEKRILGLCTTINGLSGKACSTGSSESSSSNMAPFCVLSPVKSPHLRKASAVIHDQHKLSTEETEISPPLVKCGSAYEPENQSKDFLNKTFSDPHGRKVEKTTPDCQLRAFHLQSSAAESKPEEQVSGLNRTSSQGPEERSEYLKKVKSILNIVKEGQISLLPHLAADNLDKIHDENGNNLLHIAASQGHAECLQHLTSLMGEDCLNERNTEKLTPAGLAIKNGQLECVRWMVSETEAIAELSCSKDFPSLIHYAGCYGQEKILLWLLQFMQEQGISLDEVDQDGNSAVHVASQHGYLGCIQTLVEYGANVTMQNHAGEKPSQSAERQGHTLCSRYLVVVETCMSLASQVVKLTKQLKEQTVERVTLQNQLQQFLEAQKSEGKSLPSSPSSPSSPASRKSQWKSPDADDDSVAKSKPGVQEGIQVLGSLSASSRARPKAKDEDSDKILRQLLGKEISENVCTQEKLSLEFQDAQASSRNSKKIPLEKRELKLARLRQLMQRSLSESDTDSNNSEDPKTTPVRKADRPRPQPIVESVESMDSAESLHLMIKKHTLASGGRRFPFSIKASKSLDGHSPSPTSESSEPDLESQYPGSGSIPPNQPSGDPQQPSPDSTAAQKVATSPKSALKSPSSKRRTSQNLKLRVTFEEPVVQMEQPSLELNGEKDKDKGRTLQRTSTSNESGDQLKRPFGAFRSIMETLSGNQNNNNNYQAANQLKTSTLPLTSLGRKTDAKGNPASSASKGKNKAA

SEQ ID NO: 86142 - protein, 603 aa, Homo sapiens
  Payload ID: 17101
  Gene Symbol: SNCAIP
  Gene Name: synuclein, alpha interacting protein
  Uniprot ID: Q9Y6H5
  ENSP ID: ENSP00000368854
MTYLIQSHHSRRSQNCAEDVIRKTKTDQNGQLECVRWMVSETEAIAELSCSKDFPSLIHYAGCYGQEKILLWLLQFMQEQGISLDEVDQDGNSAVHVASQHGYLGCIQTLVEYGANVTMQNHAGEKPSQSAERQGHTLCSRYLVVVETCMSLASQVVKLTKQLKEQTVERVTLQNQLQQFLEAQKSEGKSLPSSPSSPSSPASRKSQWKSPDADDDSVAKSKPGVQEGIQVLGSLSASSRARPKAKDEDSDKILRQLLGKEISENVCTQEKLSLEFQDAQASSRNSKKIPLEKRELKLARLRQLMQRSLSESDTDSNNSEDPKTTPVRKADRPRPQPIVESVESMDSAESLHLMIKKHTLASGGRRFPFSIKASKSLDGHSPSPTSESSEPDLESQYPGSGSIPPNQPSGDPQQPSPDSTAAQKVATSPKSALKSPSSKRRTSQNLKLRVTFEEPVVQMEQPSLELNGEKDKDKGRTLQRTSTSNESGDQLKRPFGAFRSIMETLSGNQNNNNNYQAANQLKTSTLPLTSLGRKTDAKGNPASSASKGKNKAEMYSSCINLSSNMLIEEHLCNDTRHNDINRKMKKSYSIKHIAEPESKELFL

SEQ ID NO: 86143 - protein, 88 aa, Homo sapiens
  Payload ID: 17101
  Gene Symbol: SNCAIP
  Gene Name: synuclein, alpha interacting protein
  ENSP ID: ENSP00000378849
MEAPEYLDLDEIDFSDDISYSVTSLKTIPELCRRCDTQNEDRSATPSCRQSRQNSRRKWKQSITYCGVTGTRRVSTAPHFFDGRRLPQ

SEQ ID NO: 86144 - protein, 588 aa, Homo sapiens
  Payload ID: 17101
  Gene Symbol: SNCAIP
  Gene Name: synuclein, alpha interacting protein
  Uniprot ID: Q9Y6H5
  ENSP ID: ENSP00000378852
MEAPEYLDLDEIDFSDDISDNRSQGNRLQKLGLEDTDREDAMGFGSHRAKLTVVAALGACHCPENEYSVTSLKTIPELCRRCDTQNEDRSVSSSSWNCGISTLITNTQKPTGIADVYSKFRPVKRVSPLKHQPETLENNESDDQKNQKVVEYQKGGESDLGPQPQELGPGDGVGGPPGKSSEPSTSLGELEHYDLDMDEILDVPYIKSSQQLASFTKVTSEKRILGLCTTINGLSGKACSTGSSESSSSNMAPFCVLSPVKSPHLRKASAVIHDQHKLSTEETEISPPLVKCGSAYEPENQSKDFLNKTFSDPHGRKVEKTTPDCQLRAFHLQSSAAESKPEEQVSGLNRTSSQGPEERSEYLKKVKSILNIVKEGQISLLPHLAADNLDKIHDENGNNLLHIAASQGHAECLQHLTSLMGEDCLNERNTEKLTPAGLAIKNGQLECVRWMVSETEAIAELSCSKDFPSLIHYAGCYGQEKILLWLLQFMQEQGISLDEVDQDGNSAVHVASQHGYLGCIQTRLKIQGTWNGSETCLFTHHFSSYPPISSGLQCQGQEGVLFIPDQVGAATNKQVLFQNQLPETKSSY

SEQ ID NO: 86145 - protein, 62 aa, Homo sapiens
  Payload ID: 17101
  Gene Symbol: SNCAIP
  Gene Name: synuclein, alpha interacting protein
  ENSP ID: ENSP00000394392
MEAPEYLDLDEIDFSDDISYSVTSLKTIPELCRRCDTQNEDRSGKDSSVASSVYARTGHLVG

SEQ ID NO: 86146 - protein, 858 aa, Homo sapiens
  Payload ID: 17101
  Gene Symbol: SNCAIP
  Gene Name: synuclein, alpha interacting protein
  ENSP ID: ENSP00000422106
MEAPEYLDLDEIDFSDDISYSVTSLKTIPELCRRCDTQNEDRSVSSSSWNCGISTLITNTQKPTGIADVYSKFRPVKRVSPLKHQPETLENNESDDQKNQKVVEYQKGGESDLGPQPQELGPGDGVGGPPGKSSEPSTSLGELEHYDLDMDEILDVPYIKSSQQLASFTKVTSEKRILGLCTTINGLSGKACSTGSSESSSSNMAPFCVLSPVKSPHLRKASAVIHDQHKLSTEETEISPPLVKCGSAYEPENQSKDFLNKTFSDPHGRKVEKTTPDCQLRAFHLQSSAAESKPEEQVSGLNRTSSQGPEERSEYLKKVKSILNIVKEGQISLLNGQLECVRWMVSETEAIAELSCSKDFPSLIHYAGCYGQEKILLWLLQFMQEQGISLDEVDQDGNSAVHVASQHGYLGCIQTLVEYGANVTMQNHAGEKPSQSAERQGHTLCSRYLVVVETCMSLASQVVKLTKQLKEQTVERVTLQNQLQQFLEAQKSEGKSLPSSPSSPSSPASRKSQWKSPDADDDSVAKSKPGVQEGIQVLGSLSASSRARPKAKDEDSDKILRQLLGKEISENVCTQEKLSLEFQDAQASSRNSKKIPLEKRELKLARLRQLMQRSLSESDTDSNNSEDPKTTPVRKADRPRPQPIVESVESMDSAESLHLMIKKHTLASGGRRFPFSIKASKSLDGHSPSPTSESSEPDLESQYPGSGSIPPNQPSGDPQQPSPDSTAAQKVATSPKSALKSPSSKRRTSQNLKLRVTFEEPVVQMEQPSLELNGEKDKDKGRTLQRTSTSNESGDQLKRPFGAFRSIMETLSGNQNNNNNYQAANQLKTSTLPLTSLGRKTDAKGNPASSASKGKNKA

SEQ ID NO: 86147 - protein, 98 aa, Homo sapiens
  Payload ID: 17101
  Gene Symbol: SNCAIP
  Gene Name: synuclein, alpha interacting protein
  ENSP ID: ENSP00000422610
MEAPEYLDLDEIDFSDDISYSVTSLKTIPELCRRCDTQNEDRSVSSSSWNCGISTLITNTQKPTGIADVYSKFRPVKRVSPLKHQPETLENNESDDQK

SEQ ID NO: 86148 - protein, 113 aa, Homo sapiens
  Payload ID: 17101
  Gene Symbol: SNCAIP
  Gene Name: synuclein, alpha interacting protein
  ENSP ID: ENSP00000423360
MEAPEYLDLDEIDFSDDISDNRSQGNRLQKLGLEDTDREDAMGFGSHRAKLTVVAALGACHCPENEYSVTSLKTIPELCRRCDTQNEDRSEWSVGVRTLDGERNRSHCRTELF

SEQ ID NO: 86149 - protein, 66 aa, Homo sapiens
  Payload ID: 17101
  Gene Symbol: SNCAIP
  Gene Name: synuclein, alpha interacting protein
  ENSP ID: ENSP00000424338
MEAPEYLDLDEIDFSDDISYSVTSLKTIPELCRRCDTQNEDRSEWSVGVRTLDGERNRSHCRTELF

SEQ ID NO: 86150 - protein, 67 aa, Homo sapiens
  Payload ID: 17101
  Gene Symbol: SNCAIP
  Gene Name: synuclein, alpha interacting protein
  ENSP ID: ENSP00000425063
MEAPEYLDLDEIDFSDDISDNRSQGNRLQKLGLEDTDREDAMGFGSHRAKLTVVAALGACHCPENEY

SEQ ID NO: 86151 - protein, 66 aa, Homo sapiens; identical to SEQ ID NO: 86149
  Payload ID: 17101
  Gene Symbol: SNCAIP
  Gene Name: synuclein, alpha interacting protein
  ENSP ID: ENSP00000426280

SEQ ID NO: 86152 - protein, 66 aa, Homo sapiens; identical to SEQ ID NO: 86149
  Payload ID: 17101
  Gene Symbol: SNCAIP
  Gene Name: synuclein, alpha interacting protein
  ENSP ID: ENSP00000426526

SEQ ID NO: 86153 - protein, 160 aa, Homo sapiens
  Payload ID: 17101
  Gene Symbol: SNCAIP
  Gene Name: synuclein, alpha interacting protein
  ENSP ID: ENSP00000426551
MEAPEYLDLDEIDFSDDISDNRSQGNRLQKLGLEDTDREDAMGFGSHRAKLTVVAALGACHCPENEYSVTSLKTIPELCRRCDTQNEDRSVSSSSWNCGISTLITNTQKPTGIADVYSKFRPVKRVSPLKHQPETLENNESDDQKNQKVVEYQKGGESDL

SEQ ID NO: 86154 - protein, 88 aa, Homo sapiens; identical to SEQ ID NO: 86143
  Payload ID: 17101
  Gene Symbol: SNCAIP
  Gene Name: synuclein, alpha interacting protein
  ENSP ID: ENSP00000426904

SEQ ID NO: 86155 - protein, 62 aa, Homo sapiens; identical to SEQ ID NO: 86145
  Payload ID: 17101
  Gene Symbol: SNCAIP
  Gene Name: synuclein, alpha interacting protein
  ENSP ID: ENSP00000427078

SEQ ID NO: 86156 - protein, 135 aa, Homo sapiens
  Payload ID: 17101
  Gene Symbol: SNCAIP
  Gene Name: synuclein, alpha interacting protein
  ENSP ID: ENSP00000427090
MEAPEYLDLDEIDFSDDISYSVTSLKTIPELCRRCDTQNEDRSVSSSSWNCGISTLITNTQKPTGIADVYSKFRPVKRVSPLKHQPETLENNESDDQKNQKVVEYQKGGESDLGPQPQELGPGDGVGGPPGKSSE

SEQ ID NO: 86157 - protein, 66 aa, Homo sapiens; identical to SEQ ID NO: 86149
  Payload ID: 17101
  Gene Symbol: SNCAIP
  Gene Name: synuclein, alpha interacting protein
  ENSP ID: ENSP00000427575

SEQ ID NO: 86158 - protein, 14 aa, Homo sapiens
  Payload ID: 17101
  Gene Symbol: SNCAIP
  Gene Name: synuclein, alpha interacting protein
  ENSP ID: ENSP00000427587
MEAPEYLDLDEIDF

SEQ ID NO: 86159 - protein, 113 aa, Homo sapiens; identical to SEQ ID NO: 86148
  Payload ID: 17101
  Gene Symbol: SNCAIP
  Gene Name: synuclein, alpha interacting protein
  ENSP ID: ENSP00000441681

SEQ ID NO: 86160 - protein, 134 aa, Homo sapiens
  Payload ID: 17102
  Gene Symbol: SNCB
  Gene Name: synuclein, beta
  Uniprot ID: Q16143
  ENSP ID: ENSP00000308057
MDVFMKGLSMAKEGVVAAAEKTKQGVTEAAEKTKEGVLYVGSKTREGVVQGVASVAEKTKEQASHLGGAVFSGAGNIAAATGLVKREEFPTDLKPEEVAQEAAEEPLIEPLMEPEGESYEDPPQEEYQEYEPEA

SEQ ID NO: 86161 - protein, 134 aa, Homo sapiens; identical to SEQ ID NO: 86160
  Payload ID: 17102
  Gene Symbol: SNCB
  Gene Name: synuclein, beta
  Uniprot ID: Q16143
  ENSP ID: ENSP00000377296

SEQ ID NO: 86162 - protein, 134 aa, Homo sapiens; identical to SEQ ID NO: 86160
  Payload ID: 17102
  Gene Symbol: SNCB
  Gene Name: synuclein, beta
  Uniprot ID: Q16143
  ENSP ID: ENSP00000422223

SEQ ID NO: 86163 - protein, 134 aa, Homo sapiens; identical to SEQ ID NO: 86160
  Payload ID: 17102
  Gene Symbol: SNCB
  Gene Name: synuclein, beta
  Uniprot ID: Q16143
  ENSP ID: ENSP00000424073

SEQ ID NO: 86164 - protein, 120 aa, Homo sapiens
  Payload ID: 17102
  Gene Symbol: SNCB
  Gene Name: synuclein, beta
  ENSP ID: ENSP00000479489
MDVFMKGLSMAKEGVVAAAEKTKQGVTEAAEKTKEGVLYVVAEKTKEQASHLGGAVFSGAGNIAAATGLVKREEFPTDLKPEEVAQEAAEEPLIEPLMEPEGESYEDPPQEEYQEYEPEA

SEQ ID NO: 86165 - protein, 126 aa, Homo sapiens
  Payload ID: 17103
  Gene Symbol: SNCG
  Gene Name: synuclein, gamma (breast cancer-specific protein 1)
  ENSP ID: ENSP00000344658
MDVFKKGFSIAKEGVVGAVEKTKQGVTEAAEKTKEGVMYVGAKTKENVVQSVTSGLPWGWGWGGGQPVSSHSGREDQGAGQRRERGCGEQRQHCGHQDRGGGGEHRGHLRGGAQGGLEAICPPTGG

SEQ ID NO: 86166 - protein, 127 aa, Homo sapiens
  Payload ID: 17103
  Gene Symbol: SNCG
  Gene Name: synuclein, gamma (breast cancer-specific protein 1)
  Uniprot ID: O76070
  ENSP ID: ENSP00000361087
MDVFKKGFSIAKEGVVGAVEKTKQGVTEAAEKTKEGVMYVGAKTKENVVQSVTSVAEKTKEQANAVSEAVVSSVNTVATKTVEEAENIAVTSGVVRKEDLRPSAPQQEGEASKEKEEVAEEAQSGGD

SEQ ID NO: 86167 - protein, 156 aa, Homo sapiens
  Payload ID: 17104
  Gene Symbol: SYS1
  Gene Name: Sys1 golgi trafficking protein
  Uniprot ID: Q8N2H4
  ENSP ID: ENSP00000243918
MAGQFRSYVWDPLLILSQIVLMQTVYYGSLGLWLALVDGLVRSSPSLDQMFDAEILGFSTPPGRLSMMSFILNALTCALGLLYFIRRGKQCLDFTVTVHFFHLLGCWFYSSRFPSALTWWLVQAVCIALMAVIGEYLCMRTELKEIPLNSAPKSNV

SEQ ID NO: 86168 - protein, 156 aa, Homo sapiens; identical to SEQ ID NO: 86167
  Payload ID: 17104
  Gene Symbol: SYS1
  Gene Name: Sys1 golgi trafficking protein
  Uniprot ID: Q8N2H4
  ENSP ID: ENSP00000361812

SEQ ID NO: 86169 - protein, 57 aa, Homo sapiens
  Payload ID: 17104
  Gene Symbol: SYS1
  Gene Name: Sys1 golgi trafficking protein
  ENSP ID: ENSP00000397601
MAGQFRSYVWDPLLILSQIVLMQTVYYGSLGLWLALVDGLVRSSPSLDQMFDAEEAC

SEQ ID NO: 86170 - protein, 135 aa, Homo sapiens
  Payload ID: 17104
  Gene Symbol: SYS1
  Gene Name: Sys1 golgi trafficking protein
  ENSP ID: ENSP00000403071
MQTVYYGSLGLWLALVDGLVRSSPSLDQMFDAEILGFSTPPGRLSMMSFILNALTCALGLLYFIRRGKQCLDFTVTVHFFHLLGCWFYSSRFPSALTWWLVQAVCIALMAVIGEYLCMRTELKEIPLNSAPKSNV

SEQ ID NO: 86171 - protein, 118 aa, Homo sapiens
  Payload ID: 17104
  Gene Symbol: SYS1
  Gene Name: Sys1 golgi trafficking protein
  ENSP ID: ENSP00000406879
MAGQFRSYVWDPLLILSQIVLMQTVYYGSLGLWLALVDGLVRSSPSLDQMFDAEILGFSTPPGRLSMMSFILNALTCALGLLYFIRRGKQCLDFTVTVHFFHLLGCWFYSSRFPSALT

SEQ ID NO: 86172 - protein, 76 aa, Homo sapiens
  Payload ID: 17104
  Gene Symbol: SYS1
  Gene Name: Sys1 golgi trafficking protein
  Uniprot ID: Q8N2H4
  ENSP ID: ENSP00000416506
MAGQFRSYVWDPLLILSQIVLMQTVYYGSLGLWLALVDGLVRSSPSLDQMFDAEILGFSTPPGRLSMMSFILNALT

SEQ ID NO: 86173 - protein, 78 aa, Homo sapiens
  Payload ID: 17105
  Gene Symbol: SYS1-DBNDD2
  Gene Name: SYS1-DBNDD2 readthrough (NMD candidate)
  ENSP ID: ENSP00000456116
MAGQFRSYVWDPLLILSQIVLMQTVYYGSLGLWLALVDGLVRSSPSLDQMFDAEILGFSTPPGRLSMMSFILNALTWS

SEQ ID NO: 86174 - protein, 78 aa, Homo sapiens; identical to SEQ ID NO: 86173
  Payload ID: 17105
  Gene Symbol: SYS1-DBNDD2
  Gene Name: SYS1-DBNDD2 readthrough (NMD candidate)
  ENSP ID: ENSP00000457650

SEQ ID NO: 86175 - protein, 97 aa, Homo sapiens
  Payload ID: 17105
  Gene Symbol: SYS1-DBNDD2
  Gene Name: SYS1-DBNDD2 readthrough (NMD candidate)
  ENSP ID: ENSP00000457768
MAGQFRSYVWDPLLILSQIVLMQTVYYGSLGLWLALVDGLVRSSPSLDQMFDAEILGFSTPPGRLSMMSFILNALTWHFSLLLPHEEGRVCFPFHHD

SEQ ID NO: 86176 - protein, 435 aa, Homo sapiens
  Payload ID: 17106
  Gene Symbol: T
  Gene Name: T brachyury transcription factor
  Uniprot ID: O15178
  ENSP ID: ENSP00000296946
MSSPGTESAGKSLQYRVDHLLSAVENELQAGSEKGDPTERELRVGLEESELWLRFKELTNEMIVTKNGRRMFPVLKVNVSGLDPNAMYSFLLDFVAADNHRWKYVNGEWVPGGKPEPQAPSCVYIHPDSPNFGAHWMKAPVSFSKVKLTNKLNGGGQIMLNSLHKYEPRIHIVRVGGPQRMITSHCFPETQFIAVTAYQNEEITALKIKYNPFAKAFLDAKERSDHKEMMEEPGDSQQPGYSQWGWLLPGTSTLCPPANPHPQFGGALSLPSTHSCDRYPTLRSHRSSPYPSPYAHRNNSPTYSDNSPACLSMLQSHDNWSSLGMPAHPSMLPVSHNASPPTSSSQYPSLWSVSNGAVTPGSQAAAVSNGLGAQFFRGSPAHYTPLTHPVSAPSSSGSPLYEGAAAATDIVDSQYDAAAQGRLIASWTPVSPPSM

SEQ ID NO: 86177 - protein, 377 aa, Homo sapiens
  Payload ID: 17106
  Gene Symbol: T
  Gene Name: T brachyury transcription factor
  Uniprot ID: O15178
  ENSP ID: ENSP00000355836
MSSPGTESAGKSLQYRVDHLLSAVENELQAGSEKGDPTERELRVGLEESELWLRFKELTNEMIVTKNGRRMFPVLKVNVSGLDPNAMYSFLLDFVAADNHRWKYVNGEWVPGGKPEPQAPSCVYIHPDSPNFGAHWMKAPVSFSKVKLTNKLNGGGQIMLNSLHKYEPRIHIVRVGGPQRMITSHCFPETQFIAVTAYQNEEITALKIKYNPFAKAFLDAKERSDHKEMMEEPGDSQQPGYSQSYSDNSPACLSMLQSHDNWSSLGMPAHPSMLPVSHNASPPTSSSQYPSLWSVSNGAVTPGSQAAAVSNGLGAQFFRGSPAHYTPLTHPVSAPSSSGSPLYEGAAAATDIVDSQYDAAAQGRLIASWTPVSPPSM

SEQ ID NO: 86178 - protein, 403 aa, Homo sapiens
  Payload ID: 17106
  Gene Symbol: T
  Gene Name: T brachyury transcription factor
  ENSP ID: ENSP00000355841
MSSPGTESAGKSLQYRVDHLLSAVENELQAGSEKGDPTERELRVGLEESELWLRFKELTNEMIVTKNGRRMFPVLKVNVSGLDPNAMYSFLLDFVAADNHRWKYVNGEWVPGGKPEPQAPSCVYIHPDSPNFGAHWMKAPVSFSKVKLTNKLNGGGQIMLNSLHKYEPRIHIVRVGGPQRMITSHCFPETQFIAVTAYQNEEITALKIKYNPFAKAFLDAKERSDHKEMMEEPGDSQQPGYSQSGGWLLPGTSTLCPPANPHPQFGGALSLPSTHSCDRYPTLRSHRSSPYPSPYAHRNNSPTYSDNSPACLSMLQSHDNWSSLGMPAHPSMLPVSHNASPPTSSSQYPSLWSVSNGAVTPGSQAAAVSNGLGAQFFRGSPAHYTPLTHPVSAPSSSGSPLYE

SEQ ID NO: 86179 - protein, 243 aa, Homo sapiens
  Payload ID: 17106
  Gene Symbol: T
  Gene Name: T brachyury transcription factor
  ENSP ID: ENSP00000453512
MSSPGTESAGKSLQYRVDHLLSAVENELQAGSEKGDPTERELRVGLEESELWLRFKELTNEMIVTKNGRRMFPVLKVNVSGLDPNAMYSFLLDFVAADNHRWKYVNGEWVPGGKPEPQAPSCVYIHPDSPNFGAHWMKAPVSFSKVKLTNKLNGGGQIMLNSLHKYEPRIHIVRVGGPQRMITSHCFPETQFIAVTAYQNEEITALKIKYNPFAKAFLDAKERSDHKEMMEEPGDSQQPGYSQ

SEQ ID NO: 86180 - protein, 496 aa, Homo sapiens
  Payload ID: 17107
  Gene Symbol: TCAIM
  Gene Name: T cell activation inhibitor, mitochondrial
  Uniprot ID: Q8N3R3
  ENSP ID: ENSP00000341539
MFCHLRPMRRLCLEKIFPHWFPFSRALSGAEAVNALRPFYFAVHPDFFGQHPVEREINENSLKRLSVYLENLQKPGFKSLKPTQLTFYVRETDQSSSDGQEPFSTSGFRAVKFTLHTRDLLSTVLYILNSCSLSVEHIQSLNTNMHTQPLKEAKRMPDRPIKWDKSYYSFTGFKDPDEDLEQVSRVETTLTSWLDNNGKSAVKKLKNSLPLRKELDRLKDELSHQLQLSDIRWQRSWGIAHRCSQLHSLSRLAQQNLETLKKAKGCTIIFTDRSGMSAVGHVMLGTMDVHHHWTKLFERLPSYFDLQRRLMILEDQISYLLGGIQVVYIEELQPVLTLEEYYSLLDVFYNRLLKSRILFHPRSLRGLQMILNSDRYAPSLHELGHFNIPTLCDPANLQWFILTKAQQARENMKRKEELKVIENELIQASTKKFSLEKLYKEPSISSIQMVDCCKRLLEQSLPYLHGMHLCISHFYSVMQDGDLCIPWNWKNGEAIK

SEQ ID NO: 86181 - protein, 70 aa, Homo sapiens
  Payload ID: 17107
  Gene Symbol: TCAIM
  Gene Name: T cell activation inhibitor, mitochondrial
  Uniprot ID: Q8N3R3
  ENSP ID: ENSP00000373252
MFCHLRPMRRLCLEKIFPHWFPFSRALSGAEAVNALRPFYFAVHPDFFGQHPVERDDTWKSFQCPSDFSL

SEQ ID NO: 86182 - protein, 70 aa, Homo sapiens; identical to SEQ ID NO: 86181
  Payload ID: 17107
  Gene Symbol: TCAIM
  Gene Name: T cell activation inhibitor, mitochondrial
  Uniprot ID: Q8N3R3
  ENSP ID: ENSP00000379388

SEQ ID NO: 86183 - protein, 115 aa, Homo sapiens
  Payload ID: 17107
  Gene Symbol: TCAIM
  Gene Name: T cell activation inhibitor, mitochondrial
  Uniprot ID: Q8N3R3
  ENSP ID: ENSP00000387842
MFCHLRPMRRLCLEKIFPHWFPFSRALSGAEAVNALRPFYFAVHPDFFGQHPVEREINENSLKRLSVYLENLQKPGFKSLKPTQLTFYVRETDQSSSDGQEPFSTSVYLLNISKA

SEQ ID NO: 86184 - protein, 115 aa, Homo sapiens; identical to SEQ ID NO: 86183
  Payload ID: 17107
  Gene Symbol: TCAIM
  Gene Name: T cell activation inhibitor, mitochondrial
  Uniprot ID: Q8N3R3
  ENSP ID: ENSP00000392032

SEQ ID NO: 86185 - protein, 496 aa, Homo sapiens; identical to SEQ ID NO: 86180
  Payload ID: 17107
  Gene Symbol: TCAIM
  Gene Name: T cell activation inhibitor, mitochondrial
  Uniprot ID: Q8N3R3
  ENSP ID: ENSP00000402581

SEQ ID NO: 86186 - protein, 115 aa, Homo sapiens; identical to SEQ ID NO: 86183
  Payload ID: 17107
  Gene Symbol: TCAIM
  Gene Name: T cell activation inhibitor, mitochondrial
  Uniprot ID: Q8N3R3
  ENSP ID: ENSP00000402604

SEQ ID NO: 86187 - protein, 115 aa, Homo sapiens
  Payload ID: 17107
  Gene Symbol: TCAIM
  Gene Name: T cell activation inhibitor, mitochondrial
  ENSP ID: ENSP00000489162
MFCHLRPMRRLCLEKIFPHWFPFSRALSGAEAVNALRPFYFAVHPDFFGQHPVEREINENSLKRLSVYLENLQKPGFKSLKPTQLTFYVRETDQSSSDGQEPFSTSGLQMEGGRA

SEQ ID NO: 86188 - protein, 244 aa, Homo sapiens
  Payload ID: 17108
  Gene Symbol: TIGIT
  Gene Name: T cell immunoreceptor with Ig and ITIM domains
  Uniprot ID: Q495A1
  ENSP ID: ENSP00000373167
MRWCLLLIWAQGLRQAPLASGMMTGTIETTGNISAEKGGSIILQCHLSSTTAQVTQVNWEQQDQLLAICNADLGWHISPSFKDRVAPGPGLGLTLQSLTVNDTGEYFCIYHTYPDGTYTGRIFLEVLESSVAEHGARFQIPLLGAMAATLVVICTAVIVVVALTRKKKALRIHSVEGDLRRKSAGQEEWSPSAPSPPGSCVQAEAAPAGLCGEQRGEDCAELHDYFNVLSYRSLGNCSFFTETG

SEQ ID NO: 86189 - protein, 169 aa, Homo sapiens
  Payload ID: 17108
  Gene Symbol: TIGIT
  Gene Name: T cell immunoreceptor with Ig and ITIM domains
  ENSP ID: ENSP00000418917
MMTGTIETTGNISAEKGGSIILQCHLSSTTAQVTQVNWEQQDQLLAICNADLGWHISPSFKDRVAPGPGLGLTLQSLTVNDTGEYFCIYHTYPDGTYTGRIFLEVLESSVAEHGARFQIPLLGAMAATLVVICTAVIVVVALTRKKKALRIHSVEGDLRRKSAGQEEWS

SEQ ID NO: 86190 - protein, 244 aa, Homo sapiens; identical to SEQ ID NO: 86188
  Payload ID: 17108
  Gene Symbol: TIGIT
  Gene Name: T cell immunoreceptor with Ig and ITIM domains
  Uniprot ID: Q495A1
  ENSP ID: ENSP00000419085

SEQ ID NO: 86191 - protein, 163 aa, Homo sapiens
  Payload ID: 17108
  Gene Symbol: TIGIT
  Gene Name: T cell immunoreceptor with Ig and ITIM domains
  ENSP ID: ENSP00000419706
MMTGTIETTGNISAEKGGSIILQCHLSSTTAQVTQVNWEQQDQLLAICNADLGWHISPSFKDRVAPGPGLGLTLQSLTVNDTGEYFCIYHTYPDGTYTGRIFLEVLESSVAEHGARFQIPLLGAMAATLVVICTAVIVVVALTRKKKALRIHSVEGDLRRKSA

SEQ ID NO: 86192 - protein, 311 aa, Homo sapiens
  Payload ID: 17108
  Gene Symbol: TIGIT
  Gene Name: T cell immunoreceptor with Ig and ITIM domains
  ENSP ID: ENSP00000420552
MAFLVAHPMQFVYLLTTLCVFNMVFAKLGFSETVFSQRLSFTVLSAVGYFQWQKRPHLLPVGPLGRSMRWCLLLIWAQGLRQAPLASGMMTGTIETTGNISAEKGGSIILQCHLSSTTAQVTQVNWEQQDQLLAICNADLGWHISPSFKDRVAPGPGLGLTLQSLTVNDTGEYFCIYHTYPDGTYTGRIFLEVLESSVAEHGARFQIPLLGAMAATLVVICTAVIVVVALTRKKKALRIHSVEGDLRRKSAGQEEWSPSAPSPPGSCVQAEAAPAGLCGEQRGEDCAELHDYFNVLSYRSLGNCSFFTETG

SEQ ID NO: 86193 - protein, 141 aa, Homo sapiens
  Payload ID: 17109
  Gene Symbol: TRAC
  Gene Name: T cell receptor alpha constant
  ENSP ID: ENSP00000480116
  MOD_RES (1)..(1): Any amino acid
XIQNPDPAVYQLRDSKSSDKSVCLFTDFDSQTNVSQSKDSDVYITDKTVLDMRSMDFKSNSAVAWSNKSDFACANAFNNSIIPEDTFFPSPESSCDVKLVEKSFETDTNLNFQNLSVIGFRILLLKVAGFNLLMTLRLWSS

SEQ ID NO: 86194 - protein, 162 aa, Homo sapiens [sequence omitted]

SEQ ID NO: 86195 - protein, 21 aa, Homo sapiens
  Payload ID: 17110
  Gene Symbol: TRAJ1
  Gene Name: T cell receptor alpha joining 1 (non-functional)
  ENSP ID: ENSP00000452565
  MOD_RES (1)..(1): Any amino acid
XYESITSQLQFGKGTRVSTSP

SEQ ID NO: 86196 - protein, 21 aa, Homo sapiens
  Payload ID: 17111
  Gene Symbol: TRAJ10
  Gene Name: T cell receptor alpha joining 10
  ENSP ID: ENSP00000451066
ILTGGGNKLTFGTGTQLKVEL

SEQ ID NO: 86197 - protein, 20 aa, Homo sapiens
  Payload ID: 17112
  Gene Symbol: TRAJ11
  Gene Name: T cell receptor alpha joining 11
  ENSP ID: ENSP00000451806
  MOD_RES (1)..(1): Any amino acid
XNSGYSTLTFGKGTMLLVSP

SEQ ID NO: 86198 - protein, 20 aa, Homo sapiens
  Payload ID: 17113
  Gene Symbol: TRAJ12
  Gene Name: T cell receptor alpha joining 12
  ENSP ID: ENSP00000450522
  MOD_RES (1)..(1): Any amino acid
XMDSSYKLIFGSGTRLLVRP

SEQ ID NO: 86199 - protein, 21 aa, Homo sapiens
  Payload ID: 17114
  Gene Symbol: TRAJ13
  Gene Name: T cell receptor alpha joining 13
  ENSP ID: ENSP00000452484
  MOD_RES (1)..(1): Any amino acid
XNSGGYQKVTFGTGTKLQVIP

SEQ ID NO: 86200 - protein, 17 aa, Homo sapiens
  Payload ID: 17115
  Gene Symbol: TRAJ14
  Gene Name: T cell receptor alpha joining 14
  ENSP ID: ENSP00000450438
IYSTFIFGSGTRLSVKP

SEQ ID NO: 86201 - protein, 20 aa, Homo sapiens
  Payload ID: 17116
  Gene Symbol: TRAJ16
  Gene Name: T cell receptor alpha joining 16
  ENSP ID: ENSP00000450622
  MOD_RES (1)..(1): Any amino acid
XFSDGQKLLFARGTMLKVDL

SEQ ID NO: 86202 - protein, 21 aa, Homo sapiens
  Payload ID: 17117
  Gene Symbol: TRAJ17
  Gene Name: T cell receptor alpha joining 17
  ENSP ID: ENSP00000451250
  MOD_RES (1)..(1): Any amino acid
XIKAAGNKLTFGGGTRVLVKP

SEQ ID NO: 86203 - protein, 22 aa, Homo sapiens
  Payload ID: 17118
  Gene Symbol: TRAJ18
  Gene Name: T cell receptor alpha joining 18
  ENSP ID: ENSP00000451639
  MOD_RES (1)..(1): Any amino acid
XDRGSTLGRLYFGRGTQLTVWP

SEQ ID NO: 86204 - protein, 20 aa, Homo sapiens
  Payload ID: 17119
  Gene Symbol: TRAJ19
  Gene Name: T cell receptor alpha joining 19 (non-functional)
  ENSP ID: ENSP00000451728
  MOD_RES (1)..(1): Any amino acid
XYQRFYNFTFGKGSKHNVTP

SEQ ID NO: 86205 - protein, 22 aa, Homo sapiens
  Payload ID: 17120
  Gene Symbol: TRAJ2
  Gene Name: T cell receptor alpha joining 2 (non-functional)
  ENSP ID: ENSP00000450593
  MOD_RES (1)..(1): Any amino acid
XNTGGTIDKLTFGKGTHVFIIS

SEQ ID NO: 86206 - protein, 19 aa, Homo sapiens
  Payload ID: 17121
  Gene Symbol: TRAJ20
  Gene Name: T cell receptor alpha joining 20
  ENSP ID: ENSP00000451847
  MOD_RES (1)..(1): Any amino acid
XSNDYKLSFGAGTTVTVRA

SEQ ID NO: 86207 - protein, 18 aa, Homo sapiens
  Payload ID: 17122
  Gene Symbol: TRAJ21
  Gene Name: T cell receptor alpha joining 21
  ENSP ID: ENSP00000450760
YNFNKFYFGSGTKLNVKP

SEQ ID NO: 86208 - protein, 21 aa, Homo sapiens
  Payload ID: 17123
  Gene Symbol: TRAJ22
  Gene Name: T cell receptor alpha joining 22
  ENSP ID: ENSP00000451843
  MOD_RES (1)..(1): Any amino acid
XSSGSARQLTFGSGTQLTVLP

SEQ ID NO: 86209 - protein, 21 aa, Homo sapiens
  Payload ID: 17124
  Gene Symbol: TRAJ23
  Gene Name: T cell receptor alpha joining 23
  ENSP ID: ENSP00000450455
  MOD_RES (1)..(1): Any amino acid
XIYNQGGKLIFGQGTELSVKP

SEQ ID NO: 86210 - protein, 21 aa, Homo sapiens
  Payload ID: 17125
  Gene Symbol: TRAJ24
  Gene Name: T cell receptor alpha joining 24
  ENSP ID: ENSP00000452134
  MOD_RES (1)..(1): Any amino acid
XTTDSWGKFQFGAGTQVVVTP

SEQ ID NO: 86211 - protein, 20 aa, Homo sapiens
  Payload ID: 17126
  Gene Symbol: TRAJ25
  Gene Name: T cell receptor alpha joining 25 (non-functional)
  ENSP ID: ENSP00000452115
  MOD_RES (1)..(1): Any amino acid
XEGQGFSFIFGKGTRLLVKP

SEQ ID NO: 86212 - protein, 20 aa, Homo sapiens
  Payload ID: 17127
  Gene Symbol: TRAJ26
  Gene Name: T cell receptor alpha joining 26
  ENSP ID: ENSP00000450953
  MOD_RES (1)..(1): Any amino acid
XDNYGQNFVFGPGTRLSVLP

SEQ ID NO: 86213 - protein, 20 aa, Homo sapiens
  Payload ID: 17128
  Gene Symbol: TRAJ27
  Gene Name: T cell receptor alpha joining 27
  ENSP ID: ENSP00000451221
  MOD_RES (1)..(1): Any amino acid
XNTNAGKSTFGDGTTLTVKP

SEQ ID NO: 86214 - protein, 22 aa, Homo sapiens
  Payload ID: 17129
  Gene Symbol: TRAJ28
  Gene Name: T cell receptor alpha joining 28
  ENSP ID: ENSP00000451561
  MOD_RES (1)..(1): Any amino acid
XYSGAGSYQLTFGKGTKLSVIP

SEQ ID NO: 86215 - protein, 20 aa, Homo sapiens
  Payload ID: 17130
  Gene Symbol: TRAJ29
  Gene Name: T cell receptor alpha joining 29
  ENSP ID: ENSP00000452518
  MOD_RES (1)..(1): Any amino acid
XNSGNTPLVFGKGTRLSVIA

SEQ ID NO: 86216 - protein, 21 aa, Homo sapiens
  Payload ID: 17131
  Gene Symbol: TRAJ3
  Gene Name: T cell receptor alpha joining 3
  ENSP ID: ENSP00000451699
  MOD_RES (1)..(1): Any amino acid
XGYSSASKIIFGSGTRLSIRP

SEQ ID NO: 86217 - protein, 19 aa, Homo sapiens
  Payload ID: 17132
  Gene Symbol: TRAJ30
  Gene Name: T cell receptor alpha joining 30
  ENSP ID: ENSP00000451671
  MOD_RES (1)..(1): Any amino acid
XNRDDKIIFGKGTRLHILP

SEQ ID NO: 86218 - protein, 19 aa, Homo sapiens
  Payload ID: 17133
  Gene Symbol: TRAJ31
  Gene Name: T cell receptor alpha joining 31
  ENSP ID: ENSP00000452141
  MOD_RES (1)..(1): Any amino acid
XNNNARLMFGDGTQLVVKP

SEQ ID NO: 86219 - protein, 22 aa, Homo sapiens
  Payload ID: 17134
  Gene Symbol: TRAJ32
  Gene Name: T cell receptor alpha joining 32
  ENSP ID: ENSP00000451503
  MOD_RES (1)..(1): Any amino acid
XNYGGATNKLIFGTGTLLAVQP

SEQ ID NO: 86220 - protein, 19 aa, Homo sapiens
  Payload ID: 17135
  Gene Symbol: TRAJ33
  Gene Name: T cell receptor alpha joining 33
  ENSP ID: ENSP00000451175
  MOD_RES (1)..(1): Any amino acid
XDSNYQLIWGAGTKLIIKP

SEQ ID NO: 86221 - protein, 19 aa, Homo sapiens
  Payload ID: 17136
  Gene Symbol: TRAJ34
  Gene Name: T cell receptor alpha joining 34
  ENSP ID: ENSP00000450793
SYNTDKLIFGTGTRLQVFP

SEQ ID NO: 86222 - protein, 20 aa, Homo sapiens
  Payload ID: 17137
  Gene Symbol: TRAJ35
  Gene Name: T cell receptor alpha joining 35 (non-functional)
  ENSP ID: ENSP00000451687
  MOD_RES (1)..(1): Any amino acid
XIGFGNVLHCGSGTQVIVLP

SEQ ID NO: 86223 - protein, 20 aa, Homo sapiens
  Payload ID: 17138
  Gene Symbol: TRAJ36
  Gene Name: T cell receptor alpha joining 36
  ENSP ID: ENSP00000478270
  MOD_RES (1)..(1): Any amino acid
XQTGANNLFFGTGTRLTVIP

SEQ ID NO: 86224 - protein, 22 aa, Homo sapiens
  Payload ID: 17139
  Gene Symbol: TRAJ37
  Gene Name: T cell receptor alpha joining 37
  ENSP ID: ENSP00000483197
  MOD_RES (1)..(1): Any amino acid
XGSSNTGKLIFGQGTTLQVKPG

SEQ ID NO: 86225 - protein, 21 aa, Homo sapiens
  Payload ID: 17140
  Gene Symbol: TRAJ38
  Gene Name: T cell receptor alpha joining 38
  ENSP ID: ENSP00000451248
  MOD_RES (1)..(1): Any amino acid
XNAGNNRKLIWGLGTSLAVNP

SEQ ID NO: 86226 - protein, 21 aa, Homo sapiens
  Payload ID: 17141
  Gene Symbol: TRAJ39
  Gene Name: T cell receptor alpha joining 39
  ENSP ID: ENSP00000452510
  MOD_RES (1)..(1): Any amino acid
XNNNAGNMLTFGGGTRLMVKP

SEQ ID NO: 86227 - protein, 21 aa, Homo sapiens
  Payload ID: 17142
  Gene Symbol: TRAJ4
  Gene Name: T cell receptor alpha joining 4
  ENSP ID: ENSP00000452097
  MOD_RES (1)..(1): Any amino acid
XFSGGYNKLIFGAGTRLAVHP

SEQ ID NO: 86228 - protein, 20 aa, Homo sapiens
  Payload ID: 17143
  Gene Symbol: TRAJ40
  Gene Name: T cell receptor alpha joining 40
  ENSP ID: ENSP00000452114
TTSGTYKYIFGTGTRLKVLA

SEQ ID NO: 86229 - protein, 21 aa, Homo sapiens
  Payload ID: 17144
  Gene Symbol: TRAJ41
  Gene Name: T cell receptor alpha joining 41
  ENSP ID: ENSP00000452149
  MOD_RES (1)..(1): Any amino acid
XNSNSGYALNFGKGTSLLVTP

SEQ ID NO: 86230 - protein, 22 aa, Homo sapiens
  Payload ID: 17145
  Gene Symbol: TRAJ42
  Gene Name: T cell receptor alpha joining 42
  ENSP ID: ENSP00000451815
  MOD_RES (1)..(1): Any amino acid
XNYGGSQGNLIFGKGTKLSVKP

SEQ ID NO: 86231 - protein, 18 aa, Homo sapiens
  Payload ID: 17146
  Gene Symbol: TRAJ43
  Gene Name: T cell receptor alpha joining 43
  ENSP ID: ENSP00000450690
  MOD_RES (1)..(1): Any amino acid
XNNNDMRFGAGTRLTVKP

SEQ ID NO: 86232 - protein, 21 aa, Homo sapiens
  Payload ID: 17147
  Gene Symbol: TRAJ44
  Gene Name: T cell receptor alpha joining 44
  ENSP ID: ENSP00000451632
  MOD_RES (1)..(1): Any amino acid
XNTGTASKLTFGTGTRLQVTL

SEQ ID NO: 86233 - protein, 22 aa, Homo sapiens
  Payload ID: 17148
  Gene Symbol: TRAJ45
  Gene Name: T cell receptor alpha joining 45
  ENSP ID: ENSP00000451312
  MOD_RES (1)..(1): Any amino acid
XYSGGGADGLTFGKGTHLIIQP

SEQ ID NO: 86234 - protein, 21 aa, Homo sapiens
  Payload ID: 17149
  Gene Symbol: TRAJ46
  Gene Name: T cell receptor alpha joining 46
  ENSP ID: ENSP00000451191
  MOD_RES (1)..(1): Any amino acid
XKKSSGDKLTFGTGTRLAVRP

SEQ ID NO: 86235 - protein, 19 aa, Homo sapiens
  Payload ID: 17150
  Gene Symbol: TRAJ47
  Gene Name: T cell receptor alpha joining 47
  ENSP ID: ENSP00000451749
  MOD_RES (1)..(1): Any amino acid
XEYGNKLVFGAGTILRVKS

SEQ ID NO: 86236 - protein, 21 aa, Homo sapiens
  Payload ID: 17151
  Gene Symbol: TRAJ48
  Gene Name: T cell receptor alpha joining 48
  ENSP ID: ENSP00000450777
  MOD_RES (1)..(1): Any amino acid
XSNFGNEKLTFGTGTRLTIIP

SEQ ID NO: 86237 - protein, 19 aa, Homo sapiens
  Payload ID: 17152
  Gene Symbol: TRAJ49
  Gene Name: T cell receptor alpha joining 49
  ENSP ID: ENSP00000451657
  MOD_RES (1)..(1): Any amino acid
XNTGNQFYFGTGTSLTVIP

SEQ ID NO: 86238 - protein, 20 aa, Homo sapiens
  Payload ID: 17153
  Gene Symbol: TRAJ5
  Gene Name: T cell receptor alpha joining 5
  ENSP ID: ENSP00000450961
  MOD_RES (1)..(1): Any amino acid
XDTGRRALTFGSGTRLQVQP

SEQ ID NO: 86239 - protein, 20 aa, Homo sapiens
  Payload ID: 17154
  Gene Symbol: TRAJ50
  Gene Name: T cell receptor alpha joining 50
  ENSP ID: ENSP00000451589
  MOD_RES (1)..(1): Any amino acid
XKTSYDKVIFGPGTSLSVIP

SEQ ID NO: 86240 - protein, 23 aa, Homo sapiens
  Payload ID: 17155
  Gene Symbol: TRAJ52
  Gene Name: T cell receptor alpha joining 52
  ENSP ID: ENSP00000451143
  MOD_RES (1)..(1): Any amino acid
XNAGGTSYGKLTFGQGTILTVHP

SEQ ID NO: 86241 - protein, 22 aa, Homo sapiens
  Payload ID: 17156
  Gene Symbol: TRAJ53
  Gene Name: T cell receptor alpha joining 53
  ENSP ID: ENSP00000451299
  MOD_RES (1)..(1): Any amino acid
XNSGGSNYKLTFGKGTLLTVNP

SEQ ID NO: 86242 - protein, 20 aa, Homo sapiens
  Payload ID: 17157
  Gene Symbol: TRAJ54
  Gene Name: T cell receptor alpha joining 54
  ENSP ID: ENSP00000452564
  MOD_RES (1)..(1): Any amino acid
XIQGAQKLVFGQGTRLTINP

SEQ ID NO: 86243 - protein, 21 aa, Homo sapiens
  Payload ID: 17158
  Gene Symbol: TRAJ56
  Gene Name: T cell receptor alpha joining 56
  ENSP ID: ENSP00000451870
  MOD_RES (1)..(1): Any amino acid
XYTGANSKLTFGKGITLSVRP

SEQ ID NO: 86244 - protein, 21 aa, Homo sapiens
  Payload ID: 17159
  Gene Symbol: TRAJ57
  Gene Name: T cell receptor alpha joining 57
  ENSP ID: ENSP00000452248
  MOD_RES (1)..(1): Any amino acid
XTQGGSEKLVFGKGTKLTVNP

SEQ ID NO: 86245 - protein, 20 aa, Homo sapiens
  Payload ID: 17160
  Gene Symbol: TRAJ58
  Gene Name: T cell receptor alpha joining 58 (non-functional)
  ENSP ID: ENSP00000452150
  MOD_RES (1)..(1): Any amino acid
XETSGSRLTFGEGTQLTVNP

SEQ ID NO: 86246 - protein, 18 aa, Homo sapiens
  Payload ID: 17161
  Gene Symbol: TRAJ59
  Gene Name: T cell receptor alpha joining 59 (non-functional)
  ENSP ID: ENSP00000451065
  MOD_RES (1)..(1): Any amino acid
XKEGNRKFTFGMGTQVRV

SEQ ID NO: 86247 - protein, 21 aa, Homo sapiens
  Payload ID: 17162
  Gene Symbol: TRAJ6
  Gene Name: T cell receptor alpha joining 6
  ENSP ID: ENSP00000451965
  MOD_RES (1)..(1): Any amino acid
XASGGSYIPTFGRGTSLIVHP

SEQ ID NO: 86248 - protein, 20 aa, Homo sapiens
  Payload ID: 17163
  Gene Symbol: TRAJ61
  Gene Name: T cell receptor alpha joining 61 (non-functional)
  ENSP ID: ENSP00000452464
  MOD_RES (1)..(1): Any amino acid
XYRVNRKLTFGANTRGIMKL

SEQ ID NO: 86249 - protein, 20 aa, Homo sapiens
  Payload ID: 17164
  Gene Symbol: TRAJ7
  Gene Name: T cell receptor alpha joining 7
  ENSP ID: ENSP00000452600
  MOD_RES (1)..(1): Any amino acid
XDYGNNRLAFGKGNQVVVIP

SEQ ID NO: 86250 - protein, 20 aa, Homo sapiens
  Payload ID: 17165
  Gene Symbol: TRAJ9
  Gene Name: T cell receptor alpha joining 9
  ENSP ID: ENSP00000451766
GNTGGFKTIFGAGTRLFVKA

SEQ ID NO: 86251 - protein, 114 aa, Homo sapiens
  Payload ID: 17166
  Gene Symbol: TRAV10
  Gene Name: T cell receptor alpha variable 10
  ENSP ID: ENSP00000440313
MKKHLTTFLVILWLYFYRGNGKNQVEQSPQSLIILEGKNCTLQCNYTVSPFSNLRWYKQDTGRGPVSLTIMTFSENTKSNGRYTATLDADTKQSSLHITASQLSDSASYICVVS

SEQ ID NO: 86252 - protein, 108 aa, Homo sapiens
  Payload ID: 17167
  Gene Symbol: TRAV1-1
  Gene Name: T cell receptor alpha variable 1-1
  ENSP ID: ENSP00000446309
MWGAFLLYVSMKMGGTAGQSLEQPSEVTAVEGAIVQINCTYQTSGFYGLSWYQQHDGGAPTFLSYNALDGLEETGRFSSFLSRSDSYGYLLLQELQMKDSASYFCAVR

SEQ ID NO: 86253 - protein, 106 aa, Homo sapiens
  Payload ID: 17168
  Gene Symbol: TRAV1-2
  Gene Name: T cell receptor alpha variable 1-2
  ENSP ID: ENSP00000439668
MWGVFLLYVSMKMGGTTGQNIDQPTEMTATEGAIVQINCTYQTSGFNGLFWYQQHAGEAPTFLSYNVLDGLEEKGRFSSFLSRSKGYSYLLLKELQMKDSASYLCA

SEQ ID NO: 86254 - protein, 112 aa, Homo sapiens
  Payload ID: 17169
  Gene Symbol: TRAV12-1
  Gene Name: T cell receptor alpha variable 12-1
  ENSP ID: ENSP00000445405
MISLRVLLVILWLQLSWVWSQRKEVEQDPGPFNVPEGATVAFNCTYSNSASQSFFWYRQDCRKEPKLLMSVYSSGNEDGRFTAQLNRASQYISLLIRDSKLSDSATYLCVVN

SEQ ID NO: 86255 - protein, 113 aa, Homo sapiens
  Payload ID: 17170
  Gene Symbol: TRAV12-2
  Gene Name: T cell receptor alpha variable 12-2
  ENSP ID: ENSP00000437362
MKSLRVLLVILWLQLSWVWSQQKEVEQNSGPLSVPEGAIASLNCTYSDRGSQSFFWYRQYSGKSPELIMFIYSNGDKEDGRFTAQLNKASQYVSLLIRDSQPSDSATYLCAVN

SEQ ID NO: 86256 - protein, 114 aa, Homo sapiens
  Payload ID: 17171
  Gene Symbol: TRAV12-3
  Gene Name: T cell receptor alpha variable 12-3
  ENSP ID: ENSP00000451822
MMKSLRVLLVILWLQLSWVWSQQKEVEQDPGPLSVPEGAIVSLNCTYSNSAFQYFMWYRQYSRKGPELLMYTYSSGNKEDGRFTAQVDKSSKYISLFIRDSQPSDSATYLCAMS

SEQ ID NO: 86257 - protein, 112 aa, Homo sapiens
  Payload ID: 17172
  Gene Symbol: TRAV13-1
  Gene Name: T cell receptor alpha variable 13-1
  ENSP ID: ENSP00000441696
MTSIRAVFIFLWLQLDLVNGENVEQHPSTLSVQEGDSAVIKCTYSDSASNYFPWYKQELGKGPQLIIDIRSNVGEKKDQRIAVTLNKTAKHFSLHITETQPEDSAVYFCAAS

SEQ ID NO: 86258 - protein, 113 aa, Homo sapiens
  Payload ID: 17173
  Gene Symbol: TRAV13-2
  Gene Name: T cell receptor alpha variable 13-2
  ENSP ID: ENSP00000438480
MAGIRALFMYLWLQLDWVSRGESVGLHLPTLSVQEGDNSIINCAYSNSASDYFIWYKQESGKGPQFIIDIRSNMDKRQGQRVTVLLNKTVKHLSLQIAATQPGDSAVYFCAEN

SEQ ID NO: 86259 - protein, 116 aa, Homo sapiens
  Payload ID: 17174
  Gene Symbol: TRAV14DV4
  Gene Name: T cell receptor alpha variable 14/delta variable 4
  ENSP ID: ENSP00000446015
MSLSSLLKVVTASLWLGPGIAQKITQTQPGMFVQEKEAVTLDCTYDTSDPSYGLFWYKQPSSGEMIFLIYQGSYDQQNATEGRYSLNFQKARKSANLVISASQLGDSAMYFCAMRE

SEQ ID NO: 86260 - protein, 109 aa, Homo sapiens
  Payload ID: 17175
  Gene Symbol: TRAV16
  Gene Name: T cell receptor alpha variable 16
  ENSP ID: ENSP00000451359
MKPTLISVLVIIFILRGTRAQRVTQPEKLLSVFKGAPVELKCNYSYSGSPELFWYVQYSRQRLQLLLRHISRESIKGFTADLNKGETSFHLKKPFAQEEDSAMYYCALS

SEQ ID NO: 86261 - protein, 112 aa, Homo sapiens
  Payload ID: 17176
  Gene Symbol: TRAV17
  Gene Name: T cell receptor alpha variable 17
  ENSP ID: ENSP00000452087
METLLGVSLVILWLQLARVNSQQGEEDPQALSIQEGENATMNCSYKTSINNLQWYRQNSGRGLVHLILIRSNEREKHSGRLRVTLDTSKKSSSLLITASRAADTASYFCATD

SEQ ID NO: 86262 - protein, 111 aa, Homo sapiens
  Payload ID: 17177
  Gene Symbol: TRAV18
  Gene Name: T cell receptor alpha variable 18
  ENSP ID: ENSP00000451574
MLSASCSGLVILLIFRRTSGDSVTQTEGPVTLPERAALTLNCTYQSSYSTFLFWYVQYLNKEPELLLKSSENQETDSRGFQASPIKSDSSFHLEKPSVQLSDSAVYYCALR

SEQ ID NO: 86263 - protein, 116 aa, Homo sapiens
  Payload ID: 17178
  Gene Symbol: TRAV19
  Gene Name: T cell receptor alpha variable 19
  ENSP ID: ENSP00000452148
MLTASLLRAVIASICVVSSMAQKVTQAQTEISVVEKEDVTLDCVYETRDTTYYLFWYKQPPSGELVFLIRRNSFDEQNEISGRYSWNFQKSTSSFNFTITASQVVDSAVYFCALSE

SEQ ID NO: 86264 - protein, 112 aa, Homo sapiens
  Payload ID: 17179
  Gene Symbol: TRAV2
  Gene Name: T cell receptor alpha variable 2
  ENSP ID: ENSP00000438195
MALQSTLGAVWLGLLLNSLWKVAESKDQVFQPSTVASSEGAVVEIFCNHSVSNAYNFFWYLHFPGCAPRLLVKGSKPSQQGRYNMTYERFSSSLLILQVREADAAVYYCAVE

SEQ ID NO: 86265 - protein, 112 aa, Homo sapiens
  Payload ID: 17180
  Gene Symbol: TRAV20
  Gene Name: T cell receptor alpha variable 20
  ENSP ID: ENSP00000452067
MEKMLECAFIVLWLQLGWLSGEDQVTQSPEALRLQEGESSSLNCSYTVSGLRGLFWYRQDPGKGPEFLFTLYSAGEEKEKERLKATLTKKESFLHITAPKPEDSATYLCAVQ

SEQ ID NO: 86266 - protein, 112 aa, Homo sapiens
  Payload ID: 17181
  Gene Symbol: TRAV21
  Gene Name: T cell receptor alpha variable 21
  ENSP ID: ENSP00000452526
METLLGLLILWLQLQWVSSKQEVTQIPAALSVPEGENLVLNCSFTDSAIYNLQWFRQDPGKGLTSLLLIQSSQREQTSGRLNASLDKSSGRSTLYIAASQPGDSATYLCAVR

SEQ ID NO: 86267 - protein, 110 aa, Homo sapiens
  Payload ID: 17182
  Gene Symbol: TRAV22
  Gene Name: T cell receptor alpha variable 22
  ENSP ID: ENSP00000452420
MKRILGALLGLLSAQVCCVRGIQVEQSPPDLILQEGANSTLRCNFSDSVNNLQWFHQNPWGQLINLFYIPSGTKQNGRLSATTVATERYSLLYISSSQTTDSGVYFCAVE

SEQ ID NO: 86268 - protein, 121 aa, Homo sapiens
  Payload ID: 17183
  Gene Symbol: TRAV23DV6
  Gene Name: T cell receptor alpha variable 23/delta variable 6
  ENSP ID: ENSP00000451203
MDKILGASFLVLWLQLCWVSGQQKEKSDQQQVKQSPQSLIVQKGGISIINCAYENTAFDYFPWYQQFPGKGPALLIAIRPDVSEKKEGRFTISFNKSAKQFSSHIMDSQPGDSATYFCAAS

SEQ ID NO: 86269 - protein, 114 aa, Homo sapiens
  Payload ID: 17184
  Gene Symbol: TRAV24
  Gene Name: T cell receptor alpha variable 24
  ENSP ID: ENSP00000451837
MEKNPLAAPLLILWFHLDCVSSILNVEQSPQSLHVQEGDSTNFTCSFPSSNFYALHWYRWETAKSPEALFVMTLNGDEKKKGRISATLNTKEGYSYLYIKGSQPEDSATYLCAF

SEQ ID NO: 86270 - protein, 109 aa, Homo sapiens
  Payload ID: 17185
  Gene Symbol: TRAV25
  Gene Name: T cell receptor alpha variable 25
  ENSP ID: ENSP00000452100
MLLITSMLVLWMQLSQVNGQQVMQIPQYQHVQEGEDFTTYCNSSTTLSNIQWYKQRPGGHPVFLIQLVKSGEVKKQKRLTFQFGEAKKNSSLHITATQTTDVGTYFCAG

SEQ ID NO: 86271 - protein, 109 aa, Homo sapiens
  Payload ID: 17186
  Gene Symbol: TRAV26-1
  Gene Name: T cell receptor alpha variable 26-1
  ENSP ID: ENSP00000452431
MRLVARVTVFLTFGTIIDAKTTQPTSMDCAEGRAANLPCNHSTISGNEYVYWYRQIHSQGPQYIIHGLKNNETNEMASLIITEDRKSSTLILPHATLRDTAVYYCIVRV

SEQ ID NO: 86272 - protein, 109 aa, Homo sapiens
  Payload ID: 17187
  Gene Symbol: TRAV26-2
  Gene Name: T cell receptor alpha variable 26-2
  ENSP ID: ENSP00000450970
MKLVTSITVLLSLGIMGDAKTTQPNSMESNEEEPVHLPCNHSTISGTDYIHWYRQLPSQGPEYVIHGLTSNVNNRMASLAIAEDRKSSTLILHRATLRDAAVYYCILRD

SEQ ID NO: 86273 - protein, 109 aa, Homo sapiens
  Payload ID: 17188
  Gene Symbol: TRAV27
  Gene Name: T cell receptor alpha variable 27
  ENSP ID: ENSP00000451735
MVLKFSVSILWIQLAWVSTQLLEQSPQFLSIQEGENLTVYCNSSSVFSSLQWYRQEPGEGPVLLVTVVTGGEVKKLKRLTFQFGDARKDSSLHITAAQTGDTGLYLCAG

SEQ ID NO: 86274 - protein, 119 aa, Homo sapiens
  Payload ID: 17189
  Gene Symbol: TRAV29DV5
  Gene Name: T cell receptor alpha variable 29/delta variable 5 (gene/pseudogene)
  ENSP ID: ENSP00000452209
MAMLLGASVLILWLQPDWVNSQQKNDDQQVKQNSPSLSVQEGRISILNCDYTNSMFDYFLWYKKYPAEGPTFLISISSIKDKNEDGRFTVFLNKSAKHLSLHIVPSQPGDSAVYFCAAS

SEQ ID NO: 86275 - protein, 114 aa, Homo sapiens
  Payload ID: 17190
  Gene Symbol: TRAV3
  Gene Name: T cell receptor alpha variable 3 (gene/pseudogene)
  ENSP ID: ENSP00000444955
MASAPISMLAMLFTLSGLRAQSVAQPEDQVNVAEGNPLTVKCTYSVSGNPYLFWYVQYPNRGLQFLLKYITGDNLVKGSYGFEAEFNKSQTSFHLKKPSALVSDSALYFCAVRD

SEQ ID NO: 86276 - protein, 112 aa, Homo sapiens
  Payload ID: 17191
  Gene Symbol: TRAV30
  Gene Name: T cell receptor alpha variable 30
  ENSP ID: ENSP00000451308
METLLKVLSGTLLWQLTWVRSQQPVQSPQAVILREGEDAVINCSSSKALYSVHWYRQKHGEAPVFLMILLKGGEQKGHDKISASFNEKKQQSSLYLTASQLSYSGTYFCGTE

SEQ ID NO: 86277 - protein, 112 aa, Homo sapiens
  Payload ID: 17192
  Gene Symbol: TRAV34
  Gene Name: T cell receptor alpha variable 34
  ENSP ID: ENSP00000452002
METVLQVLLGILGFQAAWVSSQELEQSPQSLIVQEGKNLTINCTSSKTLYGLYWYKQKYGEGLIFLMMLQKGGEEKSHEKITAKLDEKKQQSSLHITASQPSHAGIYLCGAD

SEQ ID NO: 86278 - protein, 113 aa, Homo sapiens
  Payload ID: 17193
  Gene Symbol: TRAV36DV7
  Gene Name: T cell receptor alpha variable 36/delta variable 7
  ENSP ID: ENSP00000450804
MMKCPQALLAIFWLLLSWVSSEDKVVQSPLSLVVHEGDTVTLNCSYEVTNFRSLLWYKQEKKAPTFLFMLTSSGIEKKSGRLSSILDKKELFSILNITATQTGDSAIYLCAVE

SEQ ID NO: 86279 - protein, 116 aa, Homo sapiens
  Payload ID: 17194
  Gene Symbol: TRAV38-1
  Gene Name: T cell receptor alpha variable 38-1
  ENSP ID: ENSP00000450950
MTRVSLLWAVVVSTCLESGMAQTVTQSQPEMSVQEAETVTLSCTYDTSENNYYLFWYKQPPSRQMILVIRQEAYKQQNATENRFSVNFQKAAKSFSLKISDSQLGDTAMYFCAFMK

SEQ ID NO: 86280 - protein, 116 aa, Homo sapiens
  Payload ID: 17195
  Gene Symbol: TRAV38-2DV8
  Gene Name: T cell receptor alpha variable 38-2/delta variable 8
  ENSP ID: ENSP00000452332
MACPGFLWALVISTCLEFSMAQTVTQSQPEMSVQEAETVTLSCTYDTSESDYYLFWYKQPPSRQMILVIRQEAYKQQNATENRFSVNFQKAAKSFSLKISDSQLGDAAMYFCAYRS

SEQ ID NO: 86281 - protein, 110 aa, Homo sapiens
  Payload ID: 17196
  Gene Symbol: TRAV39
  Gene Name: T cell receptor alpha variable 39
  ENSP ID: ENSP00000450865
MKKLLAMILWLQLDRLSGELKVEQNPLFLSMQEGKNYTIYCNYSTTSDRLYWYRQDPGKSLESLFVLLSNGAVKQEGRLMASLDTKARLSTLHITAAVHDLSATYFCAVD

SEQ ID NO: 86282 - protein, 109 aa, Homo sapiens
  Payload ID: 17197
  Gene Symbol: TRAV4
  Gene Name: T cell receptor alpha variable 4
  ENSP ID: ENSP00000451535
MRQVARVIVFLTLSTLSLAKTTQPISMDSYEGQEVNITCSHNNIATNDYITWYQQFPSQGPRFIIQGYKTKVTNEVASLFIPADRKSSTLSLPRVSLSDTAVYYCLVGD

SEQ ID NO: 86283 - protein, 105 aa, Homo sapiens
  Payload ID: 17198
  Gene Symbol: TRAV40
  Gene Name: T cell receptor alpha variable 40
  ENSP ID: ENSP00000452585
MNSSLDFLILILMFGGTSSNSVKQTGQITVSEGASVTMNCTYTSTGYPTLFWYVEYPSKPLQLLQRETMENSKNFGGGNIKDKNSPIVKYSVQVSDSAVYYCLLG

SEQ ID NO: 86284 - protein, 112 aa, Homo sapiens
  Payload ID: 17199
  Gene Symbol: TRAV41
  Gene Name: T cell receptor alpha variable 41
  ENSP ID: ENSP00000451177
MVKIRQFLLAILWLQLSCVSAAKNEVEQSPQNLTAQEGEFITINCSYSVGISALHWLQQHPGGGIVSLFMLSSGKKKHGRLIATINIQEKHSSLHITASHPRDSAVYICAVR

SEQ ID NO: 86285 - protein, 113 aa, Homo sapiens
  Payload ID: 17200
  Gene Symbol: TRAV5
  Gene Name: T cell receptor alpha variable 5
  ENSP ID: ENSP00000446355
MKTFAGFSFLFLWLQLDCMSRGEDVEQSLFLSVREGDSSVINCTYTDSSSTYLYWYKQEPGAGLQLLTYIFSNMDMKQDQRLTVLLNKKDKHLSLRIADTQTGDSAIYFCAES

SEQ ID NO: 86286 - protein, 132 aa, Homo sapiens
  Payload ID: 17201
  Gene Symbol: TRAV6
  Gene Name: T cell receptor alpha variable 6
  ENSP ID: ENSP00000438290
MAFWLRSLGLHFRPHLGRRMESFLGGVLLILWLQVDWVKSQKIEQNSEALNIQEGKTATLTCNYTNYSPAYLQWYRQDPGRGPVFLLLIRENEKEKRKERLKVTFDTTLKQSLFHITASQPADSATYLCALD

SEQ ID NO: 86287 - protein, 112 aa, Homo sapiens
  Payload ID: 17202
  Gene Symbol: TRAV7
  Gene Name: T cell receptor alpha variable 7
  ENSP ID: ENSP00000443297
MEKMRRPVLIIFCLCLGWANGENQVEHSPHFLGPQQGDVASMSCTYSVSRFNNLQWYRQNTGMGPKHLLSMYSAGYEKQKGRLNATLLKNGSSLYITAVQPEDSATYFCAVD

SEQ ID NO: 86288 - protein, 113 aa, Homo sapiens
  Payload ID: 17203
  Gene Symbol: TRAV8-1
  Gene Name: T cell receptor alpha variable 8-1
  ENSP ID: ENSP00000443059
MLLLLIPVLGMIFALRDARAQSVSQHNHHVILSEAASLELGCNYSYGGTVNLFWYVQYPGQHLQLLLKYFSGDPLVKGIKGFEAEFIKSKFSFNLRKPSVQWSDTAEYFCAVN

SEQ ID NO: 86289 - protein, 113 aa, Homo sapiens
  Payload ID: 17204
  Gene Symbol: TRAV8-2
  Gene Name: T cell receptor alpha variable 8-2
  ENSP ID: ENSP00000439323
MLLLLVPVLEVIFTLGGTRAQSVTQLDSHVSVSEGTPVLLRCNYSSSYSPSLFWYVQHPNKGLQLLLKYTSAATLVKGINGFEAEFKKSETSFHLTKPSAHMSDAAEYFCVVS

SEQ ID NO: 86290 - protein, 113 aa, Homo sapiens
  Payload ID: 17205
  Gene Symbol: TRAV8-3
  Gene Name: T cell receptor alpha variable 8-3
  ENSP ID: ENSP00000440087
MLLELIPLLGIHFVLRTARAQSVTQPDIHITVSEGASLELRCNYSYGATPYLFWYVQSPGQGLQLLLKYFSGDTLVQGIKGFEAEFKRSQSSFNLRKPSVHWSDAAEYFCAVG

SEQ ID NO: 86291 - protein, 113 aa, Homo sapiens
  Payload ID: 17206
  Gene Symbol: TRAV8-4
  Gene Name: T cell receptor alpha variable 8-4
  ENSP ID: ENSP00000445942
MLLLLVPVLEVIFTLGGTRAQSVTQLGSHVSVSEGALVLLRCNYSSSVPPYLFWYVQYPNQGLQLLLKYTSAATLVKGINGFEAEFKKSETSFHLTKPSAHMSDAAEYFCAVS

SEQ ID NO: 86292 - protein, 113 aa, Homo sapiens
  Payload ID: 17207
  Gene Symbol: TRAV8-6
  Gene Name: T cell receptor alpha variable 8-6
  ENSP ID: ENSP00000450505
MLLLLVPAFQVIFTLGGTRAQSVTQLDSQVPVFEEAPVELRCNYSSSVSVYLFWYVQYPNQGLQLLLKYLSGSTLVESINGFEAEFNKSQTSFHLRKPSVHISDTAEYFCAVS

SEQ ID NO: 86293 - protein, 113 aa, Homo sapiens
  Payload ID: 17208
  Gene Symbol: TRAV8-7
  Gene Name: T cell receptor alpha variable 8-7 (non-functional)
  ENSP ID: ENSP00000450448
MLLVVILLLGMFFTLSKTQSVTQLDGHITVSEEAPLELKCNYSYSGVPSLFWYVQYSSQSLQLLLKDLTKATQVKGIRGFEAEFKKSETSFYLRKPSTHVSDAAEYFCAVGDR

SEQ ID NO: 86294 - protein, 112 aa, Homo sapiens
  Payload ID: 17209
  Gene Symbol: TRAV9-1
  Gene Name: T cell receptor alpha variable 9-1
  ENSP ID: ENSP00000438446
MNSSPGPAIALFLMFGGINGDSVVQTEGQVLPSEGDSLIVNCSYETTQYPSLFWYVQYPGEGPQLHLKAMKANDKGRNKGFEAMYRKETTSFHLEKDSVQESDSAVYFCALS

SEQ ID NO: 86295 - protein, 112 aa, Homo sapiens
  Payload ID: 17210
  Gene Symbol: TRAV9-2
  Gene Name: T cell receptor alpha variable 9-2
  ENSP ID: ENSP00000452011
MNYSPGLVSLILLLLGRTRGDSVTQMEGPVTLSEEAFLTINCTYTATGYPSLFWYVQYPGEGLQLLLKATKADDKGSNKGFEATYRKETTSFHLEKGSVQVSDSAVYFCALS

SEQ ID NO: 86296 - protein, 186 aa, Homo sapiens
  Payload ID: 17211
  Gene Symbol: TRAT1
  Gene Name: T cell receptor associated transmembrane adaptor 1
  Uniprot ID: Q6PIZ9
  ENSP ID: ENSP00000295756
MSGISGCPFFLWGLLALLGLALVISLIFNISHYVEKQRQDKMYSYSSDHTRVDEYYIEDTPIYGNLDDMISEPMDENCYEQMKARPEKSVNKMQEATPSAQATNETQMCYASLDHSVKGKRRKPRKQNTHFSDKDGDEQLHAIDASVSKTTLVDSFSPESQAVEENIHDDPIRLFGLIRAKREPIN

SEQ ID NO: 86297 - protein, 149 aa, Homo sapiens
  Payload ID: 17211
  Gene Symbol: TRAT1
  Gene Name: T cell receptor associated transmembrane adaptor 1
  ENSP ID: ENSP00000410097
MSDKMYSYSSDHTRVDEYYIEDTPIYGNLDDMISEPMDENCYEQMKARPEKSVNKMQEATPSAQATNETQMCYASLDHSVKGKRRKPRKQNTHFSDKDGDEQLHAIDASVSKTTLVDSFSPESQAVEENIHDDPIRLFGLIRAKREPIN

SEQ ID NO: 86298 - protein, 309 aa, Homo sapiens
  Payload ID: 17212
  Gene Symbol: TRBC1
  Gene Name: T cell receptor beta constant 1
  ENSP ID: ENSP00000480758
MGIRLLCRVAFCFLAVGLVDVKVTQSSRYLVKRTGEKVFLECVQDMDHENMFWYRQDPGLGLRLIYFSYDVKMKEKGDIPEGYSVSREKKERFSLILESASTNQTSMYLCASSLCTAQHSCILCSGTRLTVVEDLNKVFPPEVAVFEPSEAEISHTQKATLVCLATGFFPDHVELSWWVNGKEVHSGVSTDPQPLKEQPALNDSRYCLSSRLRVSATFWQNPRNHFRCQVQFYGLSENDEWTQDRAKPVTQIVSAEAWGRADCGFTSVSYQQGVLSATILYEILLGKATLYAVLVSALVLMAMVKRKDF

SEQ ID NO: 86299 - protein, 309 aa, Homo sapiens
  Payload ID: 17212
  Gene Symbol: TRBC1
  Gene Name: T cell receptor beta constant 1
  ENSP ID: ENSP00000482915
MGIRLLCRVAFCFLAVGLVDVKVTQSSRYLVKRTGEKVFLECVQDMDHENMFWYRQDPGLGLRLIYFSYDVKMKEKGDIPEGYSVSREKKERFSLILESASTNQTSMYLCASSLCTAQHSRILCSGTRLTVVEDLNKVFPPEVAVFEPSEAEISHTQKATLVCLATGFFPDHVELSWWVNGKEVHSGVSTDPQPLKEQPALNDSRYCLSSRLRVSATFWQNPRNHFRCQVQFYGLSENDEWTQDRAKPVTQIVSAEAWGRADCGFTSVSYQQGVLSATILYEILLGKATLYAVLVSALVLMAMVKRKDF

SEQ ID NO: 86300 - protein, 310 aa, Homo sapiens
  Payload ID: 17212
  Gene Symbol: TRBC1
  Gene Name: T cell receptor beta constant 1
  ENSP ID: ENSP00000483538
MTIRLLCYMGFYFLGAGLMEADIYQTPRYLVIGTGKKITLECSQTMGHDKMYWYQQDPGMELHLIYFSYDVKMKEKGDIPEGYSVSREKKERFSLILESASTNQTSMYLCASSMHSAAASSLHFGNGTRLTVTEDLNKVFPPEVAVFEPSEAEISHTQKATLVCLATGFFPDHVELSWWVNGKEVHSGVSTDPQPLKEQPALNDSRYCLSSRLRVSATFWQNPRNHFRCQVQFYGLSENDEWTQDRAKPVTQIVSAEAWGRADCGFTSVSYQQGVLSATILYEILLGKATLYAVLVSALVLMAMVKRKDF

SEQ ID NO: 86301 - protein, 177 aa, Homo sapiens
  Payload ID: 17212
  Gene Symbol: TRBC1
  Gene Name: T cell receptor beta constant 1
  ENSP ID: ENSP00000487742
  MOD_RES (1)..(1): Any amino acid
XDLNKVFPPEVAVFEPSEAEISHTQKATLVCLATGFFPDHVELSWWVNGKEVHSGVSTDPQPLKEQPALNDSRYCLSSRLRVSATFWQNPRNHFRCQVQFYGLSENDEWTQDRAKPVTQIVSAEAWGRADCGFTSVSYQQGVLSATILYEILLGKATLYAVLVSALVLMAMVKRKDF

SEQ ID NO: 86302 - protein, 177 aa, Homo sapiens; identical to SEQ ID NO: 86301
  Payload ID: 17212
  Gene Symbol: TRBC1
  Gene Name: T cell receptor beta constant 1
  ENSP ID: ENSP00000488819
  MOD_RES (1)..(1): Any amino acid

SEQ ID NO: 86303 - protein, 179 aa, Homo sapiens
  Payload ID: 17213
  Gene Symbol: TRBC2
  Gene Name: T cell receptor beta constant 2
  ENSP ID: ENSP00000417300
  MOD_RES (1)..(1): Any amino acid
XDLKNVFPPKVAVFEPSEAEISHTQKATLVCLATGFYPDHVELSWWVNGKEVHSGVSTDPQPLKEQPALNDSRYCLSSRLRVSATFWQNPRNHFRCQVQFYGLSENDEWTQDRAKPVTQIVSAEAWGRADCGFTSESYQQGVLSATILYEILLGKATLYAVLVSALVLMAMVKRKDSRG

SEQ ID NO: 86304 - protein, 310 aa, Homo sapiens
  Payload ID: 17213
  Gene Symbol: TRBC2
  Gene Name: T cell receptor beta constant 2
  ENSP ID: ENSP00000478607
MGTRLLCWVVLGFLGTDHTGAGVSQSPRYKVAKRGQDVALRCDPISGHVSLFWYQQALGQGPEFLTYFQNEAQLDKSGLPSDRFFAERPEGSVSTLKIQRTQQEDSAVYLCASSIDTDEQYVGPGTRLTVTEDLKNVFPPEVAVFEPSEAEISHTQKATLVCLATGFYPDHVELSWWVNGKEVHSGVSTDPQPLKEQPALNDSRYCLSSRLRVSATFWQNPRNHFRCQVQFYGLSENDEWTQDRAKPVTQIVSAEAWGRADCGFTSESYQQGVLSATILYEILLGKATLYAVLVSALVLMAMVKRKDSRG

SEQ ID NO: 86305 - protein, 311 aa, Homo sapiens
  Payload ID: 17213
  Gene Symbol: TRBC2
  Gene Name: T cell receptor beta constant 2
  ENSP ID: ENSP00000478854
MGPQLLGYVVLCLLGAGPLEAQVTQNPRYLITVTGKKLTVTCSQNMNHEYMSWYRQDPGLGLRQIYYSMNVEVTDKGDVPEGYKVSRKEKRNFPLILESPSPNQTSLYFCASSLSTVLHSQYFGPGTRLLVLEDLKNVFPPEVAVFEPSEAEISHTQKATLVCLATGFYPDHVELSWWVNGKEVHSGVSTDPQPLKEQPALNDSRYCLSSRLRVSATFWQNPRNHFRCQVQFYGLSENDEWTQDRAKPVTQIVSAEAWGRADCGFTSESYQQGVLSATILYEILLGKATLYAVLVSALVLMAMVKRKDSRG

SEQ ID NO: 86306 - protein, 179 aa, Homo sapiens
  Payload ID: 17213
  Gene Symbol: TRBC2
  Gene Name: T cell receptor beta constant 2
  ENSP ID: ENSP00000478873
  MOD_RES (1)..(1): Any amino acid
XDLKNVFPPEVAVFEPSEAEISHTQKATLVCLATGFYPDHVELSWWVNGKEVHSGVSTDPQPLKEQPALNDSRYCLSSRLRVSATFWQNPRNHFRCQVQFYGLSENDEWTQDRAKPVTQIVSAEAWGRADCGFTSESYQQGVLSATILYEILLGKATLYAVLVSALVLMAMVKRKDSRG

SEQ ID NO: 86307 - protein, 314 aa, Homo sapiens
  Payload ID: 17213
  Gene Symbol: TRBC2
  Gene Name: T cell receptor beta constant 2
  ENSP ID: ENSP00000479209
MTIRLLCYMGFYFLGAGLMEADIYQTPRYLVIGTGKKITLECSQTMGHDKMYWYQQDPGMELHLIHYSYGVNSTEKGDLSSESTVSRIRTEHFPLTLESARPSHTSQYLCASSEWLGGRDQETQYFGPGTRLLVLEDLKNVFPPEVAVFEPSEAEISHTQKATLVCLATGFYPDHVELSWWVNGKEVHSGVSTDPQPLKEQPALNDSRYCLSSRLRVSATFWQNPRNHFRCQVQFYGLSENDEWTQDRAKPVTQIVSAEAWGRADCGFTSESYQQGVLSATILYEILLGKATLYAVLVSALVLMAMVKRKDSRG

SEQ ID NO: 86308 - protein, 315 aa, Homo sapiens
  Payload ID: 17213
  Gene Symbol: TRBC2
  Gene Name: T cell receptor beta constant 2
  ENSP ID: ENSP00000481359
MTIRLLCYMGFYFLGAGLMEADIYQTPRYLVIGTGKKITLECSQTMGHDKMYWYQQDPGMELHLIHYSYGVNSTEKGDLSSESTVSRIRTEHFPLTLESARPSHTSQYLCASSEAQYRSPSYNEQFFGPGTRLTVLEDLKNVFPPEVAVFEPSEAEISHTQKATLVCLATGFYPDHVELSWWVNGKEVHSGVSTDPQPLKEQPALNDSRYCLSSRLRVSATFWQNPRNHFRCQVQFYGLSENDEWTQDRAKPVTQIVSAEAWGRADCGFTSESYQQGVLSATILYEILLGKATLYAVLVSALVLMAMVKRKDSRG

SEQ ID NO: 86309 - protein, 313 aa, Homo sapiens
  Payload ID: 17213
  Gene Symbol: TRBC2
  Gene Name: T cell receptor beta constant 2
  ENSP ID: ENSP00000482687
MTIRLLCYMGFYFLGAGLMEADIYQTPRYLVIGTGKKITLECSQTMGHDKMYWYQQDPGMELHLIHYSYGVNSTEKGDLSSESTVSRIRTEHFPLTLESARPSHTSQYLCASSSPLCSGANVLTFGAGSRLTVLEDLKNVFPPEVAVFEPSEAEISHTQKATLVCLATGFYPDHVELSWWVNGKEVHSGVSTDPQPLKEQPALNDSRYCLSSRLRVSATFWQNPRNHFRCQVQFYGLSENDEWTQDRAKPVTQIVSAEAWGRADCGFTSESYQQGVLSATILYEILLGKATLYAVLVSALVLMAMVKRKDSRG

SEQ ID NO: 86310 - protein, 4 aa, Homo sapiens
  Payload ID: 17214
  Gene Symbol: TRBD1
  Gene Name: T cell receptor beta diversity 1
  ENSP ID: ENSP00000487941
GTGG

SEQ ID NO: 86311 - protein, 4 aa, Homo sapiens
  Payload ID: 17214
  Gene Symbol: TRBD1
  Gene Name: T cell receptor beta diversity 1
  ENSP ID: ENSP00000488240
GTGG

SEQ ID NO: 86312 - protein, 16 aa, Homo sapiens
  Payload ID: 17215
  Gene Symbol: TRBJ1-1
  Gene Name: T cell receptor beta joining 1-1
  ENSP ID: ENSP00000488318
  MOD_RES (1)..(1): Any amino acid
XNTEAFFGQGTRLTVV

SEQ ID NO: 86313 - protein, 16 aa, Homo sapiens
  Payload ID: 17215
  Gene Symbol: TRBJ1-1
  Gene Name: T cell receptor beta joining 1-1
  ENSP ID: ENSP00000488686
  MOD_RES (1)..(1): Any amino acid
XNTEAFFGQGTRLTVV

SEQ ID NO: 86314 - protein, 16 aa, Homo sapiens
  Payload ID: 17216
  Gene Symbol: TRBJ1-2
  Gene Name: T cell receptor beta joining 1-2
  ENSP ID: ENSP00000488193
  MOD_RES (1)..(1): Any amino acid
XNYGYTFGSGTRLTVV

SEQ ID NO: 86315 - protein, 16 aa, Homo sapiens
  Payload ID: 17216
  Gene Symbol: TRBJ1-2
  Gene Name: T cell receptor beta joining 1-2
  ENSP ID: ENSP00000488356
  MOD_RES (1)..(1): Any amino acid
XNYGYTFGSGTRLTVV

SEQ ID NO: 86316 - protein, 17 aa, Homo sapiens
  Payload ID: 17217
  Gene Symbol: TRBJ1-3
  Gene Name: T cell receptor beta joining 1-3
  ENSP ID: ENSP00000488060
  MOD_RES (1)..(1): Any amino acid
XSGNTIYFGEGSWLTVV

SEQ ID NO: 86317 - protein, 17 aa, Homo sapiens
  Payload ID: 17217
  Gene Symbol: TRBJ1-3
  Gene Name: T cell receptor beta joining 1-3
  ENSP ID: ENSP00000488093
  MOD_RES (1)..(1): Any amino acid
XSGNTIYFGEGSWLTVV

SEQ ID NO: 86318 - protein, 17 aa, Homo sapiens
  Payload ID: 17218
  Gene Symbol: TRBJ1-4
  Gene Name: T cell receptor beta joining 1-4
  ENSP ID: ENSP00000488040
  MOD_RES (1)..(1): Any amino acid
XTNEKLFFGSGTQLSVL

SEQ ID NO: 86319 - protein, 17 aa, Homo sapiens
  Payload ID: 17218
  Gene Symbol: TRBJ1-4
  Gene Name: T cell receptor beta joining 1-4
  ENSP ID: ENSP00000488394
  MOD_RES (1)..(1): Any amino acid
XTNEKLFFGSGTQLSVL

SEQ ID NO: 86320 - protein, 17 aa, Homo sapiens
  Payload ID: 17219
  Gene Symbol: TRBJ1-5
  Gene Name: T cell receptor beta joining 1-5
  ENSP ID: ENSP00000487943
  MOD_RES (1)..(1): Any amino acid
XSNQPQHFGDGTRLSIL

SEQ ID NO: 86321 - protein, 17 aa, Homo sapiens
  Payload ID: 17219
  Gene Symbol: TRBJ1-5
  Gene Name: T cell receptor beta joining 1-5
  ENSP ID: ENSP00000488469
  MOD_RES (1)..(1): Any amino acid
XSNQPQHFGDGTRLSIL

SEQ ID NO: 86322 - protein, 18 aa, Homo sapiens
  Payload ID: 17220
  Gene Symbol: TRBJ1-6
  Gene Name: T cell receptor beta joining 1-6
  ENSP ID: ENSP00000488155
  MOD_RES (1)..(1): Any amino acid
XSYNSPLHFGNGTRLTVT

SEQ ID NO: 86323 - protein, 18 aa, Homo sapiens
  Payload ID: 17220
  Gene Symbol: TRBJ1-6
  Gene Name: T cell receptor beta joining 1-6
  ENSP ID: ENSP00000488283
  MOD_RES (1)..(1): Any amino acid
XSYNSPLHFGNGTRLTVT

SEQ ID NO: 86324 - protein, 17 aa, Homo sapiens
  Payload ID: 17221
  Gene Symbol: TRBJ2-1
  Gene Name: T cell receptor beta joining 2-1
  ENSP ID: ENSP00000420669
  MOD_RES (1)..(1): Any amino acid
XSYNEQFFGPGTRLTVL

SEQ ID NO: 86325 - protein, 17 aa, Homo sapiens
  Payload ID: 17221
  Gene Symbol: TRBJ2-1
  Gene Name: T cell receptor beta joining 2-1
  ENSP ID: ENSP00000488460
  MOD_RES (1)..(1): Any amino acid
XSYNEQFFGPGTRLTVL

SEQ ID NO: 86326 - protein, 17 aa, Homo sapiens
  Payload ID: 17222
  Gene Symbol: TRBJ2-2
  Gene Name: T cell receptor beta joining 2-2
  ENSP ID: ENSP00000419331
  MOD_RES (1)..(1): Any amino acid
XNTGELFFGEGSRLTVL

SEQ ID NO: 86327 - protein, 17 aa, Homo sapiens
  Payload ID: 17222
  Gene Symbol: TRBJ2-2
  Gene Name: T cell receptor beta joining 2-2
  ENSP ID: ENSP00000488401
  MOD_RES (1)..(1): Any amino acid
XNTGELFFGEGSRLTVL

SEQ ID NO: 86328 - protein, 15 aa, Homo sapiens
  Payload ID: 17223
  Gene Symbol: TRBJ2-2P
  Gene Name: T cell receptor beta joining 2-2P (non-functional)
  ENSP ID: ENSP00000420142
LRGAAGRLGGGLLVL

SEQ ID NO: 86329 - protein, 15 aa, Homo sapiens
  Payload ID: 17223
  Gene Symbol: TRBJ2-2P
  Gene Name: T cell receptor beta joining 2-2P (non-functional)
  ENSP ID: ENSP00000487962
LRGAAGRLGGGLLVL

SEQ ID NO: 86330 - protein, 16 aa, Homo sapiens
  Payload ID: 17224
  Gene Symbol: TRBJ2-3
  Gene Name: T cell receptor beta joining 2-3
  ENSP ID: ENSP00000419595
STDTQYFGPGTRLTVL

SEQ ID NO: 86331 - protein, 16 aa, Homo sapiens
  Payload ID: 17224
  Gene Symbol: TRBJ2-3
  Gene Name: T cell receptor beta joining 2-3
  ENSP ID: ENSP00000488292
STDTQYFGPGTRLTVL

SEQ ID NO: 86332 - protein, 17 aa, Homo sapiens
  Payload ID: 17225
  Gene Symbol: TRBJ2-4
  Gene Name: T cell receptor beta joining 2-4
  ENSP ID: ENSP00000418890
  MOD_RES (1)..(1): Any amino acid
XAKNIQYFGAGTRLSVL

SEQ ID NO: 86333 - protein, 17 aa, Homo sapiens
  Payload ID: 17225
  Gene Symbol: TRBJ2-4
  Gene Name: T cell receptor beta joining 2-4
  ENSP ID: ENSP00000488489
  MOD_RES (1)..(1): Any amino acid
XAKNIQYFGAGTRLSVL

SEQ ID NO: 86334 - protein, 16 aa, Homo sapiens
  Payload ID: 17226
  Gene Symbol: TRBJ2-5
  Gene Name: T cell receptor beta joining 2-5
  ENSP ID: ENSP00000420233
  MOD_RES (1)..(1): Any amino acid
XQETQYFGPGTRLLVL

SEQ ID NO: 86335 - protein, 16 aa, Homo sapiens
  Payload ID: 17226
  Gene Symbol: TRBJ2-5
  Gene Name: T cell receptor beta joining 2-5
  ENSP ID: ENSP00000487747
  MOD_RES (1)..(1): Any amino acid
XQETQYFGPGTRLLVL

SEQ ID NO: 86336 - protein, 18 aa, Homo sapiens
  Payload ID: 17227
  Gene Symbol: TRBJ2-6
  Gene Name: T cell receptor beta joining 2-6
  ENSP ID: ENSP00000417114
  MOD_RES (1)..(1): Any amino acid
XSGANVLTFGAGSRLTVL

SEQ ID NO: 86337 - protein, 18 aa, Homo sapiens
  Payload ID: 17227
  Gene Symbol: TRBJ2-6
  Gene Name: T cell receptor beta joining 2-6
  ENSP ID: ENSP00000488363
  MOD_RES (1)..(1): Any amino acid
XSGANVLTFGAGSRLTVL

SEQ ID NO: 86338 - protein, 16 aa, Homo sapiens
  Payload ID: 17228
  Gene Symbol: TRBJ2-7
  Gene Name: T cell receptor beta joining 2-7
  ENSP ID: ENSP00000417622
  MOD_RES (1)..(1): Any amino acid
XSYEQYFGPGTRLTVT

SEQ ID NO: 86339 - protein, 16 aa, Homo sapiens
  Payload ID: 17228
  Gene Symbol: TRBJ2-7
  Gene Name: T cell receptor beta joining 2-7
  ENSP ID: ENSP00000488028
  MOD_RES (1)..(1): Any amino acid
XSYEQYVGPGTRLTVT

SEQ ID NO: 86340 - protein, 114 aa, Homo sapiens
  Payload ID: 17229
  Gene Symbol: TRBV10-1
  Gene Name: T cell receptor beta variable 10-1(gene/pseudogene)
  ENSP ID: ENSP00000374887
MGTRLFFYVALCLLWAGHRDAEITQSPRHKITETGRQVTLACHQTWNHNNMFWYRQDLGHGLRLIHYSYGVHDTNKGEVSDGYSVSRSNTEDLPLTLESAASSQTSVYFCASSE

SEQ ID NO: 86341 - protein, 114 aa, Homo sapiens; identical to SEQ ID NO: 86340
  Payload ID: 17229
  Gene Symbol: TRBV10-1
  Gene Name: T cell receptor beta variable 10-1(gene/pseudogene)
  ENSP ID: ENSP00000488035

SEQ ID NO: 86342 - protein, 114 aa, Homo sapiens
  Payload ID: 17230
  Gene Symbol: TRBV10-2
  Gene Name: T cell receptor beta variable 10-2
  ENSP ID: ENSP00000404652
MGTRLFFYVALCLLWAGHRDAGITQSPRYKITETGRQVTLMCHQTWSHSYMFWYRQDLGHGLRLIYYSAAADITDKGEVPDGYVVSRSKTENFPLTLESATRSQTSVYFCASSE

SEQ ID NO: 86343 - protein, 114 aa, Homo sapiens; identical to SEQ ID NO: 86342
  Payload ID: 17230
  Gene Symbol: TRBV10-2
  Gene Name: T cell receptor beta variable 10-2
  ENSP ID: ENSP00000488043

SEQ ID NO: 86344 - protein, 114 aa, Homo sapiens
  Payload ID: 17231
  Gene Symbol: TRBV10-3
  Gene Name: T cell receptor beta variable 10-3
  ENSP ID: ENSP00000479267
MGTRLFFYVALCLLWTGHMDAGITQSPRHKVTETGTPVTLRCHQTENHRYMYWYRQDPGHGLRLIHYSYGVKDTDKGEVSDGYSVSRSKTEDFLLTLESATSSQTSVYFCAISE

SEQ ID NO: 86345 - protein, 114 aa, Homo sapiens; identical to SEQ ID NO: 86344
  Payload ID: 17231
  Gene Symbol: TRBV10-3
  Gene Name: T cell receptor beta variable 10-3
  ENSP ID: ENSP00000487891

SEQ ID NO: 86346 - protein, 115 aa, Homo sapiens
  Payload ID: 17232
  Gene Symbol: TRBV11-1
  Gene Name: T cell receptor beta variable 11-1
  ENSP ID: ENSP00000374890
MSTRLLCWMALCLLGAELSEAEVAQSPRYKITEKSQAVAFWCDPISGHATLYWYRQILGQGPELLVQFQDESVVDDSQLPKDRFSAERLKGVDSTLKIQPAELGDSAMYLCASSL

SEQ ID NO: 86347 - protein, 115 aa, Homo sapiens; identical to SEQ ID NO: 86346
  Payload ID: 17232
  Gene Symbol: TRBV11-1
  Gene Name: T cell receptor beta variable 11-1
  ENSP ID: ENSP00000488521

SEQ ID NO: 86348 - protein, 115 aa, Homo sapiens
  Payload ID: 17233
  Gene Symbol: TRBV11-3
  Gene Name: T cell receptor beta variable 11-3
  ENSP ID: ENSP00000480080
MGTRLLCWVAFCLLVEELIEAGVVQSPRYKIIEKKQPVAFWCNPISGHNTLYWYLQNLGQGPELLIRYENEEAVDDSQLPKDRFSAERLKGVDSTLKIQPAELGDSAVYLCASSL

SEQ ID NO: 86349 - protein, 115 aa, Homo sapiens; identical to SEQ ID NO: 86348
  Payload ID: 17233
  Gene Symbol: TRBV11-3
  Gene Name: T cell receptor beta variable 11-3
  ENSP ID: ENSP00000487749

SEQ ID NO: 86350 - protein, 115 aa, Homo sapiens
  Payload ID: 17234
  Gene Symbol: TRBV12-3
  Gene Name: T cell receptor beta variable 12-3
  ENSP ID: ENSP00000477916
MDSWTFCCVSLCILVAKHTDAGVIQSPRHEVTEMGQEVTLRCKPISGHNSLFWYRQTMMRGLELLIYFNNNVPIDDSGMPEDRFSAKMPNASFSTLKIQPSEPRDSAVYFCASSL

SEQ ID NO: 86351 - protein, 115 aa, Homo sapiens; identical to SEQ ID NO: 86350
  Payload ID: 17234
  Gene Symbol: TRBV12-3
  Gene Name: T cell receptor beta variable 12-3
  ENSP ID: ENSP00000487964

SEQ ID NO: 86352 - protein, 115 aa, Homo sapiens
  Payload ID: 17235
  Gene Symbol: TRBV12-4
  Gene Name: T cell receptor beta variable 12-4
  ENSP ID: ENSP00000480999
MGSWTLCCVSLCILVAKHTDAGVIQSPRHEVTEMGQEVTLRCKPISGHDYLFWYRQTMMRGLELLIYFNNNVPIDDSGMPEDRFSAKMPNASFSTLKIQPSEPRDSAVYFCASSL

SEQ ID NO: 86353 - protein, 115 aa, Homo sapiens
  Payload ID: 17235
  Gene Symbol: TRBV12-4
  Gene Name: T cell receptor beta variable 12-4
  ENSP ID: ENSP00000488855
MDSWTLCCVSLCILVAKHTDAGVIQSPRHEVTEMGQEVTLRCKPISGHDYLFWYRQTMMRGLELLIYFNNNVPIDDSGMPEDRFSAKMPNASFSTLKIQPSEPRDSAVYFCASSL

SEQ ID NO: 86354 - protein, 115 aa, Homo sapiens
  Payload ID: 17236
  Gene Symbol: TRBV12-5
  Gene Name: T cell receptor beta variable 12-5
  ENSP ID: ENSP00000479506
MATRLLCCVVLCLLGEELIDARVTQTPRHKVTEMGQEVTMRCQPILGHNTVFWYRQTMMQGLELLAYFRNRAPLDDSGMPKDRFSAEMPDATLATLKIQPSEPRDSAVYFCASGL

SEQ ID NO: 86355 - protein, 115 aa, Homo sapiens
  Payload ID: 17236
  Gene Symbol: TRBV12-5
  Gene Name: T cell receptor beta variable 12-5
  ENSP ID: ENSP00000488633
MATRLLCCVVLCLLGEELIDARVTQTPRDKVTEMGQEVTMRCQPILGHNTVFWYRQTMMQGLELLAYFRNRAPLDDSGMPKDRFSAEMPDATLATLKIQPSEPRDSAVYFCASGL

SEQ ID NO: 86356 - protein, 124 aa, Homo sapiens
  Payload ID: 17237
  Gene Symbol: TRBV13
  Gene Name: T cell receptor beta variable 13
  ENSP ID: ENSP00000477580
MLSPDLPDSAWNTRLLCRVMLCLLGAGSVAAGVIQSPRHLIKEKRETATLKCYPIPRHDTVYWYQQGPGQDPQFLISFYEKMQSDKGSIPDRFSAQQFSDYHSELNMSSLELGDSALYFCASSL

SEQ ID NO: 86357 - protein, 124 aa, Homo sapiens; identical to SEQ ID NO: 86356
  Payload ID: 17237
  Gene Symbol: TRBV13
  Gene Name: T cell receptor beta variable 13
  ENSP ID: ENSP00000488778

SEQ ID NO: 86358 - protein, 115 aa, Homo sapiens
  Payload ID: 17238
  Gene Symbol: TRBV14
  Gene Name: T cell receptor beta variable 14
  ENSP ID: ENSP00000477671
MVSRLLSLVSLCLLGAKHIEAGVTQFPSHSVIEKGQTVTLRCDPISGHDNLYWYRRVMGKEIKFLLHFVKESKQDESGMPNNRFLAERTGGTYSTLKVQPAELEDSGVYFCASSQ

SEQ ID NO: 86359 - protein, 115 aa, Homo sapiens; identical to SEQ ID NO: 86358
  Payload ID: 17238
  Gene Symbol: TRBV14
  Gene Name: T cell receptor beta variable 14
  ENSP ID: ENSP00000488641

SEQ ID NO: 86360 - protein, 114 aa, Homo sapiens
  Payload ID: 17239
  Gene Symbol: TRBV15
  Gene Name: T cell receptor beta variable 15
  ENSP ID: ENSP00000482333
MGPGLLHWMALCLLGTGHGDAMVIQNPRYQVTQFGKPVTLSCSQTLNHNVMYWYQQKSSQAPKLLFHYYDKDFNNEADTPDNFQSRRPNTSFCFLDIRSPGLGDAAMYLCATSR

SEQ ID NO: 86361 - protein, 114 aa, Homo sapiens; identical to SEQ ID NO: 86360
  Payload ID: 17239
  Gene Symbol: TRBV15
  Gene Name: T cell receptor beta variable 15
  ENSP ID: ENSP00000488551

SEQ ID NO: 86362 - protein, 115 aa, Homo sapiens
  Payload ID: 17240
  Gene Symbol: TRBV16
  Gene Name: T cell receptor beta variable 16 (gene/pseudogene)
  ENSP ID: ENSP00000479210
MSPIFTCITILCLLAAGSPGEEVAQTPKHLVRGEGQKAKLYCAPIKGHSYVFWYQQVLKNEFKFLISFQNENVFDETGMPKERFSAKCLPNSPCSLEIQATKLEDSAVYFCASSQ

SEQ ID NO: 86363 - protein, 115 aa, Homo sapiens; identical to SEQ ID NO: 86362
  Payload ID: 17240
  Gene Symbol: TRBV16
  Gene Name: T cell receptor beta variable 16 (gene/pseudogene)
  ENSP ID: ENSP00000487913

SEQ ID NO: 86364 - protein, 114 aa, Homo sapiens
  Payload ID: 17241
  Gene Symbol: TRBV17
  Gene Name: T cell receptor beta variable 17 (non-functional)
  ENSP ID: ENSP00000483468
MDIWLLCWVTLCLLAAGHSEPGVSQTPRHKVTNMGQEVILRCDPSSGHMFVHWYRQNLRQEMKLLISFQYQNIAVDSGMPKERFTAERPNGTSSTLKIHPAEPRDSAVYLYSSG

SEQ ID NO: 86365 - protein, 114 aa, Homo sapiens; identical to SEQ ID NO: 86364
  Payload ID: 17241
  Gene Symbol: TRBV17
  Gene Name: T cell receptor beta variable 17 (non-functional)
  ENSP ID: ENSP00000488775

SEQ ID NO: 86366 - protein, 115 aa, Homo sapiens
  Payload ID: 17242
  Gene Symbol: TRBV18
  Gene Name: T cell receptor beta variable 18
  ENSP ID: ENSP00000483504
MDTRLLCCAVICLLGAGLSNAGVMQNPRHLVRRRGQEARLRCSPMKGHSHVYWYRQLPEEGLKFMVYLQKENIIDESGMPKERFSAEFPKEGPSILRIQQVVRGDSAAYFCASSP

SEQ ID NO: 86367 - protein, 115 aa, Homo sapiens
  Payload ID: 17242
  Gene Symbol: TRBV18
  Gene Name: T cell receptor beta variable 18
  ENSP ID: ENSP00000488621
MDTRVLCCAVICLLGAGLSNAGVMQNPRHLVRRRGQEARLRCSPMKGHSHVYWYRQLPEEGLKFMVYLQKENIIDESGMPKERFSAEFPKEGPSILRIQQVVRGDSAAYFCASSP

SEQ ID NO: 86368 - protein, 114 aa, Homo sapiens
  Payload ID: 17243
  Gene Symbol: TRBV19
  Gene Name: T cell receptor beta variable 19
  ENSP ID: ENSP00000374916
MSNQVLCCVVLCLLGANTVDGGITQSPKYLFRKEGQNVTLSCEQNLNHDAMYWYRQDPGQGLRLIYYSQIVNDFQKGDIAEGYSVSREKKESFPLTVTSAQKNPTAFYLCASSI

SEQ ID NO: 86369 - protein, 114 aa, Homo sapiens
  Payload ID: 17243
  Gene Symbol: TRBV19
  Gene Name: T cell receptor beta variable 19
  ENSP ID: ENSP00000487807
MSNQVLCCVVLCFLGANTVDGGITQSPKYLFRKEGQNVTLSCEQNLNHDAMYWYRQDPGQGLRLIYYSQIVNDFQKGDIAEGYSVSREKKESFPLTVTSAQKNPTAFYLCASSI

SEQ ID NO: 86370 - protein, 115 aa, Homo sapiens
  Payload ID: 17244
  Gene Symbol: TRBV2
  Gene Name: T cell receptor beta variable 2
  ENSP ID: ENSP00000388523
MDTWLVCWAIFSLLKAGLTEPEVTQTPSHQVTQMGQEVILRCVPISNHLYFYWYRQILGQKVEFLVSFYNNEISEKSEIFDDQFSVERPDGSNFTLKIRSTKLEDSAMYFCASSE

SEQ ID NO: 86371 - protein, 115 aa, Homo sapiens
  Payload ID: 17244
  Gene Symbol: TRBV2
  Gene Name: T cell receptor beta variable 2
  ENSP ID: ENSP00000487939
MDTWLVCWAIFSLLKAGLTEPEVTQTPSHQVTQMGQEVILHCVPISNHLYFYWYRQILGQKVEFLVSFYNNEISEKSEIFDDQFSVERPDGSNFTLKIRSTKLEDSAMYFCASSE

SEQ ID NO: 86372 - protein, 130 aa, Homo sapiens
  Payload ID: 17245
  Gene Symbol: TRBV20OR9-2
  Gene Name: T cell receptor beta variable 20/OR9-2 (non-functional)
  ENSP ID: ENSP00000368747
METVVTTLPREGGVGPSRKMLLLLLLLGPGSGLSAVVSQHPSRVICKSGTSVNIECRSLDFQATTMFWYRQLRKQSLMLMATSNEGSEVTYEQGVKKDKFPINHPNLTFSALTVTSAHPEDSSFYICSAR

SEQ ID NO: 86373 - protein, 111 aa, Homo sapiens
  Payload ID: 17246
  Gene Symbol: TRBV20-1
  Gene Name: T cell receptor beta variable 20-1
  ENSP ID: ENSP00000374917
MLLLLLLLGPGSGLGAVVSQHPSRVICKSGTSVKIECRSLDFQATTMFWYRQFPKQSLMLMATSNEGSKATYEQGVEKDKFLINHASLTLSTLTVTSAHPEDSSFYICSAR

SEQ ID NO: 86374 - protein, 111 aa, Homo sapiens
  Payload ID: 17246
  Gene Symbol: TRBV20-1
  Gene Name: T cell receptor beta variable 20-1
  ENSP ID: ENSP00000488099
MLLLLLLLGPGSGLGAVVSQHPSWVICKSGTSVKIECRSLDFQATTMFWYRQFPKQSLMLMATSNEGSKATYEQGVEKDKFLINHASLTLSTLTVTSAHPEDSSFYICSAR

SEQ ID NO: 86375 - protein, 123 aa, Homo sapiens
  Payload ID: 17247
  Gene Symbol: TRBV21OR9-2
  Gene Name: T cell receptor beta variable 21/OR9-2 (pseudogene)
  ENSP ID: ENSP00000333603
  MOD_RES (1)..(1): Any amino acid
XRFLSEPTRCLRLLCCVALSFWGAASMDTKVTQRPRFLVKANEQKAKMDCVPIKRHSYVYWYHKTLEEELKFFIYFQNEEIIQKAEIINERFSAQCPQNSPCTLEIQSTESGDTARYFCANSK

SEQ ID NO: 86376 - protein, 112 aa, Homo sapiens
  Payload ID: 17248
  Gene Symbol: TRBV23OR9-2
  Gene Name: T cell receptor beta variable 23/OR9-2 (non-functional)
  ENSP ID: ENSP00000374912
  MOD_RES (1)..(1): Any amino acid
XTGTRLLGWVALCLLAAGCFHAKVTQTPGYLVKGKGRKTKMYCTPKNGHTFVCWYQQNQNKEFMFLISFQNEQVLQEMEMHKKRFSSQCPKNPPCSLAILSSEPGDTALYLC

SEQ ID NO: 86377 - protein, 115 aa, Homo sapiens
  Payload ID: 17249
  Gene Symbol: TRBV23-1
  Gene Name: T cell receptor beta variable 23-1 (non-functional)
  ENSP ID: ENSP00000374919
MGTRLLGCAALCLLAADSFHAKVTQTPGHLVKGKGQKTKMDCTPEKGHTFVYWYQQNQNKEFMLLISFQNEQVLQETEMHKKRFSSQCPKNAPCSLAILSSEPGDTALYLCASSQ

SEQ ID NO: 86378 - protein, 115 aa, Homo sapiens; identical to SEQ ID NO: 86377
  Payload ID: 17249
  Gene Symbol: TRBV23-1
  Gene Name: T cell receptor beta variable 23-1 (non-functional)
  ENSP ID: ENSP00000487718

SEQ ID NO: 86379 - protein, 115 aa, Homo sapiens
  Payload ID: 17250
  Gene Symbol: TRBV24-1
  Gene Name: T cell receptor beta variable 24-1
  ENSP ID: ENSP00000374920
MASLLFFCGAFYLLGTGSMDADVTQTPRNRITKTGKRIMLECSQTKGHDRMYWYRQDPGLGLQLIYYSFDVKDINKGEISDGYSVSRQAQAKFSLSLESAIPNQTALYFCATSDL

SEQ ID NO: 86380 - protein, 115 aa, Homo sapiens
  Payload ID: 17250
  Gene Symbol: TRBV24-1
  Gene Name: T cell receptor beta variable 24-1
  ENSP ID: ENSP00000488057
MASLLFFCGAFYLLGTGSMDADVTQTPRNRITKTGKRIMLECSQTKGHDRMYWYRQDPGLGLRLIYYSFDVKDINKGEISDGYSVSRQAQAKFSLSLESAIPNQTALYFCATSDL

SEQ ID NO: 86381 - protein, 114 aa, Homo sapiens
  Payload ID: 17251
  Gene Symbol: TRBV25-1
  Gene Name: T cell receptor beta variable 25-1
  ENSP ID: ENSP00000374921
MTIRLLCYVGFYFLGAGLMEADIYQTPRYLVIGTGKKITLECSQTMGHDKMYWYQQDPGMELHLIHYSYGVNSTEKGDLSSESTVSRIRTEHFPLTLESARPSHTSQYLCASSE

SEQ ID NO: 86382 - protein, 114 aa, Homo sapiens
  Payload ID: 17251
  Gene Symbol: TRBV25-1
  Gene Name: T cell receptor beta variable 25-1
  ENSP ID: ENSP00000479511
MTIRLLCYMGFYFLGAGLMEADIYQTPRYLVIGTGKKITLECSQTMGHDKMYWYQQDPGMELHLIHYSYGVNSTEKGDLSSESTVSRIRTEHFPLTLESARPSHTSQYLCASSE

SEQ ID NO: 86383 - protein, 114 aa, Homo sapiens
  Payload ID: 17252
  Gene Symbol: TRBV27
  Gene Name: T cell receptor beta variable 27
  ENSP ID: ENSP00000374922
MGPQLLGYVVLCLLGAGPLEAQVTQNPRYLITVTGKKLTVTCSQNMNHEYMSWYRQDPGLGLRQIYYSMNVEVTDKGDVPEGYKVSRKEKRNFPLILESPSPNQTSLYFCASSL

SEQ ID NO: 86384 - protein, 114 aa, Homo sapiens; identical to SEQ ID NO: 86383
  Payload ID: 17252
  Gene Symbol: TRBV27
  Gene Name: T cell receptor beta variable 27
  ENSP ID: ENSP00000488274

SEQ ID NO: 86385 - protein, 114 aa, Homo sapiens
  Payload ID: 17253
  Gene Symbol: TRBV28
  Gene Name: T cell receptor beta variable 28
  ENSP ID: ENSP00000374923
MGIRLLCRVAFCFLAVGLVDVKVTQSSRYLVKRTGEKVFLECVQDMDHENMFWYRQDPGLGLRLIYFSYDVKMKEKGDIPEGYSVSREKKERFSLILESASTNQTSMYLCASSL

SEQ ID NO: 86386 - protein, 114 aa, Homo sapiens; identical to SEQ ID NO: 86385
  Payload ID: 17253
  Gene Symbol: TRBV28
  Gene Name: T cell receptor beta variable 28
  ENSP ID: ENSP00000480928

SEQ ID NO: 86387 - protein, 111 aa, Homo sapiens
  Payload ID: 17254
  Gene Symbol: TRBV29-1
  Gene Name: T cell receptor beta variable 29-1
  ENSP ID: ENSP00000395459
MLSLLLLLLGLGSVFSAVISQKPSRDICQRGTSLTIQCQVDSQVTMMFWYRQQPGQSLTLIATANQGSEATYESGFVIDKFPISRPNLTFSTLTVSNMSPEDSSIYLCSVE

SEQ ID NO: 86388 - protein, 111 aa, Homo sapiens; identical to SEQ ID NO: 86387
  Payload ID: 17254
  Gene Symbol: TRBV29-1
  Gene Name: T cell receptor beta variable 29-1
  ENSP ID: ENSP00000488861

SEQ ID NO: 86389 - protein, 111 aa, Homo sapiens
  Payload ID: 17255
  Gene Symbol: TRBV30
  Gene Name: T cell receptor beta variable 30 (gene/pseudogene)
  ENSP ID: ENSP00000397118
MLCSLLALLLGTFFGVRSQTIHQWPATLVQPVGSPLSLECTVEGTSNPNLYWYRQAAGRGLQLLFYSVGIGQISSEVPQNLSASRPQDRQFILSSKKLLLSDSGFYLCAWS

SEQ ID NO: 86390 - protein, 111 aa, Homo sapiens; identical to SEQ ID NO: 86389
  Payload ID: 17255
  Gene Symbol: TRBV30
  Gene Name: T cell receptor beta variable 30 (gene/pseudogene)
  ENSP ID: ENSP00000487814

SEQ ID NO: 86391 - protein, 114 aa, Homo sapiens
  Payload ID: 17256
  Gene Symbol: TRBV3-1
  Gene Name: T cell receptor beta variable 3-1
  ENSP ID: ENSP00000374910
MGCRLLCCVVFCLLQAGPLDTAVSQTPKYLVTQMGNDKSIKCEQNLGHDTMYWYKQDSKKFLKIMFSYNNKELIINETVPNRFSPKSPDKAHLNLHINSLELGDSAVYFCASSQ

SEQ ID NO: 86392 - protein, 114 aa, Homo sapiens; identical to SEQ ID NO: 86391
  Payload ID: 17256
  Gene Symbol: TRBV3-1
  Gene Name: T cell receptor beta variable 3-1
  ENSP ID: ENSP00000488814

SEQ ID NO: 86393 - protein, 114 aa, Homo sapiens
  Payload ID: 17257
  Gene Symbol: TRBV4-1
  Gene Name: T cell receptor beta variable 4-1
  ENSP ID: ENSP00000374880
MGCRLLCCAVLCLLGAVPIDTEVTQTPKHLVMGMTNKKSLKCEQHMGHRAMYWYKQKAKKPPELMFVYSYEKLSINESVPSRFSPECPNSSLLNLHLHALQPEDSALYLCASSQ

SEQ ID NO: 86394 - protein, 114 aa, Homo sapiens
  Payload ID: 17257
  Gene Symbol: TRBV4-1
  Gene Name: T cell receptor beta variable 4-1
  ENSP ID: ENSP00000488131
MGCRLLCCAVLCLLGAVPIDTEVTQTPKHLVMGMTNKKSLKCEQHMGHRAMYWYKQKAKKPPELMFVYSYEKLSINESVRSRFSPECPNSSLLNLHLHALQPEDSALYLCASSQ

SEQ ID NO: 86395 - protein, 114 aa, Homo sapiens
  Payload ID: 17258
  Gene Symbol: TRBV4-2
  Gene Name: T cell receptor beta variable 4-2
  ENSP ID: ENSP00000374915
MGCRLLCCAVLCLLGAVPMETGVTQTPRHLVMGMTNKKSLKCEQHLGHNAMYWYKQSAKKPLELMFVYNFKEQTENNSVPSRFSPECPNSSHLFLHLHTLQPEDSALYLCASSQ

SEQ ID NO: 86396 - protein, 114 aa, Homo sapiens; identical to SEQ ID NO: 86395
  Payload ID: 17258
  Gene Symbol: TRBV4-2
  Gene Name: T cell receptor beta variable 4-2
  ENSP ID: ENSP00000487667

SEQ ID NO: 86397 - protein, 114 aa, Homo sapiens
  Payload ID: 17259
  Gene Symbol: TRBV4-3
  Gene Name: T cell receptor beta variable 4-3
  ENSP ID: ENSP00000488576
MGCRLLCCAVLCLLGAVPMETGVTQTPRHLVMGMTNKKSLKCEQHLGHNAMYWYKQSAKKPLELMFVYSLEERVENNSVPSRFSPECPNSSHLFLHLHTLQPEDSALYLCASSQ

SEQ ID NO: 86398 - protein, 114 aa, Homo sapiens
  Payload ID: 17260
  Gene Symbol: TRBV5-1
  Gene Name: T cell receptor beta variable 5-1
  ENSP ID: ENSP00000374904
MGSRLLCWVLLCLLGAGPVKAGVTQTPRYLIKTRGQQVTLSCSPISGHRSVSWYQQTPGQGLQFLFEYFSETQRNKGNFPGRFSGRQFSNSRSEMNVSTLELGDSALYLCASSL

SEQ ID NO: 86399 - protein, 114 aa, Homo sapiens; identical to SEQ ID NO: 86398
  Payload ID: 17260
  Gene Symbol: TRBV5-1
  Gene Name: T cell receptor beta variable 5-1
  ENSP ID: ENSP00000488308

SEQ ID NO: 86400 - protein, 114 aa, Homo sapiens
  Payload ID: 17261
  Gene Symbol: TRBV5-3
  Gene Name: T cell receptor beta variable 5-3 (non-functional)
  ENSP ID: ENSP00000374885
MGPGLLCWELLYLLGAGPVEAGVTQSPTHLIKTRGQQVTLRCSPISGHSSVSWYQQAPGQGPQFIFEYANELRRSEGNFPNRFSGRQFHDYCSEMNVSALELGDSALYLCARSL

SEQ ID NO: 86401 - protein, 114 aa, Homo sapiens
  Payload ID: 17261
  Gene Symbol: TRBV5-3
  Gene Name: T cell receptor beta variable 5-3 (non-functional)
  ENSP ID: ENSP00000488267
MGPGLLCWELLYLLGAGPVEAGVTQSPTHLIKTRGQQVTLRCSPISGHSSVSWYQQAPGQGPQFIFEYANELRRSEGNFPNRFSGRQFHDCCSEMNVSALELGDSALYLCARSL

SEQ ID NO: 86402 - protein, 114 aa, Homo sapiens
  Payload ID: 17262
  Gene Symbol: TRBV5-4
  Gene Name: T cell receptor beta variable 5-4
  ENSP ID: ENSP00000413966
MGPGLLCWALLCLLGAGSVETGVTQSPTHLIKTRGQQVTLRCSSQSGHNTVSWYQQALGQGPQFIFQYYREEENGRGNFPPRFSGLQFPNYSSELNVNALELDDSALYLCASSL

SEQ ID NO: 86403 - protein, 114 aa, Homo sapiens
  Payload ID: 17262
  Gene Symbol: TRBV5-4
  Gene Name: T cell receptor beta variable 5-4
  ENSP ID: ENSP00000488374
MGPGLLCWALLCLLGAGSVDAGVTQSPTHLIKTRGQQVTLRCSSQSGHNTVSWYQQALGQGPQFIFQYYREEENGRGNFPPRFSGLQFPNDSSELNVNALELDDSALYLCASSL

SEQ ID NO: 86404 - protein, 114 aa, Homo sapiens
  Payload ID: 17263
  Gene Symbol: TRBV5-5
  Gene Name: T cell receptor beta variable 5-5
  ENSP ID: ENSP00000374895
MGPGLLCWVLLCLLGAGPVDAGVTQSPTHLIKTRGQQVTLRCSPISGHKSVSWYQQVLGQGPQFIFQYYEKEERGRGNFPDRFSARQFPNYSSELNVNALLLGDSALYLCASSL

SEQ ID NO: 86405 - protein, 114 aa, Homo sapiens
  Payload ID: 17263
  Gene Symbol: TRBV5-5
  Gene Name: T cell receptor beta variable 5-5
  ENSP ID: ENSP00000488241
MGPGLLCWVLLCLLVAGPVDAGVTQSPTHLIKTRGQQVTLRCSPISGHKSVSWYQQVLGQGPQFIFQYYEKEERGRGNFPDRFSARQFPNYSSELNVNALLLGDSALYLCASSL

SEQ ID NO: 86406 - protein, 114 aa, Homo sapiens
  Payload ID: 17264
  Gene Symbol: TRBV5-6
  Gene Name: T cell receptor beta variable 5-6
  ENSP ID: ENSP00000374898
MGPGLLCWALLCLLGAGLVDAGVTQSPTHLIKTRGQQVTLRCSPKSGHDTVSWYQQALGQGPQFIFQYYEEEERQRGNFPDRFSGHQFPNYSSELNVNALLLGDSALYLCASSL

SEQ ID NO: 86407 - protein, 114 aa, Homo sapiens; identical to SEQ ID NO: 86406
  Payload ID: 17264
  Gene Symbol: TRBV5-6
  Gene Name: T cell receptor beta variable 5-6
  ENSP ID: ENSP00000487850

SEQ ID NO: 86408 - protein, 114 aa, Homo sapiens
  Payload ID: 17265
  Gene Symbol: TRBV5-7
  Gene Name: T cell receptor beta variable 5-7 (non-functional)
  ENSP ID: ENSP00000374901
MGPGLLCWVLLCPLGEGPVDAGVTQSPTHLIKTRGQHVTLRCSPISGHTSVSSYQQALGQGPQFIFQYYEKEERGRGNFPDQFSGHQFPNYSSELNVNALLLGDSALYLCASSL

SEQ ID NO: 86409 - protein, 114 aa, Homo sapiens; identical to SEQ ID NO: 86408
  Payload ID: 17265
  Gene Symbol: TRBV5-7
  Gene Name: T cell receptor beta variable 5-7 (non-functional)
  ENSP ID: ENSP00000488478

SEQ ID NO: 86410 - protein, 114 aa, Homo sapiens
  Payload ID: 17266
  Gene Symbol: TRBV5-8
  Gene Name: T cell receptor beta variable 5-8
  ENSP ID: ENSP00000488017
MGPRLLFWALLCLLGTGPVEAGVTQSPTHLIKTRGQQATLRCSPISGHTSVYWYQQALGLGLQFLLWYDEGEERNRGNFPPRFSGRQFPNYSSELNVNALELEDSALYLCASSL

SEQ ID NO: 86411 - protein, 114 aa, Homo sapiens
  Payload ID: 17267
  Gene Symbol: TRBV6-1
  Gene Name: T cell receptor beta variable 6-1
  ENSP ID: ENSP00000374876
MSIGLLCCVAFSLLWASPVNAGVTQTPKFQVLKTGQSMTLQCAQDMNHNSMYWYRQDPGMGLRLIYYSASEGTTDKGEVPNGYNVSRLNKREFSLRLESAAPSQTSVYFCASSE

SEQ ID NO: 86412 - protein, 114 aa, Homo sapiens; identical to SEQ ID NO: 86411
  Payload ID: 17267
  Gene Symbol: TRBV6-1
  Gene Name: T cell receptor beta variable 6-1
  ENSP ID: ENSP00000488756

SEQ ID NO: 86413 - protein, 114 aa, Homo sapiens
  Payload ID: 17268
  Gene Symbol: TRBV6-2
  Gene Name: T cell receptor beta variable 6-2 (gene/pseudogene)
  ENSP ID: ENSP00000488603
MSLGLLCCGAFSLLWAGPVNAGVTQTPKFRVLKTGQSMTLLCAQDMNHEYMYWYRQDPGMGLRLIHYSVGEGTTAKGEVPDGYNVSRLKKQNFLLGLESAAPSQTSVYFCASSY

SEQ ID NO: 86414 - protein, 114 aa, Homo sapiens; identical to SEQ ID NO: 86413
  Payload ID: 17268
  Gene Symbol: TRBV6-2
  Gene Name: T cell receptor beta variable 6-2 (gene/pseudogene)
  ENSP ID: ENSP00000488969

SEQ ID NO: 86415 - protein, 114 aa, Homo sapiens; identical to SEQ ID NO: 86413
  Payload ID: 17269
  Gene Symbol: TRBV6-3
  Gene Name: T cell receptor beta variable 6-3
  ENSP ID: ENSP00000488127

SEQ ID NO: 86416 - protein, 114 aa, Homo sapiens
  Payload ID: 17270
  Gene Symbol: TRBV6-4
  Gene Name: T cell receptor beta variable 6-4
  ENSP ID: ENSP00000374883
MSIRLLCCVAFSLLWAGPVTAGITQAPTSQILAAGRSMTLRCTQDMRHNAMYWYRQDLGLGLRLIHYSNTAGTTGKGEVPDGYSVSRANTDDFPLTLASAVPSQTSVYFCASSD

SEQ ID NO: 86417 - protein, 114 aa, Homo sapiens
  Payload ID: 17270
  Gene Symbol: TRBV6-4
  Gene Name: T cell receptor beta variable 6-4
  ENSP ID: ENSP00000487798
MRIRLLCCVAFSLLWAGPVIAGITQAPTSQILAAGRRMTLRCTQDMRHNAMYWYRQDLGLGLRLIHYSNTAGTTGKGEVPDGYSVSRANTDDFPLTLASAVPSQTSVYFCASSD

SEQ ID NO: 86418 - protein, 114 aa, Homo sapiens
  Payload ID: 17271
  Gene Symbol: TRBV6-5
  Gene Name: T cell receptor beta variable 6-5
  ENSP ID: ENSP00000374891
MSIGLLCCAALSLLWAGPVNAGVTQTPKFQVLKTGQSMTLQCAQDMNHEYMSWYRQDPGMGLRLIHYSVGAGITDQGEVPNGYNVSRSTTEDFPLRLLSAAPSQTSVYFCASSY

SEQ ID NO: 86419 - protein, 125 aa, Homo sapiens
  Payload ID: 17271
  Gene Symbol: TRBV6-5
  Gene Name: T cell receptor beta variable 6-5
  ENSP ID: ENSP00000481327
MSLGLLCCGAFSLLWAGPVNAGVTQTPKFQVLKTGQSMTLQCAQDMNHEYMSWYRQDPGMGLRLIHYSVGAGITDQGEVPNGYNVSRSTTEDFPLRLLSAAPSQTSVYFCASLLHSATRPTVTSA

SEQ ID NO: 86420 - protein, 114 aa, Homo sapiens; identical to SEQ ID NO: 86418
  Payload ID: 17271
  Gene Symbol: TRBV6-5
  Gene Name: T cell receptor beta variable 6-5
  ENSP ID: ENSP00000488123

SEQ ID NO: 86421 - protein, 114 aa, Homo sapiens
  Payload ID: 17272
  Gene Symbol: TRBV6-6
  Gene Name: T cell receptor beta variable 6-6
  ENSP ID: ENSP00000374894
MSISLLCCAAFPLLWAGPVNAGVTQTPKFRILKIGQSMTLQCAQDMNHNYMYWYRQDPGMGLKLIYYSVGAGITDKGEVPNGYNVSRSTTEDFPLRLELAAPSQTSVYFCASSY

SEQ ID NO: 86422 - protein, 114 aa, Homo sapiens
  Payload ID: 17272
  Gene Symbol: TRBV6-6
  Gene Name: T cell receptor beta variable 6-6
  ENSP ID: ENSP00000488741
MSISLLCCAAFPLLWAGPVNAGVTQTPKFRILKIGQSMTLQCAQDMNHNYMYWYRQDPGMGLKLIYYSVGAGITDKGEVPNGYNVSRSTTEYFPLRLELAAPSQTSVYFCASSY

SEQ ID NO: 86423 - protein, 114 aa, Homo sapiens
  Payload ID: 17273
  Gene Symbol: TRBV6-7
  Gene Name: T cell receptor beta variable 6-7 (non-functional)
  ENSP ID: ENSP00000374896
MSLGLLCCVAFSLLWAGPMNAGVTQTPKFHVLKTGQSMTLLCAQDMNHEYMYRYRQDPGKGLRLIYYSVAAALTDKGEVPNGYNVSRSNTEDFPLKLESAAPSQTSVYFCASSY

SEQ ID NO: 86424 - protein, 114 aa, Homo sapiens; identical to SEQ ID NO: 86423
  Payload ID: 17273
  Gene Symbol: TRBV6-7
  Gene Name: T cell receptor beta variable 6-7 (non-functional)
  ENSP ID: ENSP00000488335

SEQ ID NO: 86425 - protein, 113 aa, Homo sapiens
  Payload ID: 17274
  Gene Symbol: TRBV6-8
  Gene Name: T cell receptor beta variable 6-8
  ENSP ID: ENSP00000374899
MSLGLLCCAAFSLLWAGPVNAGVTQTPKFHILKTGQSMTLQCAQDMNHGYMSWYRQDPGMGLRLIYYSAAAGTTDKEVPNGYNVSRLNTEDFPLRLVSAAPSQTSVYLCASSY

SEQ ID NO: 86426 - protein, 113 aa, Homo sapiens
  Payload ID: 17274
  Gene Symbol: TRBV6-8
  Gene Name: T cell receptor beta variable 6-8
  ENSP ID: ENSP00000488870
MSLGLLCCAAFSLLWAGPVNAGVTQTPKFHILKTGQSMTLQCAQDMNHGYMSWYRQDPGMGLRLIYYSAAAGTTDKEVPNGYNVSRLNTEDFPLRLVSAAPSRTSVYLCASSY

SEQ ID NO: 86427 - protein, 114 aa, Homo sapiens
  Payload ID: 17275
  Gene Symbol: TRBV6-9
  Gene Name: T cell receptor beta variable 6-9
  ENSP ID: ENSP00000488280
MSIGLLCCVAFSLLWAGPVNAGVTQTPKFHILKTGQSMTLQCAQDMNHGYLSWYRQDPGMGLRRIHYSVAAGITDKGEVPDGYNVSRSNTEDFPLRLESAAPSQTSVYFCASSY

SEQ ID NO: 86428 - protein, 115 aa, Homo sapiens
  Payload ID: 17276
  Gene Symbol: TRBV7-1
  Gene Name: T cell receptor beta variable 7-1 (non-functional)
  ENSP ID: ENSP00000448600
MGTRLLCWAAICLLGADHTGAGVSQSLRHKVAKKGKDVALRYDPISGHNALYWYRQSLGQGLEFPIYFQGKDAADKSGLPRDRFSAQRSEGSISTLKFQRTQQGDLAVYLCASSS

SEQ ID NO: 86429 - protein, 115 aa, Homo sapiens; identical to SEQ ID NO: 86428
  Payload ID: 17276
  Gene Symbol: TRBV7-1
  Gene Name: T cell receptor beta variable 7-1 (non-functional)
  ENSP ID: ENSP00000488287

SEQ ID NO: 86430 - protein, 115 aa, Homo sapiens
  Payload ID: 17277
  Gene Symbol: TRBV7-2
  Gene Name: T cell receptor beta variable 7-2
  ENSP ID: ENSP00000488152
MGTRLLFWVAFCLLGADHTGAGVSQSPSNKVTEKGKDVELRCDPISGHTALYWYRQSLGQGLEFLIYFQGNSAPDKSGLPSDRFSAERTGGSVSTLTIQRTQQEDSAVYLCASSL

SEQ ID NO: 86431 - protein, 115 aa, Homo sapiens; identical to SEQ ID NO: 86430
  Payload ID: 17277
  Gene Symbol: TRBV7-2
  Gene Name: T cell receptor beta variable 7-2
  ENSP ID: ENSP00000489072

SEQ ID NO: 86432 - protein, 115 aa, Homo sapiens
  Payload ID: 17278
  Gene Symbol: TRBV7-3
  Gene Name: T cell receptor beta variable 7-3
  ENSP ID: ENSP00000374884
MGTRLLCWAALCLLGADHTGAGVSQTPSNKVTEKGKDVELRCDPISGHTALYWYRQSLGQGPEFLIYFQGTGAADDSGLPKDRFFAVRPEGSVSTLKIQRTEQGDSAAYLRASSL

SEQ ID NO: 86433 - protein, 115 aa, Homo sapiens
  Payload ID: 17278
  Gene Symbol: TRBV7-3
  Gene Name: T cell receptor beta variable 7-3
  ENSP ID: ENSP00000488108
MGTRLLCWAALCLLGADHTGAGVSQTPSNKVTEKGKYVELRCDPISGHTALYWYRQSLGQGPEFLIYFQGTGAADDSGLPNDRFFAVRPEGSVSTLKIQRTERGDSAVYLCASSL

SEQ ID NO: 86434 - protein, 115 aa, Homo sapiens
  Payload ID: 17279
  Gene Symbol: TRBV7-4
  Gene Name: T cell receptor beta variable 7-4 (gene/pseudogene)
  ENSP ID: ENSP00000374892
MGTRLLCWVVLGFLGTDHTGAGVSQSPRYKVAKRGRDVALRCDSISGHVTLYWYRQTLGQGSEVLTYSQSDAQRDKSGRPSGRFSAERPERSVSTLKIQRTEQGDSAVYLCASSL

SEQ ID NO: 86435 - protein, 115 aa, Homo sapiens
  Payload ID: 17279
  Gene Symbol: TRBV7-4
  Gene Name: T cell receptor beta variable 7-4 (gene/pseudogene)
  ENSP ID: ENSP00000488823
MGTRLLCWVVLGFLGTDHTGAGVSQSPRYKVAKRGRDVALRCDSISGHVTLYWYRQTLGQGSEVLTYSQSDAQRDKSGRPSGRFSAERPERSVSTLKIQCTEQGDSAVYLCASSL

SEQ ID NO: 86436 - protein, 115 aa, Homo sapiens
  Payload ID: 17280
  Gene Symbol: TRBV7-6
  Gene Name: T cell receptor beta variable 7-6
  ENSP ID: ENSP00000374897
MGTSLLCWVVLGFLGTDHTGAGVSQSPRYKVTKRGQDVALRCDPISGHVSLYWYRQALGQGPEFLTYFNYEAQQDKSGLPNDRFSAERPEGSISTLTIQRTEQRDSAMYRCASSL

SEQ ID NO: 86437 - protein, 115 aa, Homo sapiens
  Payload ID: 17280
  Gene Symbol: TRBV7-6
  Gene Name: T cell receptor beta variable 7-6
  ENSP ID: ENSP00000488212
MGTSLLCWVVLGFLGTDHTGAGVSQSPRYKVTKRGQDVALRCDPISGHVSLYWYRQALGQGPEFLTYFNYEAQQDKSGLPNDRFSAERPEGSVSTLTIQRTEQRDSAMYRCASSL

SEQ ID NO: 86438 - protein, 115 aa, Homo sapiens
  Payload ID: 17281
  Gene Symbol: TRBV7-7
  Gene Name: T cell receptor beta variable 7-7
  ENSP ID: ENSP00000374900
MGTSLLCWVVLGFLGTDHTGAGVSQSPRYKVTKRGQDVTLRCDPISSHATLYWYQQALGQGPEFLTYFNYEAQPDKSGLPSDRFSAERPEGSISTLTIQRTEQRDSAMYRCASSL

SEQ ID NO: 86439 - protein, 115 aa, Homo sapiens; identical to SEQ ID NO: 86438
  Payload ID: 17281
  Gene Symbol: TRBV7-7
  Gene Name: T cell receptor beta variable 7-7
  ENSP ID: ENSP00000488424

SEQ ID NO: 86440 - protein, 115 aa, Homo sapiens
  Payload ID: 17282
  Gene Symbol: TRBV7-8
  Gene Name: T cell receptor beta variable 7-8
  ENSP ID: ENSP00000488190
MGTRLLCWVVLGFLGTDHTGAGVSQSPRYKVAKRGQDVALRCDPISGHVSLFWYQQALGQGPEFLTYFQNEAQLDKSGLPSDRFFAERPEGSVSTLKIQRTQQEDSAVYLCASSL

SEQ ID NO: 86441 - protein, 115 aa, Homo sapiens
  Payload ID: 17283
  Gene Symbol: TRBV7-9
  Gene Name: T cell receptor beta variable 7-9
  ENSP ID: ENSP00000478301
MGTSLLCWMALCLLGADHADTGVSQNPRHKITKRGQNVTFRCDPISEHNRLYWYRQTLGQGPEFLTYFQNEAQLEKSRLLSDRFSAERPKGSFSTLEIQRTEQGDSAMYLCASSL

SEQ ID NO: 86442 - protein, 115 aa, Homo sapiens
  Payload ID: 17283
  Gene Symbol: TRBV7-9
  Gene Name: T cell receptor beta variable 7-9
  ENSP ID: ENSP00000487884
MGTSLLCWMALCLLGADHADTGVSQDPRHKITKRGQNVTFRCDPISEHNRLYWYRQTLGQGPEFLTYFQNEAQLEKSRLLSDRFSAERPKGSFSTLEIQRTEQGDSAMYLCASSL

SEQ ID NO: 86443 - protein, 114 aa, Homo sapiens
  Payload ID: 17284
  Gene Symbol: TRBV9
  Gene Name: T cell receptor beta variable 9
  ENSP ID: ENSP00000374886
MGFRLLCCVAFCLLGAGPVDSGVTQTPKHLITATGQRVTLRCSPRSGDLSVYWYQQSLDQGLQFLIHYYNGEERAKGNILERFSAQQFPDLHSELNLSSLELGDSALYFCASSV

SEQ ID NO: 86444 - protein, 114 aa, Homo sapiens
  Payload ID: 17284
  Gene Symbol: TRBV9
  Gene Name: T cell receptor beta variable 9
  ENSP ID: ENSP00000488515
MGFRLLCCVAFCLLGAGPVDSGVTQTPKHLITATGQRVTLRCSPRSGDLSVYWYQQSLDQGLQFLIQYYNGEERAKGNILERFSAQQFPDLHSELNLSSLELGDSALYFCASSV

SEQ ID NO: 86445 - protein, 154 aa, Homo sapiens
  Payload ID: 17285
  Gene Symbol: TRDC
  Gene Name: T cell receptor delta constant
  ENSP ID: ENSP00000451468
  MOD_RES (1)..(1): Any amino acid
XSQPHTKPSVFVMKNGTNVACLVKEFYPKDIRINLVSSKKITEFDPAIVISPSGKYNAVKLGKYEDSNSVTCSVQHDNKTVHSTDFEVKTDSTDHVKPKETENTKQPSKSCHKPKAIVHTEKVNMMSLTVLGLRMLFAKTVAVNFLLTAKLFFL

SEQ ID NO: 86446 - protein, 2 aa, Homo sapiens
  Payload ID: 17286
  Gene Symbol: TRDD1
  Gene Name: T cell receptor delta diversity 1
  ENSP ID: ENSP00000451042
EI

SEQ ID NO: 86447 - protein, 3 aa, Homo sapiens
  Payload ID: 17287
  Gene Symbol: TRDD2
  Gene Name: T cell receptor delta diversity 2
  ENSP ID: ENSP00000451515
PSY

SEQ ID NO: 86448 - protein, 4 aa, Homo sapiens
  Payload ID: 17288
  Gene Symbol: TRDD3
  Gene Name: T cell receptor delta diversity 3
  ENSP ID: ENSP00000452494
TGGY

SEQ ID NO: 86449 - protein, 17 aa, Homo sapiens
  Payload ID: 17289
  Gene Symbol: TRDJ1
  Gene Name: T cell receptor delta joining 1
  ENSP ID: ENSP00000452345
  MOD_RES (1)..(1): Any amino acid
XTDKLIFGKGTRVTVEP

SEQ ID NO: 86450 - protein, 18 aa, Homo sapiens
  Payload ID: 17290
  Gene Symbol: TRDJ2
  Gene Name: T cell receptor delta joining 2
  ENSP ID: ENSP00000450875
  MOD_RES (1)..(1): Any amino acid
XLTAQLFFGKGTQLIVEP

SEQ ID NO: 86451 - protein, 20 aa, Homo sapiens
  Payload ID: 17291
  Gene Symbol: TRDJ3
  Gene Name: T cell receptor delta joining 3
  ENSP ID: ENSP00000451140
  MOD_RES (1)..(1): Any amino acid
XSWDTRQMFFGTGIKLFVEP

SEQ ID NO: 86452 - protein, 16 aa, Homo sapiens
  Payload ID: 17292
  Gene Symbol: TRDJ4
  Gene Name: T cell receptor delta joining 4
  ENSP ID: ENSP00000452040
  MOD_RES (1)..(1): Any amino acid
XRPLIFGKGTYLEVQQ

SEQ ID NO: 86453 - protein, 115 aa, Homo sapiens
  Payload ID: 17293
  Gene Symbol: TRDV1
  Gene Name: T cell receptor delta variable 1
  ENSP ID: ENSP00000452111
MLFSSLLCVFVAFSYSGSSVAQKVTQAQSSVSMPVRKAVTLNCLYETSWWSYYIFWYKQLPSKEMIFLIRQGSDEQNAKSGRYSVNFKKAAKSVALTISALQLEDSAKYFCALGE

SEQ ID NO: 86454 - protein, 34 aa, Homo sapiens
  Payload ID: 17293
  Gene Symbol: TRDV1
  Gene Name: T cell receptor delta variable 1
  ENSP ID: ENSP00000484940
KSGRYSVNFKKAAKSVALTISALQLEDSAKYFCA

SEQ ID NO: 86455 - protein, 115 aa, Homo sapiens
  Payload ID: 17294
  Gene Symbol: TRDV2
  Gene Name: T cell receptor delta variable 2
  ENSP ID: ENSP00000451578
MQRISSLIHLSLFWAGVMSAIELVPEHQTVPVSIGVPATLRCSMKGEAIGNYYINWYRKTQGNTMTFIYREKDIYGPGFKDNFQGDIDIAKNLAVLKILAPSERDEGSYYCACDT

SEQ ID NO: 86456 - protein, 113 aa, Homo sapiens
  Payload ID: 17295
  Gene Symbol: TRDV3
  Gene Name: T cell receptor delta variable 3
  ENSP ID: ENSP00000451750
MILTVGFSFLFFYRGTLCDKVTQSSPDQTVASGSEVVLLCTYDTVYSNPDLFWYRIRPDYSFQFVFYGDNSRSEGADFTQGRFSVKHILTQKAFHLVISPVRTEDSATYYCAF

SEQ ID NO: 86457 - protein, 173 aa, Homo sapiens
  Payload ID: 17296
  Gene Symbol: TRGC1
  Gene Name: T cell receptor gamma constant 1
  ENSP ID: ENSP00000404817
  MOD_RES (1)..(1): Any amino acid
XKQLDADVSPKPTIFLPSIAETKLQKAGTYLCLLEKFFPDVIKIHWQEKKSNTILGSQEGNTMKTNDTYMKFSWLTVPEKSLDKEHRCIVRHENNKNGVDQEIIFPPIKTDVITMDPKDNCSKDANDTLLLQLTNTSAYYMYLLLLLKSVVYFAIITCCLLRRTAFCCNGEKS

SEQ ID NO: 86458 - protein, 189 aa, Homo sapiens
  Payload ID: 17297
  Gene Symbol: TRGC2
  Gene Name: T cell receptor gamma constant 2
  ENSP ID: ENSP00000413437
  MOD_RES (1)..(1): Any amino acid
XKQLDADVSPKPTIFLPSIAETKLQKAGTYLCLLEKFFPDIIKIHWQEKKSNTILGSQEGNTMKTNDTYMKFSWLTVPEESLDKEHRCIVRHENNKNGIDQEIIFPPIKTDVTTVDPKYNYSKDANDVITMDPKDNWSKDANDTLLLQLTNTSAYYTYLLLLLKSVVYFAIITCCLLRRTAFCCNGEKS

SEQ ID NO: 86459 - protein, 321 aa, Homo sapiens
  Payload ID: 17297
  Gene Symbol: TRGC2
  Gene Name: T cell receptor gamma constant 2
  ENSP ID: ENSP00000480566
MRWALAVLLAFLSPASQISSNLEGRTKSVTRLTGSSAEITCDLPGASTLYIHWYLHQEGKAPQCLLYYEPYYSRVVLESGITPGKYDTGSTRSNWNLRLQNLIKNDSGFYYCATWDRHSIQTLSACGSFLPIDKQLDADVSPKPTIFLPSIAETKLQKAGTYLCLLEKFFPDIIKIHWQEKKSNTILGSQEGNTMKTNDTYMKFSWLTVPEESLDKEHRCIVRHENNKNGIDQEIIFPPIKTDVTTVDPKYNYSKDANDVITMDPKDNWSKDANDTLLLQLTNTSAYYTYLLLLLKSVVYFAIITCCLLRRTAFCCNGEKS

SEQ ID NO: 86460 - protein, 17 aa, Homo sapiens
  Payload ID: 17298
  Gene Symbol: TRGJ1
  Gene Name: T cell receptor gamma joining 1
  ENSP ID: ENSP00000420798
  MOD_RES (1)..(1): Any amino acid
XNYYKKLFGSGTTLVVT

SEQ ID NO: 86461 - protein, 17 aa, Homo sapiens
  Payload ID: 17299
  Gene Symbol: TRGJ2
  Gene Name: T cell receptor gamma joining 2
  ENSP ID: ENSP00000417149
  MOD_RES (1)..(1): Any amino acid
XNYYKKLFGSGTTLVVT

SEQ ID NO: 86462 - protein, 20 aa, Homo sapiens
  Payload ID: 17300
  Gene Symbol: TRGJP
  Gene Name: T cell receptor gamma joining P
  ENSP ID: ENSP00000418089
GQELGKKIKVFGPGTKLIIT

SEQ ID NO: 86463 - protein, 20 aa, Homo sapiens
  Payload ID: 17301
  Gene Symbol: TRGJP1
  Gene Name: T cell receptor gamma joining P1
  ENSP ID: ENSP00000419604
  MOD_RES (1)..(1): Any amino acid
XTTGWFKIFAEGTKLIVTSP

SEQ ID NO: 86464 - protein, 20 aa, Homo sapiens
  Payload ID: 17302
  Gene Symbol: TRGJP2
  Gene Name: T cell receptor gamma joining P2
  ENSP ID: ENSP00000418697
  MOD_RES (1)..(1): Any amino acid
XSSDWIKTFAKGTRLIVTSP

SEQ ID NO: 86465 - protein, 117 aa, Homo sapiens
  Payload ID: 17303
  Gene Symbol: TRGV1
  Gene Name: T cell receptor gamma variable 1 (non-functional)
  ENSP ID: ENSP00000374871
MRWALAVLLAFLSPASQISSNLEGRTKSVTRLTGSSAEITCDLPGASTLYIHWYLHQEGKAPQCLLYYEPYYSRVVLESGITPGKYDTGSTRSNWNLRLQNLIKNDSGFYYCATWDR

SEQ ID NO: 86466 - protein, 117 aa, Homo sapiens
  Payload ID: 17304
  Gene Symbol: TRGV10
  Gene Name: T cell receptor gamma variable 10 (non-functional)
  ENSP ID: ENSP00000374864
MFIGNSPLLLTVGLGLSKVEQFQLSISTEVKKSIDIPCKISSTRFETDVIHWYRQKPNQALEHLIYIVSTKSAARRSMGKTSNKVEARKNSQTLTSILTIKSVEKEDMAVYYCAAWD

SEQ ID NO: 86467 - protein, 103 aa, Homo sapiens
  Payload ID: 17305
  Gene Symbol: TRGV11
  Gene Name: T cell receptor gamma variable 11 (non-functional)
  ENSP ID: ENSP00000374863
LGQLEQPEISISRPANKSAHISWKASIQGFSSKIIHWYWQKPNKGLEYLLHVFLTISAQDCSGGKTKKLEVSKNAHTSTSTLKIKFLEKEDEVVYHCACWIRH

SEQ ID NO: 86468 - protein, 118 aa, Homo sapiens
  Payload ID: 17306
  Gene Symbol: TRGV2
  Gene Name: T cell receptor gamma variable 2
  ENSP ID: ENSP00000404928
MQWALAVLLAFLSPASQKSSNLEGRTKSVIRQTGSSAEITCDLAEGSNGYIHWYLHQEGKAPQRLQYYDSYNSKVVLESGVSPGKYYTYASTRNNLRLILRNLIENDFGVYYCATWDG

SEQ ID NO: 86469 - protein, 118 aa, Homo sapiens
  Payload ID: 17307
  Gene Symbol: TRGV3
  Gene Name: T cell receptor gamma variable 3
  ENSP ID: ENSP00000374869
MRWALLVLLAFLSPASQKSSNLEGRTKSVTRQTGSSAEITCDLTVTNTFYIHWYLHQEGKAPQRLLYYDVSTARDVLESGLSPGKYYTHTPRRWSWILRLQNLIENDSGVYYCATWDR

SEQ ID NO: 86470 - protein, 118 aa, Homo sapiens
  Payload ID: 17308
  Gene Symbol: TRGV4
  Gene Name: T cell receptor gamma variable 4
  ENSP ID: ENSP00000374868
MQWALAVLLAFLSPASQKSSNLEGRTKSVIRQTGSSAEITCDLAEGSTGYIHWYLHQEGKAPQRLLYYDSYTSSVVLESGISPGKYDTYGSTRKNLRMILRNLIENDSGVYYCATWDG

SEQ ID NO: 86471 - protein, 118 aa, Homo sapiens
  Payload ID: 17309
  Gene Symbol: TRGV5
  Gene Name: T cell receptor gamma variable 5
  ENSP ID: ENSP00000374867
MRWALLVLLAFLSPASQKSSNLEGGTKSVTRPTRSSAEITCDLTVINAFYIHWYLHQEGKAPQRLLYYDVSNSKDVLESGLSPGKYYTHTPRRWSWILILRNLIENDSGVYYCATWDR

SEQ ID NO: 86472 - protein, 119 aa, Homo sapiens
  Payload ID: 17309
  Gene Symbol: TRGV5
  Gene Name: T cell receptor gamma variable 5
  ENSP ID: ENSP00000483079
MRWALLVLLAFLSPASQKSSNLEGGTKSVTRPTRSSAEITCDLTVINAFYIHWYLHQEGKAPQRLLYYDVSNSKDVLESGLSPGKYYTHTPRRWSWILILRNLIENDSGVYYCATWDRH

SEQ ID NO: 86473 - protein, 118 aa, Homo sapiens
  Payload ID: 17310
  Gene Symbol: TRGV8
  Gene Name: T cell receptor gamma variable 8
  ENSP ID: ENSP00000374866
MLLALALLLAFLPPASQKSSNLEGRTKSVTRPTGSSAVITCDLPVENAVYTHWYLHQEGKAPQRLLYYDSYNSRVVLESGISREKYHTYASTGKSLKFILENLIERDSGVYYCATWDR

SEQ ID NO: 86474 - protein, 122 aa, Homo sapiens
  Payload ID: 17311
  Gene Symbol: TRGV9
  Gene Name: T cell receptor gamma variable 9
  ENSP ID: ENSP00000391561
MLSLLHTSTLAVLGALCVYGAGHLEQPQISSTKTLSKTARLECVVSGITISATSVYWYRERPGEVIQFLVSISYDGTVRKESGIPSGKFEVDRIPETSTSTLTIHNVEKQDIATYYCALWEV

SEQ ID NO: 86475 - protein, 271 aa, Homo sapiens [sequence omitted]

SEQ ID NO: 86476 - protein, 279 aa, Homo sapiens [sequence omitted]

SEQ ID NO: 86477 - protein, 271 aa, Homo sapiens
  Payload ID: 17312
  Gene Symbol: TARM1
  Gene Name: T cell-interacting, activating receptor on myeloid cells 1
  ENSP ID: ENSP00000478234
MIPKLLSLLCFRLCVGQGDTRGDGSLPKPSLSAWPSSVVPANSNVTLRCWTPARGVSFVLRKGGIILESPKPLDSTEGAAEFHLNNLKVRNAGEYTCEYYRKASPHILSQRSDVLLLLVTGHLSKPFLRTYQRGTVTAGGRVTLQCQKRDQLFVPIMFALLKAGTPSPIQLQSPAGKEIDFSLVDVTAGDAGNYSCMYYQTKSPFWASEPSDQLEILVTVPPGTTSSNYSLGNFVRLGLAAVIVVIMGAFLVEAWYSRNVSPGESEAFKPE

SEQ ID NO: 86478 - protein, 271 aa, Homo sapiens; identical to SEQ ID NO: 86477
  Payload ID: 17312
  Gene Symbol: TARM1
  Gene Name: T cell-interacting, activating receptor on myeloid cells 1
  ENSP ID: ENSP00000478822

SEQ ID NO: 86479 - protein, 271 aa, Homo sapiens; identical to SEQ ID NO: 86477
  Payload ID: 17312
  Gene Symbol: TARM1
  Gene Name: T cell-interacting, activating receptor on myeloid cells 1
  ENSP ID: ENSP00000479062

SEQ ID NO: 86480 - protein, 271 aa, Homo sapiens; identical to SEQ ID NO: 86477
  Payload ID: 17312
  Gene Symbol: TARM1
  Gene Name: T cell-interacting, activating receptor on myeloid cells 1
  Uniprot ID: B6A8C7
  ENSP ID: ENSP00000479185

SEQ ID NO: 86481 - protein, 271 aa, Homo sapiens; identical to SEQ ID NO: 86477
  Payload ID: 17312
  Gene Symbol: TARM1
  Gene Name: T cell-interacting, activating receptor on myeloid cells 1
  ENSP ID: ENSP00000479374

SEQ ID NO: 86482 - protein, 271 aa, Homo sapiens; identical to SEQ ID NO: 86477
  Payload ID: 17312
  Gene Symbol: TARM1
  Gene Name: T cell-interacting, activating receptor on myeloid cells 1
  ENSP ID: ENSP00000479824

SEQ ID NO: 86483 - protein, 271 aa, Homo sapiens; identical to SEQ ID NO: 86477
  Payload ID: 17312
  Gene Symbol: TARM1
  Gene Name: T cell-interacting, activating receptor on myeloid cells 1
  Uniprot ID: B6A8C7
  ENSP ID: ENSP00000480049

SEQ ID NO: 86484 - protein, 271 aa, Homo sapiens; identical to SEQ ID NO: 86477
  Payload ID: 17312
  Gene Symbol: TARM1
  Gene Name: T cell-interacting, activating receptor on myeloid cells 1
  Uniprot ID: B6A8C7
  ENSP ID: ENSP00000480377

SEQ ID NO: 86485 - protein, 271 aa, Homo sapiens; identical to SEQ ID NO: 86477
  Payload ID: 17312
  Gene Symbol: TARM1
  Gene Name: T cell-interacting, activating receptor on myeloid cells 1
  ENSP ID: ENSP00000482624

SEQ ID NO: 86486 - protein, 279 aa, Homo sapiens
  Payload ID: 17312
  Gene Symbol: TARM1
  Gene Name: T cell-interacting, activating receptor on myeloid cells 1
  ENSP ID: ENSP00000484383
MKERKKKERKERKRKKERNGLCVGQGDTRGDGSLPKPSLSAWPSSVVPANSNVTLRCWTPARGVSFVLRKGGIILESPKPLDSTEGAAEFHLNNLKVRNAGEYTCEYYRKASPHILSQHSDVLLLLVTGHLSKPFLRTYQRGTVTAGGRVTLQCQKRDQLFVPIMFALLKAGTPSPIQLQSPAGKEIDFSLVDVTAGDAGNYSCMYYQTKSPFWASEPSDQLEILVTVPPGTTSSNYSLGNFVRLGLAAVIVVIMGAFLVEAWYSRNVSPGESEAFKPE

SEQ ID NO: 86487 - protein, 121 aa, Homo sapiens
  Payload ID: 17313
  Gene Symbol: TAC3
  Gene Name: tachykinin 3
  Uniprot ID: Q9UHF0
  ENSP ID: ENSP00000300108
MRIMLLFTAILAFSLAQSFGAVCKEPQEEVVPGGGRSKRDPDLYQLLQRLFKSHSSLEGLLKALSQASTDPKESTSPEKRDMHDFFVGLMGKRSVQPDSPTDVNQENVPSFGILKYPPRAE

SEQ ID NO: 86488 - protein, 135 aa, Homo sapiens
  Payload ID: 17313
  Gene Symbol: TAC3
  Gene Name: tachykinin 3
  Uniprot ID: Q9UHF0
  ENSP ID: ENSP00000350236
MRIMLLFTAILAFSLAQSFGAVCKEPQEEVVPGGGRSKRDPDLYQLLQRLFKSHSSLEGLLKALSQASTDPKESTSPEKRDMHDFFVGLMGKRSVQPEGKTGPFLPSVRVPRPLHPNQLGSTGKSSLGTEEQRPL

SEQ ID NO: 86489 - protein, 103 aa, Homo sapiens
  Payload ID: 17313
  Gene Symbol: TAC3
  Gene Name: tachykinin 3
  Uniprot ID: Q9UHF0
  ENSP ID: ENSP00000368721
MRIMLLFTAILAFSLAQSFGAVCKEPQEEVVPGGGRSKRDPDLYQLLQRLFKSHSSLEGLLKALSQASTDPKESTSPEKHSPTDVNQENVPSFGILKYPPRAE

SEQ ID NO: 86490 - protein, 135 aa, Homo sapiens; identical to SEQ ID NO: 86488
  Payload ID: 17313
  Gene Symbol: TAC3
  Gene Name: tachykinin 3
  Uniprot ID: Q9UHF0
  ENSP ID: ENSP00000377445

SEQ ID NO: 86491 - protein, 121 aa, Homo sapiens; identical to SEQ ID NO: 86487
  Payload ID: 17313
  Gene Symbol: TAC3
  Gene Name: tachykinin 3
  Uniprot ID: Q9UHF0
  ENSP ID: ENSP00000402995

SEQ ID NO: 86492 - protein, 121 aa, Homo sapiens; identical to SEQ ID NO: 86487
  Payload ID: 17313
  Gene Symbol: TAC3
  Gene Name: tachykinin 3
  Uniprot ID: Q9UHF0
  ENSP ID: ENSP00000404056

SEQ ID NO: 86493 - protein, 135 aa, Homo sapiens; identical to SEQ ID NO: 86488
  Payload ID: 17313
  Gene Symbol: TAC3
  Gene Name: tachykinin 3
  Uniprot ID: Q9UHF0
  ENSP ID: ENSP00000408131

SEQ ID NO: 86494 - protein, 103 aa, Homo sapiens; identical to SEQ ID NO: 86489
  Payload ID: 17313
  Gene Symbol: TAC3
  Gene Name: tachykinin 3
  Uniprot ID: Q9UHF0
  ENSP ID: ENSP00000408208

SEQ ID NO: 86495 - protein, 103 aa, Homo sapiens; identical to SEQ ID NO: 86489
  Payload ID: 17313
  Gene Symbol: TAC3
  Gene Name: tachykinin 3
  Uniprot ID: Q9UHF0
  ENSP ID: ENSP00000416292

SEQ ID NO: 86496 - protein, 121 aa, Homo sapiens; identical to SEQ ID NO: 86487
  Payload ID: 17313
  Gene Symbol: TAC3
  Gene Name: tachykinin 3
  Uniprot ID: Q9UHF0
  ENSP ID: ENSP00000483110

SEQ ID NO: 86497 - protein, 87 aa, Homo sapiens
  Payload ID: 17314
  Gene Symbol: TAC4
  Gene Name: tachykinin 4 (hemokinin)
  Uniprot ID: Q86UU9
  ENSP ID: ENSP00000325286
MLPCLALLLLMELSVCTVAGDGGEEQTLSTEAETWEGAGPSIQLQLQEVKTGKASQFFGLMGKRVGGRPLIQPRRKKGREDEAQGSE

SEQ ID NO: 86498 - protein, 113 aa, Homo sapiens
  Payload ID: 17314
  Gene Symbol: TAC4
  Gene Name: tachykinin 4 (hemokinin)
  Uniprot ID: Q86UU9
  ENSP ID: ENSP00000334042
MLPCLALLLLMELSVCTVAGDGGEEQTLSTEAETWVIVALEEGAGPSIQLQLQEVKTGKASQFFGLMGKRVGGRPLIQPRRKKAYQLEHTFQGLLGKRSLFTEGREDEAQGSE

SEQ ID NO: 86499 - protein, 76 aa, Homo sapiens
  Payload ID: 17314
  Gene Symbol: TAC4
  Gene Name: tachykinin 4 (hemokinin)
  Uniprot ID: Q86UU9
  ENSP ID: ENSP00000340461
MLPCLALLLLMELSVCTVAGDGGEEQTLSTEAETWEGAGPSIQLQLQEVKTGKASQFFGLMGKRVGGREDEAQGSE

SEQ ID NO: 86500 - protein, 96 aa, Homo sapiens
  Payload ID: 17314
  Gene Symbol: TAC4
  Gene Name: tachykinin 4 (hemokinin)
  Uniprot ID: Q86UU9
  ENSP ID: ENSP00000381221
MLPCLALLLLMELSVCTVAGDGGEEQTLSTEAETWEGAGPSIQLQLQEVKTGKASQFFGLMGKRVGAYQLEHTFQGLLGKRSLFTEGREDEAQGSE

SEQ ID NO: 86501 - protein, 107 aa, Homo sapiens
  Payload ID: 17314
  Gene Symbol: TAC4
  Gene Name: tachykinin 4 (hemokinin)
  Uniprot ID: Q86UU9
  ENSP ID: ENSP00000399702
MLPCLALLLLMELSVCTVAGDGGEEQTLSTEAETWEGAGPSIQLQLQEVKTGKASQFFGLMGKRVGGRPLIQPRRKKAYQLEHTFQGLLGKRSLFTEGREDEAQGSE

SEQ ID NO: 86502 - protein, 53 aa, Homo sapiens
  Payload ID: 17314
  Gene Symbol: TAC4
  Gene Name: tachykinin 4 (hemokinin)
  ENSP ID: ENSP00000421777
MLPCLALLLLMELSVCTVAGDGGEEQTLSTEAETWVIVALEVLLGRGSDEGRG

SEQ ID NO: 86503 - protein, 407 aa, Homo sapiens
  Payload ID: 17315
  Gene Symbol: TACR1
  Gene Name: tachykinin receptor 1
  Uniprot ID: P25103
  ENSP ID: ENSP00000303522
MDNVLPVDSDLSPNISTNTSEPNQFVQPAWQIVLWAAAYTVIVVTSVVGNVVVMWIILAHKRMRTVTNYFLVNLAFAEASMAAFNTVVNFTYAVHNEWYYGLFYCKFHNFFPIAAVFASIYSMTAVAFDRYMAIIHPLQPRLSATATKVVICVIWVLALLLAFPQGYYSTTETMPSRVVCMIEWPEHPNKIYEKVYHICVTVLIYFLPLLVIGYAYTVVGITLWASEIPGDSSDRYHEQVSAKRKVVKMMIVVVCTFAICWLPFHIFFLLPYINPDLYLKKFIQQVYLAIMWLAMSSTMYNPIIYCCLNDRFRLGFKHAFRCCPFISAGDYEGLEMKSTRYLQTQGSVYKVSRLETTISTVVGAHEEEPEDGPKATPSSLDLTSNCSSRSDSKTMTESFSFSSNVLS

SEQ ID NO: 86504 - protein, 311 aa, Homo sapiens
  Payload ID: 17315
  Gene Symbol: TACR1
  Gene Name: tachykinin receptor 1
  Uniprot ID: P25103
  ENSP ID: ENSP00000386448
MDNVLPVDSDLSPNISTNTSEPNQFVQPAWQIVLWAAAYTVIVVTSVVGNVVVMWIILAHKRMRTVTNYFLVNLAFAEASMAAFNTVVNFTYAVHNEWYYGLFYCKFHNFFPIAAVFASIYSMTAVAFDRYMAIIHPLQPRLSATATKVVICVIWVLALLLAFPQGYYSTTETMPSRVVCMIEWPEHPNKIYEKVYHICVTVLIYFLPLLVIGYAYTVVGITLWASEIPGDSSDRYHEQVSAKRKVVKMMIVVVCTFAICWLPFHIFFLLPYINPDLYLKKFIQQVYLAIMWLAMSSTMYNPIIYCCLNDR

SEQ ID NO: 86505 - protein, 398 aa, Homo sapiens
  Payload ID: 17316
  Gene Symbol: TACR2
  Gene Name: tachykinin receptor 2
  Uniprot ID: P21452
  ENSP ID: ENSP00000362403
MGTCDIVTEANISSGPESNTTGITAFSMPSWQLALWATAYLALVLVAVTGNAIVIWIILAHRRMRTVTNYFIVNLALADLCMAAFNAAFNFVYASHNIWYFGRAFCYFQNLFPITAMFVSIYSMTAIAADRYMAIVHPFQPRLSAPSTKAVIAGIWLVALALASPQCFYSTVTMDQGATKCVVAWPEDSGGKTLLLYHLVVIALIYFLPLAVMFVAYSVIGLTLWRRAVPGHQAHGANLRHLQAMKKFVKTMVLVVLTFAICWLPYHLYFILGSFQEDIYCHKFIQQVYLALFWLAMSSTMYNPIIYCCLNHRFRSGFRLAFRCCPWVTPTKEDKLELTPTTSLSTRVNRCHTKETLFMAGDTAPSEATSGEAGRPQDGSGLWFGYGLLAPTKTHVEI

SEQ ID NO: 86506 - protein, 186 aa, Homo sapiens
  Payload ID: 17316
  Gene Symbol: TACR2
  Gene Name: tachykinin receptor 2
  ENSP ID: ENSP00000362404
MFVAYSVIGLTLWRRAVPGHQAHGANLRHLQAMKKFVKTMVLVVLTFAICWLPYHLYFILGSFQEDIYCHKFIQQVYLALFWLAMSSTMYNPIIYCCLNHRFRSGFRLAFRCCPWVTPTKEDKLELTPTTSLSTRVNRCHTKETLFMAGDTAPSEATSGEAGRPQDGSGLWFGYGLLAPTKTHVEI

SEQ ID NO: 86507 - protein, 362 aa, Homo sapiens
  Payload ID: 17316
  Gene Symbol: TACR2
  Gene Name: tachykinin receptor 2
  ENSP ID: ENSP00000482436
MGTCDIVTEANISSGPESNTTGITAFSMRTVTNYFIVNLALADLCMAAFNAAFNFVYASHNIWYFGRAFCYFQNLFPITAMFVSIYSMTAIAADRYMAIVHPFQPRLSAPSTKAVIAGIWLVALALASPQCFYSTVTMDQGATKCVVAWPEDSGGKTLLLYHLVVIALIYFLPLAVMFVAYSVIGLTLWRRAVPGHQAHGANLRHLQAMKKFVKTMVLVVLTFAICWLPYHLYFILGSFQEDIYCHKFIQQVYLALFWLAMSSTMYNPIIYCCLNHRFRSGFRLAFRCCPWVTPTKEDKLELTPTTSLSTRVNRCHTKETLFMAGDTAPSEATSGEAGRPQDGSGLWFGYGLLAPTKTHVEI

SEQ ID NO: 86508 - protein, 465 aa, Homo sapiens
  Payload ID: 17317
  Gene Symbol: TACR3
  Gene Name: tachykinin receptor 3
  Uniprot ID: P29371
  ENSP ID: ENSP00000303325
MATLPAAETWIDGGGGVGADAVNLTASLAAGAATGAVETGWLQLLDQAGNLSSSPSALGLPVASPAPSQPWANLTNQFVQPSWRIALWSLAYGVVVAVAVLGNLIVIWIILAHKRMRTVTNYFLVNLAFSDASMAAFNTLVNFIYALHSEWYFGANYCRFQNFFPITAVFASIYSMTAIAVDRYMAIIDPLKPRLSATATKIVIGSIWILAFLLAFPQCLYSKTKVMPGRTLCFVQWPEGPKQHFTYHIIVIILVYCFPLLIMGITYTIVGITLWGGEIPGDTCDKYHEQLKAKRKVVKMMIIVVMTFAICWLPYHIYFILTAIYQQLNRWKYIQQVYLASFWLAMSSTMYNPIIYCCLNKRFRAGFKRAFRWCPFIKVSSYDELELKTTRFHPNRQSSMYTVTRMESMTVVFDPNDADTTRSSRKKRATPRDPSFNGCSRRNSKSASATSSFISSPYTSVDEYS

SEQ ID NO: 86509 - protein, 114 aa, Homo sapiens
  Payload ID: 17318
  Gene Symbol: TAC1
  Gene Name: tachykinin, precursor 1
  Uniprot ID: P20366
  ENSP ID: ENSP00000289574
MKILVALAVFFLVSTQLFAEEIGANDDLNYWSDWYDSDQIKEELPEPFEHLLQRIARRPKPQQFFGLMGKRDAGHGQISHKRHKTDSFVGLMGKRALNSVAYERSAMQNYERRR

SEQ ID NO: 86510 - protein, 111 aa, Homo sapiens
  Payload ID: 17318
  Gene Symbol: TAC1
  Gene Name: tachykinin, precursor 1
  Uniprot ID: P20366
  ENSP ID: ENSP00000289576
MKILVALAVFFLVSTQLFAEEIGANDDLNYWSDWYDSDQIKEELPEPFEHLLQRIARRPKPQQFFGLMGKRDADSSIEKQVALLKALYGHGQISHKMAYERSAMQNYERRR

SEQ ID NO: 86511 - protein, 129 aa, Homo sapiens
  Payload ID: 17318
  Gene Symbol: TAC1
  Gene Name: tachykinin, precursor 1
  Uniprot ID: P20366
  ENSP ID: ENSP00000321106
MKILVALAVFFLVSTQLFAEEIGANDDLNYWSDWYDSDQIKEELPEPFEHLLQRIARRPKPQQFFGLMGKRDADSSIEKQVALLKALYGHGQISHKRHKTDSFVGLMGKRALNSVAYERSAMQNYERRR

SEQ ID NO: 86512 - protein, 1826 aa, Homo sapiens
  Payload ID: 17319
  Gene Symbol: TAF1L
  Gene Name: TAF1 RNA polymerase II, TATA box binding protein (TBP)-associated factor, 210kDa-like
  Uniprot ID: Q8IZX4
  ENSP ID: ENSP00000418379
MRPGCDLLLRAAATVTAAIMSDSDSEEDSSGGGPFTLAGILFGNISGAGQLEGESVLDDECKKHLAGLGALGLGSLITELTANEELTGTGGALVNDEGWIRSTEDAVDYSDINEVAEDESQRHQQTMGSLQPLYHSDYDEDDYDADCEDIDCKLMPPPPPPPGPMKKDKDQDAITCVSESGEDIILPSIIAPSFLASEKVDFSSYSDSESEMGPQEATQAESEDGKLTLPLAGIMQHDATKLLPSVTELFPEFRPGKVLRFLHLFGPGKNVPSVWRSARRKRKKHRELIQEEQIQEVECSVESEVSQKSLWNYDYAPPPPPEQCLADDEITMMVPVESKFSQSTGDVDKVTDTKPRVAEWRYGPARLWYDMLGVSEDGSGFDYGFKLRKTQHEPVIKSRMMEEFRKLEESNGTDLLADENFLMVTQLHWEDSIIWDGEDIKHKGTKPQGASLAGWLPSIKTRNVMAYNVQQGFAPTLDDDKPWYSIFPIDNEDLVYGRWEDNIIWDAQAMPRLLEPPVLALDPNDENLILEIPDEKEEATSNSPSKESKKESSLKKSRILLGKTGVIREEPQQNMSQPEVKDPWNLSNDEYYFPKQQGLRGTFGGNIIQHSIPAMELWQPFFPTHMGPIKIRQFHRPPLKKYSFGALSQPGPHSVQPLLKHIKKKAKMREQERQASGGGELFFMRTPQDLTGKDGDLILAEYSEENGPLMMQVGMATKIKNYYKRKPGKDPGAPDCKYGETVYCHTSPFLGSLHPGQLLQALENNLFRAPVYLHKMPETDFLIIRTRQGYYIRELVDIFVVGQQCPLFEVPGPNSRRANMHIRDFLQVFIYRLFWKSKDRPRRIRMEDIKKAFPSHSESSIRKRLKLCADFKRTGMDSNWWVLKSDFRLPTEEEIRAKVSPEQCCAYYSMIAAKQRLKDAGYGEKSFFAPEEENEEDFQMKIDDEVHAAPWNTTRAFIAAMKGKCLLEVTGVADPTGCGEGFSYVKIPNKPTQQKDDKEPQAVKKTVTGTDADLRRLSLKNAKQLLRKFGVPEEEIKKLSRWEVIDVVRTMSTEQAHSGEGPMSKFARGSRFSVAEHQERYKEECQRIFDLQNKVLSSTEVLSTDTDSISAEDSDFEEMGKNIENMLQNKKTSSQLSREWEEQERKELRRMLLVAGSAASGNNHRDDVTASMTSLKSSATGHCLKIYRTFRDEEGKEYVRCETVRKPAVIDAYVRIRTTKDEKFIQKFALFDEKHREEMRKERRRIQEQLRRLKRNQEKEKLKGPPEKKPKKMKERPDLKLKCGACGAIGHMRTNKFCPLYYQTNVPPSKPVAMTEEQEEELEKTVIHNDNEELIKVEGTKIVFGKQLIENVHEVRRKSLVLKFPKQQLPPKKKRRVGTTVHCDYLNIPHKSIHRRRTDPMVTLSSILESIINDMRDLPNTHPFHTPVNAKVVKDYYKIITRPMDLQTLRENVRKCLYPSREEFREHLELIVKNSATYNGPKHSLTQISQSMLDLCDEKLKEKEDKLARLEKAINPLLDDDDQVAFSFILDNIVTQKMMAVPDSWPFHHPVNKKFVPDYYKMIVNPVDLETIRKNISKHKYQSRESFLDDVNLILANSVKYNGPESQYTKTAQEIVNICYQTITEYDEHLTQLEKDICTAKEAALEEAELESLDPMTPGPYTSQPPDMYDTNTSLSTSRDASVFQDESNLSVLDISTATPEKQMCQGQGRLGEEDSDVDVEGYDDEEEDGKPKPPAPEGGDGDLADEEEGTVQQPEASVLYEDLLISEGEDDEEDAGSDEEGDNPFSAIQLSESGSDSDVGYGGIRPKQPFMLQHASGEHKDGHGK

SEQ ID NO: 86513 - protein, 1893 aa, Homo sapiens
  Payload ID: 17320
  Gene Symbol: TAF1
  Gene Name: TAF1 RNA polymerase II, TATA box binding protein (TBP)-associated factor, 250kDa
  Uniprot ID: P21675
  ENSP ID: ENSP00000276072
MGPGCDLLLRTAATITAAAIMSDTDSDEDSAGGGPFSLAGFLFGNINGAGQLEGESVLDDECKKHLAGLGALGLGSLITELTANEELTGTDGALVNDEGWVRSTEDAVDYSDINEVAEDESRRYQQTMGSLQPLCHSDYDEDDYDADCEDIDCKLMPPPPPPPGPMKKDKDQDSITGVSENGEGIILPSIIAPSSLASEKVDFSSSSDSESEMGPQEATQAESEDGKLTLPLAGIMQHDATKLLPSVTELFPEFRPGKVLRFLRLFGPGKNVPSVWRSARRKRKKKHRELIQEEQIQEVECSVESEVSQKSLWNYDYAPPPPPEQCLSDDEITMMAPVESKFSQSTGDIDKVTDTKPRVAEWRYGPARLWYDMLGVPEDGSGFDYGFKLRKTEHEPVIKSRMIEEFRKLEENNGTDLLADENFLMVTQLHWEDDIIWDGEDVKHKGTKPQRASLAGWLPSSMTRNAMAYNVQQGFAATLDDDKPWYSIFPIDNEDLVYGRWEDNIIWDAQAMPRLLEPPVLTLDPNDENLILEIPDEKEEATSNSPSKESKKESSLKKSRILLGKTGVIKEEPQQNMSQPEVKDPWNLSNDEYYYPKQQGLRGTFGGNIIQHSIPAVELRQPFFPTHMGPIKLRQFHRPPLKKYSFGALSQPGPHSVQPLLKHIKKKAKMREQERQASGGGEMFFMRTPQDLTGKDGDLILAEYSEENGPLMMQVGMATKIKNYYKRKPGKDPGAPDCKYGETVYCHTSPFLGSLHPGQLLQAFENNLFRAPIYLHKMPETDFLIIRTRQGYYIRELVDIFVVGQQCPLFEVPGPNSKRANTHIRDFLQVFIYRLFWKSKDRPRRIRMEDIKKAFPSHSESSIRKRLKLCADFKRTGMDSNWWVLKSDFRLPTEEEIRAMVSPEQCCAYYSMIAAEQRLKDAGYGEKSFFAPEEENEEDFQMKIDDEVRTAPWNTTRAFIAAMKGKCLLEVTGVADPTGCGEGFSYVKIPNKPTQQKDDKEPQPVKKTVTGTDADLRRLSLKNAKQLLRKFGVPEEEIKKLSRWEVIDVVRTMSTEQARSGEGPMSKFARGSRFSVAEHQERYKEECQRIFDLQNKVLSSTEVLSTDTDSSSAEDSDFEEMGKNIENMLQNKKTSSQLSREREEQERKELQRMLLAAGSAASGNNHRDDDTASVTSLNSSATGRCLKIYRTFRDEEGKEYVRCETVRKPAVIDAYVRIRTTKDEEFIRKFALFDEQHREEMRKERRRIQEQLRRLKRNQEKEKLKGPPEKKPKKMKERPDLKLKCGACGAIGHMRTNKFCPLYYQTNAPPSNPVAMTEEQEEELEKTVIHNDNEELIKVEGTKIVLGKQLIESADEVRRKSLVLKFPKQQLPPKKKRRVGTTVHCDYLNRPHKSIHRRRTDPMVTLSSILESIINDMRDLPNTYPFHTPVNAKVVKDYYKIITRPMDLQTLRENVRKRLYPSREEFREHLELIVKNSATYNGPKHSLTQISQSMLDLCDEKLKEKEDKLARLEKAINPLLDDDDQVAFSFILDNIVTQKMMAVPDSWPFHHPVNKKFVPDYYKVIVNPMDLETIRKNISKHKYQSRESFLDDVNLILANSVKYNGPESQYTKTAQEIVNVCYQTLTEYDEHLTQLEKDICTAKEAALEEAELESLDPMTPGPYTPQPPDLYDTNTSLSMSRDASVFQDESNMSVLDIPSATPEKQVTQEGEDGDGDLADEEEGTVQQPQASVLYEDLLMSEGEDDEEDAGSDEEGDNPFSAIQLSESGSDSDVGSGGIRPKQPRMLQENTRMDMENEESMMSYEGDGGEASHGLEDSNISYGSYEEPDPKSNTQDTSFSSIGGYEVSEEEEDEEEEEQRSGPSVLSQVHLSEDEEDSEDFHSIAGDSDLDSDE

SEQ ID NO: 86514 - protein, 458 aa, Homo sapiens
  Payload ID: 17320
  Gene Symbol: TAF1
  Gene Name: TAF1 RNA polymerase II, TATA box binding protein (TBP)-associated factor, 250kDa
  ENSP ID: ENSP00000362880
  MOD_RES (1)..(1): Any amino acid
XKQQLPPKKKRRVGTTVHCDYLNRPHKSIHRRRTDPMVTLSSILESIINDMRDLPNTYPFHTPVNAKVVKDYYKIITRPMDLQTLRENVRKRLYPSREEFREHLELIVKNSATYNGPKHSLTQISQSMLDLCDEKLKEKEDKLARLEKAINPLLDDDDQVAFSFILDNIVTQKMMAVPDSWPFHHPVNKKFVPDYYKVIVNPMDLETIRKNISKHKYQSRESFLDDVNLILANSVKYNGPESQYTKTAQEIVNVCYQTLTEYDEHLTQLEKDICTAKEAALEEAELESLDPMTPGPYTPQAKPPDLYDTNTSLSMSRDASVFQDESNMSVLDIPSATPEKQVTQEGEDGDGDLADEEEGTVQQPQASVLYEDLLMSEGEDDEEDAGSDEEGDNPFSAIQLSESGSDSDVGSGGIRPKQPRMLQENTRMDMENEESMMSYEGDGGEASHGLEDSNIRYQ

SEQ ID NO: 86515 - protein, 1872 aa, Homo sapiens
  Payload ID: 17320
  Gene Symbol: TAF1
  Gene Name: TAF1 RNA polymerase II, TATA box binding protein (TBP)-associated factor, 250kDa
  Uniprot ID: P21675
  ENSP ID: ENSP00000362895
MGPGCDLLLRTAATITAAAIMSDTDSDEDSAGGGPFSLAGFLFGNINGAGQLEGESVLDDECKKHLAGLGALGLGSLITELTANEELTGTDGALVNDEGWVRSTEDAVDYSDINEVAEDESRRYQQTMGSLQPLCHSDYDEDDYDADCEDIDCKLMPPPPPPPGPMKKDKDQDSITGEKVDFSSSSDSESEMGPQEATQAESEDGKLTLPLAGIMQHDATKLLPSVTELFPEFRPGKVLRFLRLFGPGKNVPSVWRSARRKRKKKHRELIQEEQIQEVECSVESEVSQKSLWNYDYAPPPPPEQCLSDDEITMMAPVESKFSQSTGDIDKVTDTKPRVAEWRYGPARLWYDMLGVPEDGSGFDYGFKLRKTEHEPVIKSRMIEEFRKLEENNGTDLLADENFLMVTQLHWEDDIIWDGEDVKHKGTKPQRASLAGWLPSSMTRNAMAYNVQQGFAATLDDDKPWYSIFPIDNEDLVYGRWEDNIIWDAQAMPRLLEPPVLTLDPNDENLILEIPDEKEEATSNSPSKESKKESSLKKSRILLGKTGVIKEEPQQNMSQPEVKDPWNLSNDEYYYPKQQGLRGTFGGNIIQHSIPAVELRQPFFPTHMGPIKLRQFHRPPLKKYSFGALSQPGPHSVQPLLKHIKKKAKMREQERQASGGGEMFFMRTPQDLTGKDGDLILAEYSEENGPLMMQVGMATKIKNYYKRKPGKDPGAPDCKYGETVYCHTSPFLGSLHPGQLLQAFENNLFRAPIYLHKMPETDFLIIRTRQGYYIRELVDIFVVGQQCPLFEVPGPNSKRANTHIRDFLQVFIYRLFWKSKDRPRRIRMEDIKKAFPSHSESSIRKRLKLCADFKRTGMDSNWWVLKSDFRLPTEEEIRAMVSPEQCCAYYSMIAAEQRLKDAGYGEKSFFAPEEENEEDFQMKIDDEVRTAPWNTTRAFIAAMKGKCLLEVTGVADPTGCGEGFSYVKIPNKPTQQKDDKEPQPVKKTVTGTDADLRRLSLKNAKQLLRKFGVPEEEIKKLSRWEVIDVVRTMSTEQARSGEGPMSKFARGSRFSVAEHQERYKEECQRIFDLQNKVLSSTEVLSTDTDSSSAEDSDFEEMGKNIENMLQNKKTSSQLSREREEQERKELQRMLLAAGSAASGNNHRDDDTASVTSLNSSATGRCLKIYRTFRDEEGKEYVRCETVRKPAVIDAYVRIRTTKDEEFIRKFALFDEQHREEMRKERRRIQEQLRRLKRNQEKEKLKGPPEKKPKKMKERPDLKLKCGACGAIGHMRTNKFCPLYYQTNAPPSNPVAMTEEQEEELEKTVIHNDNEELIKVEGTKIVLGKQLIESADEVRRKSLVLKFPKQQLPPKKKRRVGTTVHCDYLNRPHKSIHRRRTDPMVTLSSILESIINDMRDLPNTYPFHTPVNAKVVKDYYKIITRPMDLQTLRENVRKRLYPSREEFREHLELIVKNSATYNGPKHSLTQISQSMLDLCDEKLKEKEDKLARLEKAINPLLDDDDQVAFSFILDNIVTQKMMAVPDSWPFHHPVNKKFVPDYYKVIVNPMDLETIRKNISKHKYQSRESFLDDVNLILANSVKYNGPESQYTKTAQEIVNVCYQTLTEYDEHLTQLEKDICTAKEAALEEAELESLDPMTPGPYTPQPPDLYDTNTSLSMSRDASVFQDESNMSVLDIPSATPEKQVTQEGEDGDGDLADEEEGTVQQPQASVLYEDLLMSEGEDDEEDAGSDEEGDNPFSAIQLSESGSDSDVGSGGIRPKQPRMLQENTRMDMENEESMMSYEGDGGEASHGLEDSNISYGSYEEPDPKSNTQDTSFSSIGGYEVSEEEEDEEEEEQRSGPSVLSQVHLSEDEEDSEDFHSIAGDSDLDSDE

SEQ ID NO: 86516 - protein, 490 aa, Homo sapiens
  Payload ID: 17320
  Gene Symbol: TAF1
  Gene Name: TAF1 RNA polymerase II, TATA box binding protein (TBP)-associated factor, 250kDa
  ENSP ID: ENSP00000406517
  MOD_RES (1)..(1): Any amino acid
XKQQLPPKKKRRVGTTVHCDYLNRPHKSIHRRRTDPMVTLSSILESIINDMRDLPNTYPFHTPVNAKVVKDYYKIITRPMDLQTLRENVRKRLYPSREEFREHLELIVKNSATYNGPKHSLTQISQSMLDLCDEKLKEKEDKLARLEKAINPLLDDDDQVAFSFILDNIVTQKMMAVPDSWPFHHPVNKKFVPDYYKVIVNPMDLETIRKNISKHKYQSRESFLDDVNLILANSVKYNGPESQYTKTAQEIVNVCYQTLTEYDEHLTQLEKDICTAKEAALEEAELESLDPMTPGPYTPQPPDLYDTNTSLSMSRDASVFQDESNMSVLDIPSATPEKQVTQMRQGRGRLGEEDSDVDIEGYDDEEEDGKPKTPAPEGEDGDGDLADEEEGTVQQPQASVLYEDLLMSEGEDDEEDAGSDEEGDNPFSAIQLSESGSDSDVGSGGIRPKQPRMLQENTRMDMENEESMMSYEGDGGEASHGLEDSNIRYQ

SEQ ID NO: 86517 - protein, 1895 aa, Homo sapiens
  Payload ID: 17320
  Gene Symbol: TAF1
  Gene Name: TAF1 RNA polymerase II, TATA box binding protein (TBP)-associated factor, 250kDa
  Uniprot ID: P21675
  ENSP ID: ENSP00000406549
MGPGCDLLLRTAATITAAAIMSDTDSDEDSAGGGPFSLAGFLFGNINGAGQLEGESVLDDECKKHLAGLGALGLGSLITELTANEELTGTDGALVNDEGWVRSTEDAVDYSDINEVAEDESRRYQQTMGSLQPLCHSDYDEDDYDADCEDIDCKLMPPPPPPPGPMKKDKDQDSITGVSENGEGIILPSIIAPSSLASEKVDFSSSSDSESEMGPQEATQAESEDGKLTLPLAGIMQHDATKLLPSVTELFPEFRPGKVLRFLRLFGPGKNVPSVWRSARRKRKKKHRELIQEEQIQEVECSVESEVSQKSLWNYDYAPPPPPEQCLSDDEITMMAPVESKFSQSTGDIDKVTDTKPRVAEWRYGPARLWYDMLGVPEDGSGFDYGFKLRKTEHEPVIKSRMIEEFRKLEENNGTDLLADENFLMVTQLHWEDDIIWDGEDVKHKGTKPQRASLAGWLPSSMTRNAMAYNVQQGFAATLDDDKPWYSIFPIDNEDLVYGRWEDNIIWDAQAMPRLLEPPVLTLDPNDENLILEIPDEKEEATSNSPSKESKKESSLKKSRILLGKTGVIKEEPQQNMSQPEVKDPWNLSNDEYYYPKQQGLRGTFGGNIIQHSIPAVELRQPFFPTHMGPIKLRQFHRPPLKKYSFGALSQPGPHSVQPLLKHIKKKAKMREQERQASGGGEMFFMRTPQDLTGKDGDLILAEYSEENGPLMMQVGMATKIKNYYKRKPGKDPGAPDCKYGETVYCHTSPFLGSLHPGQLLQAFENNLFRAPIYLHKMPETDFLIIRTRQGYYIRELVDIFVVGQQCPLFEVPGPNSKRANTHIRDFLQVFIYRLFWKSKDRPRRIRMEDIKKAFPSHSESSIRKRLKLCADFKRTGMDSNWWVLKSDFRLPTEEEIRAMVSPEQCCAYYSMIAAEQRLKDAGYGEKSFFAPEEENEEDFQMKIDDEVRTAPWNTTRAFIAAMKGKCLLEVTGVADPTGCGEGFSYVKIPNKPTQQKDDKEPQPVKKTVTGTDADLRRLSLKNAKQLLRKFGVPEEEIKKLSRWEVIDVVRTMSTEQARSGEGPMSKFARGSRFSVAEHQERYKEECQRIFDLQNKVLSSTEVLSTDTDSSSAEDSDFEEMGKNIENMLQNKKTSSQLSREREEQERKELQRMLLAAGSAASGNNHRDDDTASVTSLNSSATGRCLKIYRTFRDEEGKEYVRCETVRKPAVIDAYVRIRTTKDEEFIRKFALFDEQHREEMRKERRRIQEQLRRLKRNQEKEKLKGPPEKKPKKMKERPDLKLKCGACGAIGHMRTNKFCPLYYQTNAPPSNPVAMTEEQEEELEKTVIHNDNEELIKVEGTKIVLGKQLIESADEVRRKSLVLKFPKQQLPPKKKRRVGTTVHCDYLNRPHKSIHRRRTDPMVTLSSILESIINDMRDLPNTYPFHTPVNAKVVKDYYKIITRPMDLQTLRENVRKRLYPSREEFREHLELIVKNSATYNGPKHSLTQISQSMLDLCDEKLKEKEDKLARLEKAINPLLDDDDQVAFSFILDNIVTQKMMAVPDSWPFHHPVNKKFVPDYYKVIVNPMDLETIRKNISKHKYQSRESFLDDVNLILANSVKYNGPESQYTKTAQEIVNVCYQTLTEYDEHLTQLEKDICTAKEAALEEAELESLDPMTPGPYTPQAKPPDLYDTNTSLSMSRDASVFQDESNMSVLDIPSATPEKQVTQEGEDGDGDLADEEEGTVQQPQASVLYEDLLMSEGEDDEEDAGSDEEGDNPFSAIQLSESGSDSDVGSGGIRPKQPRMLQENTRMDMENEESMMSYEGDGGEASHGLEDSNISYGSYEEPDPKSNTQDTSFSSIGGYEVSEEEEDEEEEEQRSGPSVLSQVHLSEDEEDSEDFHSIAGDSDLDSDE

SEQ ID NO: 86518 - protein, 150 aa, Homo sapiens
  Payload ID: 17320
  Gene Symbol: TAF1
  Gene Name: TAF1 RNA polymerase II, TATA box binding protein (TBP)-associated factor, 250kDa
  ENSP ID: ENSP00000421611
  MOD_RES (1)..(1): Any amino acid
XVRRKSLVLKFPKQQLPPKKKRRVGTTVHCDYLNRPHKSIHRRRTDPMVTLSSILESIINDMRDLPNTYPFHTPVNAKVVKDYYKIITRPMDLQTLRENVRKRLYPSREEFREHLELIVKNSATYNGIGIRIKHTRSIEKGHSHHHLPRE

SEQ ID NO: 86519 - protein, 279 aa, Homo sapiens
  Payload ID: 17320
  Gene Symbol: TAF1
  Gene Name: TAF1 RNA polymerase II, TATA box binding protein (TBP)-associated factor, 250kDa
  ENSP ID: ENSP00000424526
  MOD_RES (1)..(1): Any amino acid
XSSAEDSDFEEMGKNIENMLQNKKTSSQLSREREEQERKELQRMLLAGSAASGNNHRDDDTASVTSLNSSATGRCLKIYRTFRDEEGKEYVRCETVRKPAVIDAYVRIRTTKDEEFIRKFALFDEQHREEMRKERRRIQEQLRRLKRNQEKEKLKGPPEKKPKKMKERPDLKLKCGACGAIGHMRTNKFCPLYYQTNAPPSNPVAMTEEQEEELEKTVIHNDNEELIKVEGTKIVLGKQLIESADEVRRKSLVLKFPKQQLPPKKKRRVGTTVHCDYLN

SEQ ID NO: 86520 - protein, 218 aa, Homo sapiens
  Payload ID: 17321
  Gene Symbol: TAF10
  Gene Name: TAF10 RNA polymerase II, TATA box binding protein (TBP)-associated factor, 30kDa
  Uniprot ID: Q12962
  ENSP ID: ENSP00000299424
MSCSGSGADPEAAPASAASAPGPAPPVSAPAALPSSTAAENKASPAGTAGGPGAGAAAGGTGPLAARAGEPAERRGAAPVSAGGAAPPEGAISNGVYVLPSAANGDVKPVVSSTPLVDFLMQLEDYTPTIPDAVTGYYLNRAGFEASDPRIIRLISLAAQKFISDIANDALQHCKMKGTASGSSRSKSKDRKYTLTMEDLTPALSEYGINVKKPHYFT

SEQ ID NO: 86521 - protein, 115 aa, Homo sapiens
  Payload ID: 17321
  Gene Symbol: TAF10
  Gene Name: TAF10 RNA polymerase II, TATA box binding protein (TBP)-associated factor, 30kDa
  ENSP ID: ENSP00000480402
AASAPGPAPPVSAPAALPSSTAAENKIPDAVTGYYLNRAGFEASDPRIIRLISLAAQKFISDIANDALQHCKMKGTASGSSRSKSKDRKYTLTMEDLTPALSEYGINVKKPHYFT

SEQ ID NO: 86522 - protein, 211 aa, Homo sapiens
  Payload ID: 17322
  Gene Symbol: TAF11
  Gene Name: TAF11 RNA polymerase II, TATA box binding protein (TBP)-associated factor, 28kDa
  Uniprot ID: Q15544
  ENSP ID: ENSP00000354633
MDDAHESPSDKGGETGESDETAAVPGDPGATDTDGIPEETDGDADVDLKEAAAEEGELESQDVSDLTTVEREDSSLLNPAAKKLKIDTKEKKEKKQKVDEDEIQKMQILVSSFSEEQLNRYEMYRRSAFPKAAIKRLIQSITGTSVSQNVVIAMSGISKVFVGEVVEEALDVCEKWGEMPPLQPKHMREAVRRLKSKGQIPNSKHKKIIFF

SEQ ID NO: 86523 - protein, 154 aa, Homo sapiens
  Payload ID: 17322
  Gene Symbol: TAF11
  Gene Name: TAF11 RNA polymerase II, TATA box binding protein (TBP)-associated factor, 28kDa
  Uniprot ID: Q15544
  ENSP ID: ENSP00000408121
MDDAHESPSDKGGETGESDETAAVPGDPGATDTDGIPEETDGDADVDLKEAAAEEGELESQDVSDLTTVEREDSSLLNPAAKKLKIDTKEKKEKKQKVDEDEIQKMQILVSSFSEEQLNRYEMYRRSAFPKAAIKRHWMCVRSGEKCHHYNPNI

SEQ ID NO: 86524 - protein, 161 aa, Homo sapiens
  Payload ID: 17323
  Gene Symbol: TAF12
  Gene Name: TAF12 RNA polymerase II, TATA box binding protein (TBP)-associated factor, 20kDa
  Uniprot ID: Q16514
  ENSP ID: ENSP00000263974
MNQFGPSALINLSNFSSIKPEPASTPPQGSMANSTAVVKIPGTPGAGGRLSPENNQVLTKKKLQDLVREVDPNEQLDEDVEEMLLQIADDFIESVVTAACQLARHRKSSTLEVKDVQLHLERQWNMWIPGFGSEEIRPYKKACTTEAHKQRMALIRKTTKK

SEQ ID NO: 86525 - protein, 161 aa, Homo sapiens; identical to SEQ ID NO: 86524
  Payload ID: 17323
  Gene Symbol: TAF12
  Gene Name: TAF12 RNA polymerase II, TATA box binding protein (TBP)-associated factor, 20kDa
  Uniprot ID: Q16514
  ENSP ID: ENSP00000362930

SEQ ID NO: 86526 - protein, 124 aa, Homo sapiens
  Payload ID: 17324
  Gene Symbol: TAF13
  Gene Name: TAF13 RNA polymerase II, TATA box binding protein (TBP)-associated factor, 18kDa
  Uniprot ID: Q15543
  ENSP ID: ENSP00000355051
MADEEEDPTFEEENEEIGGGAEGGQGKRKRLFSKELRCMMYGFGDDQNPYTESVDILEDLVIEFITEMTHKAMSIGRQGRVQVEDIVFLIRKDPRKFARVKDLLTMNEELKRARKAFDEANYGS

SEQ ID NO: 86527 - protein, 124 aa, Homo sapiens; identical to SEQ ID NO: 86526
  Payload ID: 17324
  Gene Symbol: TAF13
  Gene Name: TAF13 RNA polymerase II, TATA box binding protein (TBP)-associated factor, 18kDa
  Uniprot ID: Q15543
  ENSP ID: ENSP00000433883

SEQ ID NO: 86528 - protein, 102 aa, Homo sapiens
  Payload ID: 17325
  Gene Symbol: TAF15
  Gene Name: TAF15 RNA polymerase II, TATA box binding protein (TBP)-associated factor, 68kDa
  ENSP ID: ENSP00000474047
SGGYGGDRSGGGYGGDRGGGYGGDRGGYGGKMGGRSSCSSKRPRTWDGSCCTVVAVSLLDLTRHPSTPGSLVCAHMPHISDPVSFFPELQQFSDSPPAVVPP

SEQ ID NO: 86529 - protein, 592 aa, Homo sapiens
  Payload ID: 17325
  Gene Symbol: TAF15
  Gene Name: TAF15 RNA polymerase II, TATA box binding protein (TBP)-associated factor, 68kDa
  Uniprot ID: Q92804
  ENSP ID: ENSP00000474096
MSDSGSYGQSGGEQQSYSTYGNPGSQGYGQASQSYSGYGQTTDSSYGQNYSGYSSYGQSQSGYSQSYGGYENQKQSSYSQQPYNNQGQQQNMESSGSQGGRAPSYDQPDYGQQDSYDQQSGYDQHQGSYDEQSNYDQQHDSYSQNQQSYHSQRENYSHHTQDDRRDVSRYGEDNRGYGGSQGGGRGRGGYDKDGRGPMTGSSGGDRGGFKNFGGHRDYGPRTDADSESDNSDNNTIFVQGLGEGVSTDQVGEFFKQIGIIKTNKKTGKPMINLYTDKDTGKPKGEATVSFDDPPSAKAAIDWFDGKEFHGNIIKVSFATRRPEFMRGGGSGGGRRGRGGYRGRGGFQGRGGDPKSGDWVCPNPSCGNMNFARRNSCNQCNEPRPEDSRPSGGDFRGRGYGGERGYRGRGGRGGDRGGYGGDRSGGGYGGDRSSGGGYSGDRSGGGYGGDRSGGGYGGDRGGGYGGDRGGGYGGDRGGGYGGDRGGYGGDRGGGYGGDRGGYGGDRGGYGGDRGGYGGDRGGYGGDRSRGGYGGDRGGGSGYGGDRSGGYGGDRSGGGYGGDRGGGYGGDRGGYGGKMGGRNDYRNDQRNRPY

SEQ ID NO: 86530 - protein, 32 aa, Homo sapiens
  Payload ID: 17325
  Gene Symbol: TAF15
  Gene Name: TAF15 RNA polymerase II, TATA box binding protein (TBP)-associated factor, 68kDa
  ENSP ID: ENSP00000474436
MESSGSQGGRAPSYDQPDYGQQDSYDQQSGYD

SEQ ID NO: 86531 - protein, 449 aa, Homo sapiens
  Payload ID: 17325
  Gene Symbol: TAF15
  Gene Name: TAF15 RNA polymerase II, TATA box binding protein (TBP)-associated factor, 68kDa
  ENSP ID: ENSP00000474522
MESSGSQGGRAPSYDQPDYGQQDSYDQQSGYDQHQGSYDEQSNYDQQHDSYSQNQQSYHSQRENYSHHTQDDRRDVSRYGEDNRGYGGSQGGGRGRGGYDKDGRGPMTGSSGGDRGGFKNFGGHRDYGPRTDADSESDNSDNNTIFVQGLGEGVSTDQVGEFFKQIGIIKTNKKTGKPMINLYTDKDTGKPKGEATVSFDDPPSAKAAIDWFDGKEFHGNIIKVSFATRRPEFMRGGGSGGGRRGRGGYRGRGGFQGRGGDPKSGDWVCPNPSCGNMNFARRNSCNQCNEPRPEDSRPSGGDFRGRGYGGERGYRGRGGRGGDRGGYGGDRTGGAMEETVVVAVATVETEVEAMEETGVVAAMEETEVGATEETEVAMEAKWEEETTTEMISATDHTDDCFECSFVSDMIHSEIARVLPAAFLVASSWVVKLSDIWIFIWVGGLGQFFF

SEQ ID NO: 86532 - protein, 589 aa, Homo sapiens
  Payload ID: 17325
  Gene Symbol: TAF15
  Gene Name: TAF15 RNA polymerase II, TATA box binding protein (TBP)-associated factor, 68kDa
  Uniprot ID: Q92804
  ENSP ID: ENSP00000474609
MSDSGSYGQSGGEQQSYSTYGNPGSQGYGQASQSYSGYGQTTDSSYGQNYSGYSSYGQSYSQSYGGYENQKQSSYSQQPYNNQGQQQNMESSGSQGGRAPSYDQPDYGQQDSYDQQSGYDQHQGSYDEQSNYDQQHDSYSQNQQSYHSQRENYSHHTQDDRRDVSRYGEDNRGYGGSQGGGRGRGGYDKDGRGPMTGSSGGDRGGFKNFGGHRDYGPRTDADSESDNSDNNTIFVQGLGEGVSTDQVGEFFKQIGIIKTNKKTGKPMINLYTDKDTGKPKGEATVSFDDPPSAKAAIDWFDGKEFHGNIIKVSFATRRPEFMRGGGSGGGRRGRGGYRGRGGFQGRGGDPKSGDWVCPNPSCGNMNFARRNSCNQCNEPRPEDSRPSGGDFRGRGYGGERGYRGRGGRGGDRGGYGGDRSGGGYGGDRSSGGGYSGDRSGGGYGGDRSGGGYGGDRGGGYGGDRGGGYGGDRGGGYGGDRGGYGGDRGGGYGGDRGGYGGDRGGYGGDRGGYGGDRGGYGGDRSRGGYGGDRGGGSGYGGDRSGGYGGDRSGGGYGGDRGGGYGGDRGGYGGKMGGRNDYRNDQRNRPY

SEQ ID NO: 86533 - protein, 121 aa, Homo sapiens
  Payload ID: 17325
  Gene Symbol: TAF15
  Gene Name: TAF15 RNA polymerase II, TATA box binding protein (TBP)-associated factor, 68kDa
  ENSP ID: ENSP00000474653
MESSGSQGGRAPSYDQPDYGQQDSYDQQSGYDQHQGSYDEQSNYDQQHDSYSQNQQSYHSQRENYSHHTQDDRRDVSRYGEDNRGYGGSQGGGRGRGGYDKDGRGPMTGSRSQGLWTQNRC

SEQ ID NO: 86534 - protein, 239 aa, Homo sapiens
  Payload ID: 17325
  Gene Symbol: TAF15
  Gene Name: TAF15 RNA polymerase II, TATA box binding protein (TBP)-associated factor, 68kDa
  ENSP ID: ENSP00000475044
MSDSGSYGQSGGEQQSYSTYGNPGSQGYGQASQSYSGYGQTTDSSYGQNYSGYSSYGQSYSQSYGGYENQKQSSYSQQPYNNQGQQQNMESSGSQGGRAPSYDQPDYGQQDSYDQQSGYDQHQGSYDEQSNYDQQHDSYSQNQQSYHSQRENYSHHTQDDRRDVSRYGEDNRGYGGSQGGGRGRGGYDKDGRGPMTGSSGGDRGGFKNFGGHRDYGPRTDADSESDNSDNNTIFVQGLG

SEQ ID NO: 86535 - protein, 214 aa, Homo sapiens
  Payload ID: 17325
  Gene Symbol: TAF15
  Gene Name: TAF15 RNA polymerase II, TATA box binding protein (TBP)-associated factor, 68kDa
  ENSP ID: ENSP00000475147
  MOD_RES (1)..(1): Any amino acid
XRGGYRGRGGFQGRGGDPKSGDWVCPNPSCGNMNFARRNSCNQCNEPRPEDSRPSGGDFRGRGYGGERGYRGRGGRGGDRGGYGGDRSGGGYGGDRSSGGGYSGDRSGGGYGGDRSGGGYGGDRGGGYGGDRGGGYGGDRGGGYGGDRSRGGYGGDRGGGSGYGGDRSGGYGGDRSGGGYGGDRGGGYGGDRGGYGGKMGGRNDYRNDQRNRPY

SEQ ID NO: 86536 - protein, 592 aa, Homo sapiens; identical to SEQ ID NO: 86529
  Payload ID: 17325
  Gene Symbol: TAF15
  Gene Name: TAF15 RNA polymerase II, TATA box binding protein (TBP)-associated factor, 68kDa
  Uniprot ID: Q92804
  ENSP ID: ENSP00000480040

SEQ ID NO: 86537 - protein, 32 aa, Homo sapiens; identical to SEQ ID NO: 86530
  Payload ID: 17325
  Gene Symbol: TAF15
  Gene Name: TAF15 RNA polymerase II, TATA box binding protein (TBP)-associated factor, 68kDa
  ENSP ID: ENSP00000487917

SEQ ID NO: 86538 - protein, 121 aa, Homo sapiens; identical to SEQ ID NO: 86533
  Payload ID: 17325
  Gene Symbol: TAF15
  Gene Name: TAF15 RNA polymerase II, TATA box binding protein (TBP)-associated factor, 68kDa
  ENSP ID: ENSP00000487975

SEQ ID NO: 86539 - protein, 102 aa, Homo sapiens; identical to SEQ ID NO: 86528
  Payload ID: 17325
  Gene Symbol: TAF15
  Gene Name: TAF15 RNA polymerase II, TATA box binding protein (TBP)-associated factor, 68kDa
  ENSP ID: ENSP00000488590

SEQ ID NO: 86540 - protein, 214 aa, Homo sapiens; identical to SEQ ID NO: 86535
  Payload ID: 17325
  Gene Symbol: TAF15
  Gene Name: TAF15 RNA polymerase II, TATA box binding protein (TBP)-associated factor, 68kDa
  ENSP ID: ENSP00000488608
  MOD_RES (1)..(1): Any amino acid

SEQ ID NO: 86541 - protein, 239 aa, Homo sapiens; identical to SEQ ID NO: 86534
  Payload ID: 17325
  Gene Symbol: TAF15
  Gene Name: TAF15 RNA polymerase II, TATA box binding protein (TBP)-associated factor, 68kDa
  ENSP ID: ENSP00000488655

SEQ ID NO: 86542 - protein, 589 aa, Homo sapiens; identical to SEQ ID NO: 86532
  Payload ID: 17325
  Gene Symbol: TAF15
  Gene Name: TAF15 RNA polymerase II, TATA box binding protein (TBP)-associated factor, 68kDa
  Uniprot ID: Q92804
  ENSP ID: ENSP00000488684

SEQ ID NO: 86543 - protein, 449 aa, Homo sapiens; identical to SEQ ID NO: 86531
  Payload ID: 17325
  Gene Symbol: TAF15
  Gene Name: TAF15 RNA polymerase II, TATA box binding protein (TBP)-associated factor, 68kDa
  ENSP ID: ENSP00000488803

SEQ ID NO: 86544 - protein, 1199 aa, Homo sapiens
  Payload ID: 17326
  Gene Symbol: TAF2
  Gene Name: TAF2 RNA polymerase II, TATA box binding protein (TBP)-associated factor, 150kDa
  Uniprot ID: Q6P1X5
  ENSP ID: ENSP00000367406
MPLTGVEPARMNRKKGDKGFESPRPYKLTHQVVCINNINFQRKSVVGFVELTIFPTVANLNRIKLNSKQCRIYRVRINDLEAAFIYNDPTLEVCHSESKQRNLNYFSNAYAAAVSAVDPDAGNGELCIKVPSELWKHVDELKVLKIHINFSLDQPKGGLHFVVPSVEGSMAERGAHVFSCGYQNSTRFWFPCVDSYSELCTWKLEFTVDAAMVAVSNGDLVETVYTHDMRKKTFHYMLTIPTAASNISLAIGPFEILVDPYMHEVTHFCLPQLLPLLKHTTSYLHEVFEFYEEILTCRYPYSCFKTVFIDEAYVEVAAYASMSIFSTNLLHSAMIIDETPLTRRCLAQSLAQQFFGCFISRMSWSDEWVLKGISGYIYGLWMKKTFGVNEYRHWIKEELDKIVAYELKTGGVLLHPIFGGGKEKDNPASHLHFSIKHPHTLSWEYYSMFQCKAHLVMRLIENRISMEFMLQVFNKLLSLASTASSQKFQSHMWSQMLVSTSGFLKSISNVSGKDIQPLIKQWVDQSGVVKFYGSFAFNRKRNVLELEIKQDYTSPGTQKYVGPLKVTVQELDGSFNHTLQIEENSLKHDIPCHSKSRRNKKKKIPLMNGEEVDMDLSAMDADSPLLWIRIDPDMSVLRKVEFEQADFMWQYQLRYERDVVAQQESILALEKFPTPASRLALTDILEQEQCFYRVRMSACFCLAKIANSMVSTWTGPPAMKSLFTRMFCCKSCPNIVKTNNFMSFQSYFLQKTMPVAMALLRDVHNLCPKEVLTFILDLIKYNDNRKNKFSDNYYRAEMIDALANSVTPAVSVNNEVRTLDNLNPDVRLILEEITRFLNMEKLLPSYRHTITVSCLRAIRVLQKNGHVPSDPALFKSYAEYGHFVDIRIAALEAVVDYTKVDRSYEELQWLLNMIQNDPVPYVRHKILNMLTKNPPFTKNMESPLCNEALVDQLWKLMNSGTSHDWRLRCGAVDLYFTLFGLSRPSCLPLPELGLVLNLKEKKAVLNPTIIPESVAGNQEAANNPSSHPQLVGFQNPFSSSQDEEEIDMDTVHDSQAFISHHLNMLERPSTPGLSKYRPASSRSALIPQHSAGCDSTPTTKPQWSLELARKGTGKEQAPLEMSMHPAASAPLSVFTKESTASKHSDHHHHHHHEHKKKKKKHKHKHKHKHKHDSKEKDKEPFTFSSPASGRSIRSPSLSD

SEQ ID NO: 86545 - protein, 60 aa, Homo sapiens
  Payload ID: 17326
  Gene Symbol: TAF2
  Gene Name: TAF2 RNA polymerase II, TATA box binding protein (TBP)-associated factor, 150kDa
  ENSP ID: ENSP00000428484
MPLTGVEPARMNRKKGDKGFESPRPYKLTHQVVCINNINFQRKSVVEKPQLFFQCLCSCS

SEQ ID NO: 86546 - protein, 67 aa, Homo sapiens
  Payload ID: 17326
  Gene Symbol: TAF2
  Gene Name: TAF2 RNA polymerase II, TATA box binding protein (TBP)-associated factor, 150kDa
  ENSP ID: ENSP00000428690
  MOD_RES (1)..(1): Any amino acid
XNEVRTLDNLNPDVRLILEEITRFLNMEKLLPSYRHTITVRLECSGAILAHHNLHLLGSSDSPASAS

SEQ ID NO: 86547 - protein, 285 aa, Homo sapiens
  Payload ID: 17326
  Gene Symbol: TAF2
  Gene Name: TAF2 RNA polymerase II, TATA box binding protein (TBP)-associated factor, 150kDa
  ENSP ID: ENSP00000430832
  MOD_RES (1)..(1): Any amino acid
XPQLLPLLKHTTSYLHEVFEFYEEILTCRYPYSCFKTVFIDEAYVEVAAYASMSIFRSDEWVLKGISGYIYGLWMKKTFGVNEYRHWIKEELDKIVAYELKTGGVLLHPIFGGGKEKDNPASHLHFSIKHPHTLSWEYYSMFQCKAHLVMRLIENRISMEFMLQVFNKLLSLASTASSQKFQSHMWSQMLVSTSGFLKSISNVSGKDIQPLIKQWVDQSGVVKFYGSFAFNRKRNVLELEIKQDYTSPGTQKYVGPLKVTVQELDGSFNHTLQIEENSLKHDIPC

SEQ ID NO: 86548 - protein, 375 aa, Homo sapiens [sequence omitted]

SEQ ID NO: 86549 - protein, 929 aa, Homo sapiens
  Payload ID: 17327
  Gene Symbol: TAF3
  Gene Name: TAF3 RNA polymerase II, TATA box binding protein (TBP)-associated factor, 140kDa
  Uniprot ID: Q5VWG9
  ENSP ID: ENSP00000340271
MCESYSRSLLRVSVAQICQALGWDSVQLSACHLLTDVLQRYLQQLGRGCHRYSELYGRTDPILDDVGEAFQLMGVSLHELEDYIHNIEPVTFPHQIPSFPVSKNNVLQFPQPGSKDAEERKEYIPDYLPPIVSSQEEEEEEQVPTDGGTSAEAMQVPLEEDDELEEEEIINDENFLGKRPLDSPEAEELPAMKRPRLLSTKGDTLDVVLLEAREPLSSINTQKIPPMLSPVHVQDSTDLAPPSPEPPMLAPVAKSQMPTAKPLETKSFTPKTKTKTSSPGQKTKSPKTAQSPAMVGSPIRSPKTVSKEKKSPGRSKSPKSPKSPKVTTHIPQTPVRPETPNRTPSATLSEKISKETIQVKQIQTPPDAGKLNSENQPKKAVVADKTIEASIDAVIARACAEREPDPFEFSSGSESEGDIFTSPKRISGPECTTPKASTSANNFTKSGSTPLPLSGGTSSSDNSWTMDASIDEVVRKAKLGTPSNMPPNFPYISSPSVSPPTPEPLHKVYEEKTKLPSSVEVKKKLKKELKTKMKKKEKQRDREREKDKNKDKSKEKDKVKEKEKDKETGRETKYPWKEFLKEEEADPYKFKIKEFEDVDPKVKLKDGLVRKEKEKHKDKKKDREKGKKDKDKREKEKVKDKGREDKMKAPAPPLVLPPKELALPLFSPATASRVPAMLPSLLPVLPEKLFEEKEKVKEKEKKKDKKEKKKKKEKEKEKKEKEREKEKREREKREKEKEKHKHEKIKVEPVALAPSPVIPRLTLRVGAGQDKIVISKVVPAPEAKPAPSQNRPKTPPPAPAPAPGPMLVSPAPVPLPLLAQAAAGPALLPSPGPAASGASAKAPVRSVVTETVSTYVIRDEWGNQIWICPGCNKPDDGSPMIGCDDCDDWYHWPCVGIMTAPPEEMQWFCPKCANKKKDKKHKKRKHRAH

SEQ ID NO: 86550 - protein, 1085 aa, Homo sapiens
  Payload ID: 17328
  Gene Symbol: TAF4
  Gene Name: TAF4 RNA polymerase II, TATA box binding protein (TBP)-associated factor, 135kDa
  Uniprot ID: O00268
  ENSP ID: ENSP00000252996
MAAGSDLLDEVFFNSEVDEKVVSDLVGSLESQLAASAAHHHHLAPRTPEVRAAAAGALGNHVVSGSPAGAAGAGPAAPAEGAPGAAPEPPPAGRARPGGGGPQRPGPPSPRRPLVPAGPAPPAAKLRPPPEGSAGSCAPVPAAAAVAAGPEPAPAGPAKPAGPAALAARAGPGPGPGPGPGPGPGPGKPAGPGAAQTLNGSAALLNSHHAAAPAVSLVNNGPAALLPLPKPAAPGTVIQTPPFVGAAAPPAPAAPSPPAAPAPAAPAAAPPPPPPAPATLARPPGHPAGPPTAAPAVPPPAAAQNGGSAGAAPAPAPAAGGPAGVSGQPGPGAAAAAPAPGVKAESPKRVVQAAPPAAQTLAASGPASTAASMVIGPTMQGALPSPAAVPPPAPGTPTGLPKGAAGAVTQSLSRTPTATTSGIRATLTPTVLAPRLPQPPQNPTNIQNFQLPPGMVLVRSENGQLLMIPQQALAQMQAQAHAQPQTTMAPRPATPTSAPPVQISTVQAPGTPIIARQVTPTTIIKQVSQAQTTVQPSATLQRSPGVQPQLVLGGAAQTASLGTATAVQTGTPQRTVPGATTTSSAATETMENVKKCKNFLSTLIKLASSGKQSTETAANVKELVQNLLDGKIEAEDFTSRLYRELNSSPQPYLVPFLKRSLPALRQLTPDSAAFIQQSQQQPPPPTSQATTALTAVVLSSSVQRTAGKTAATVTSALQPPVLSLTQPTQVGVGKQGQPTPLVIQQPPKPGALIRPPQVTLTQTPMVALRQPHNRIMLTTPQQIQLNPLQPVPVVKPAVLPGTKALSAVSAQAAAAQKNKLKEPGGGSFRDDDDINDVASMAGVNLSEESARILATNSELVGTLTRSCKDETFLLQAPLQRRILEIGKKHGITELHPDVVSYVSHATQQRLQNLVEKISETAQQKNFSYKDDDRYEQASDVRAQLKFFEQLDQIEKQRKDEQEREILMRAAKSRSRQEDPEQLRLKQKAKEMQQQELAQMRQRDANLTALAAIGPRKKRKVDCPGPGSGAEGSGPGSVVPGSSGVGTPRQFTRQRITRVNLRDLIFCLENERETSHSLLLYKAFLK

SEQ ID NO: 86551 - protein, 79 aa, Homo sapiens
  Payload ID: 17328
  Gene Symbol: TAF4
  Gene Name: TAF4 RNA polymerase II, TATA box binding protein (TBP)-associated factor, 135kDa
  ENSP ID: ENSP00000476270
  MOD_RES (1)..(1): Any amino acid
XSRQEDPEQLRLKQKAKEMQQQELAQMRQRDANLTALAAIGPRKKRKVDCPGPGSGAEASVALSKQRAQGERPGWSPCR

SEQ ID NO: 86552 - protein, 215 aa, Homo sapiens
  Payload ID: 17328
  Gene Symbol: TAF4
  Gene Name: TAF4 RNA polymerase II, TATA box binding protein (TBP)-associated factor, 135kDa
  ENSP ID: ENSP00000476294
VPFLKRSLPALRQLTPDSAAFIQQSQQQPPPPTSQATTALTAVVLSSSVQRTAGKTAATVTSALQPPVLSLTQPTQVIQQPPKPGALIRPPQVTLTQTPMVALRQPHNRIMLTTPQQIQLNPLQPVPVVKPAVLPGTKALSAVSAQAAAAQKNKLKEPGGGSFRDDDDINDVASMAGVNLSEESARILATNSELVGTLTRSCKDETFLLQAPLQR

SEQ ID NO: 86553 - protein, 215 aa, Homo sapiens; identical to SEQ ID NO: 86552
  Payload ID: 17328
  Gene Symbol: TAF4
  Gene Name: TAF4 RNA polymerase II, TATA box binding protein (TBP)-associated factor, 135kDa
  ENSP ID: ENSP00000486663

SEQ ID NO: 86554 - protein, 79 aa, Homo sapiens; identical to SEQ ID NO: 86551
  Payload ID: 17328
  Gene Symbol: TAF4
  Gene Name: TAF4 RNA polymerase II, TATA box binding protein (TBP)-associated factor, 135kDa
  ENSP ID: ENSP00000486972
  MOD_RES (1)..(1): Any amino acid

SEQ ID NO: 86555 - protein, 457 aa, Homo sapiens
  Payload ID: 17328
  Gene Symbol: TAF4
  Gene Name: TAF4 RNA polymerase II, TATA box binding protein (TBP)-associated factor, 135kDa
  ENSP ID: ENSP00000487182
DGKIEAEDFTSRLYRELNSSPQPYLVPFLKRSLPALRQLTPDSAAFIQQSQQQPPPPTSQATTALTAVVLSSSVQRTAGKTAATVTSALQPPVLSLTQPTQVGVGKQGQPTPLVIQQPPKPGALIRPPQVTLTQTPMVALRQPHNRIMLTTPQQIQLNPLQPVPVVKPAVLPGTKALSAVSAQAAAAQKNKLKEPGGGSFRDDDDINDVASMAGVNLSEESARILATNSELVGTLTRSCKDETFLLQAPLQRRILEIGKKHGITELHPDVVSYVSHATQQRLQNLVEKISETAQQKNFSYKDDDRYEQASDVRAQLKFFEQLDQIEKQRKDEQEREILMRAAKSRSRQEDPEQLRLKQKAKEMQQQELAQMRQRDANLTALAAIGPRKKRKVDCPGPGSGAEGSGPGSVVPGSSGVGTPRQFTRQRITRVNLRDLIFCLENERETSHSLLLYKAFLK

SEQ ID NO: 86556 - protein, 862 aa, Homo sapiens
  Payload ID: 17329
  Gene Symbol: TAF4B
  Gene Name: TAF4b RNA polymerase II, TATA box binding protein (TBP)-associated factor, 105kDa
  Uniprot ID: Q92750
  ENSP ID: ENSP00000269142
MPAGLTEPAGAAPPAAVSASGTVTMAPAGALPVRVESTPVALGAVTKAPVSVCVEPTASQPLRSPVGTLVTKVAPVSAPPKVSSGPRLPAPQIVAVKAPNTTTIQFPANLQLPPGTVLIKSNSGPLMLVSPQQTVTRAETTSNITSRPAVPANPQTVKICTVPNSSSQLIKKVAVTPVKKLAQIGTTVVTTVPKPSSVQSVAVPTSVVTVTPGKPLNTVTTLKPSSLGASSTPSNEPNLKAENSAAVQINLSPTMLENVKKCKNFLAMLIKLACSGSQSPEMGQNVKKLVEQLLDAKIEAEEFTRKLYVELKSSPQPHLVPFLKKSVVALRQLLPNSQSFIQQCVQQTSSDMVIATCTTTVTTSPVVTTTVSSSQSEKSIIVSGATAPRTVSVQTLNPLAGPVGAKAGVVTLHSVGPTAATGGTTAGTGLLQTSKPLVTSVANTVTTVSLQPEKPVVSGTAVTLSLPAVTFGETSGAAICLPSVKPVVSSAGTTSDKPVIGTPVQIKLAQPGPVLSQPAGIPQAVQVKQLVVQQPSGGNEKQVTTISHSSTLTIQKCGQKTMPVNTIIPTSQFPPASILKQITLPGNKILSLQASPTQKNRIKENVTSCFRDEDDINDVTSMAGVNLNEENACILATNSELVGTLIQSCKDEPFLFIGALQKRILDIGKKHDITELNSDAVNLISQATQERLRGLLEKLTAIAQHRMTTYKASENYILCSDTRSQLKFLEKLDQLEKQRKDLEEREMLLKAAKSRSNKEDPEQLRLKQKAKELQQLELAQIQHRDANLTALAAIGPRKKRPLESGIEGLKDNLLASGTSSLTATKQLHRPRITRICLRDLIFCMEQEREMKYSRALYLALLK

SEQ ID NO: 86557 - protein, 865 aa, Homo sapiens
  Payload ID: 17329
  Gene Symbol: TAF4B
  Gene Name: TAF4b RNA polymerase II, TATA box binding protein (TBP)-associated factor, 105kDa
  ENSP ID: ENSP00000383314
MPAGLTEPAGAAPPAAVSASGTVTMAPAGALPVRVESTPVALGAVTKAPVSVCVEPTASQPLRSPVGTLVTKVAPVSAPPKVSSGPRLPAPQIVAVKAPNTTTIQFPANLQLPPGTVLIKSNSGPLMLVSPQQTVTRAETTSNITSRPAVPANPQTVKICTVPNSSSQLIKKVAVTPVKKLAQIGTTVVTTVPKPSSVQSVAVPTSVVTVTPGKPLNTVTTLKPSSLGASSTPSNEPNLKAENSAAVQINLSPTMLENVKKCKNFLAMLIKLACSGSQSPEMGQNVKKLVEQLLDAKIEAEEFTRKLYVELKSSPQPHLVPFLKKSVVALRQLLPNSQSFIQQCVQQTSSDMVIATCTTTVTTSPVVTTTVSSSQSEKSIIVSGATAPRTVSVQTLNPLAGPVGAKAGVVTLHSVGPTAATGGTTAGTGLLQTSKPLVTSVANTVTTVSLQPEKPVVSGTAVTLSLPAVTFGETSGAAICLPSVKPVVFCWDHIKPVIGTPVQIKLAQPGPVLSQPAGIPQAVQVKQLFSLFQVVQQPSGGNEKQVTTISHSSTLTIQKCGQKTMPVNTIIPTSQFPPASILKQITLPGNKILSLQASPTQKNRIKENVTSCFRDEDDINDVTSMAGVNLNEENACILATNSELVGTLIQSCKDEPFLFIGALQKRILDIGKKHDITELNSDAVNLISQATQERLRGLLEKLTAIAQHRMTTYKASENYILCSDTRSQLKFLEKLDQLEKQRKDLEEREMLLKAAKSRSNKEDPEQLRLKQKAKELQQLELAQIQHRDANLTALAAIGPRKKRPLESGIEGLKDNLLASGTSSLTATKQLHRPRITRICLRDLIFCMEQEREMKYSRALYLALLK

SEQ ID NO: 86558 - protein, 618 aa, Homo sapiens
  Payload ID: 17329
  Gene Symbol: TAF4B
  Gene Name: TAF4b RNA polymerase II, TATA box binding protein (TBP)-associated factor, 105kDa
  Uniprot ID: Q92750
  ENSP ID: ENSP00000389365
MPAGLTEPAGAAPPAAVSASGTVTMAPAGALPVRVESTPVALGAVTKAPVSVCVEPTASQPLRSPVGTLVTKVAPVSAPPKVSSGPRLPAPQIVAVKAPNTTTIQFPANLQLPPGTVLIKSNSGPLMLVSPQQTVTRAETTSNITSRPAVPANPQTVKICTVPNSSSQLIKKVAVTPVKKLAQIGTTVVTTVPKPSSVQSVAVPTSVVTVTPGKPLNTVTTLKPSSLGASSTPSNEPNLKAENSAAVQINLSPTMLENVKKCKNFLAMLIKLACSGSQSPEMGQNVKKLVEQLLDAKIEAEEFTRKLYVELKSSPQPHLVPFLKKSVVALRQLLPNSQSFIQQCVQQTSSDMVIATCTTTVTTSPVVTTTVSSSQSEKSIIVSGATAPRTVSVQTLNPLAGPVGAKAGVVTLHSVGPTAATGGTTAGTGLLQTSKPLVTSVANTVTTVSLQPEKPVVSGTAVTLSLPAVTFGETSGAAICLPSVKPVVSSAGTTSDKPVIGTPVQIKLAQPGPVLSQPAGIPQAVQVKQLVVQQPSGGNEKQVTTISHSSTLTIQKCGQKTMPVNTIIPTSQFPPASILKQITLPGNKILSLQASPTQKNRIKENVTSCFRSTFICVY

SEQ ID NO: 86559 - protein, 867 aa, Homo sapiens
  Payload ID: 17329
  Gene Symbol: TAF4B
  Gene Name: TAF4b RNA polymerase II, TATA box binding protein (TBP)-associated factor, 105kDa
  ENSP ID: ENSP00000462980
MPAGLTEPAGAAPPAAVSASGTVTMAPAGALPVRVESTPVALGAVTKAPVSVCVEPTASQPLRSPVGTLVTKVAPVSAPPKVSSGPRLPAPQIVAVKAPNTTTIQFPANLQLPPGTVLIKSNSGPLMLVSPQQTVTRAETTSNITSRPAVPANPQTVKICTVPNSSSQLIKKVAVTPVKKLAQIGTTVVTTVPKPSSVQSVAVPTSVVTVTPGKPLNTVTTLKPSSLGASSTPSNEPNLKAENSAAVQINLSPTMLENVKKCKNFLAMLIKLACSGSQSPEMGQNVKKLVEQLLDAKIEAEEFTRKLYVELKSSPQPHLVPFLKKSVVALRQLLPNSQSFIQQCVQQTSSDMVIATCTTTVTTSPVVTTTVSSSQSEKSIIVSGATAPRTVSVQTLNPLAGPVGAKAGVVTLHSVGPTAATGGTTAGTGLLQTSKPLVTSVANTVTTVSLQPEKPVVSGTAVTLSLPAVTFGETSGAAICLPSVKPVVSSAGTTSDKPVIGTPVQIKLAQPGPVLSQPAGIPQAVQVKQLFSLFQVVQQPSGGNEKQVTTISHSSTLTIQKCGQKTMPVNTIIPTSQFPPASILKQITLPGNKILSLQASPTQKNRIKENVTSCFRDEDDINDVTSMAGVNLNEENACILATNSELVGTLIQSCKDEPFLFIGALQKRILDIGKKHDITELNSDAVNLISQATQERLRGLLEKLTAIAQHRMTTYKASENYILCSDTRSQLKFLEKLDQLEKQRKDLEEREMLLKAAKSRSNKEDPEQLRLKQKAKELQQLELAQIQHRDANLTALAAIGPRKKRPLESGIEGLKDNLLASGTSSLTATKQLHRPRITRICLRDLIFCMEQEREMKYSRALYLALLK

SEQ ID NO: 86560 - protein, 800 aa, Homo sapiens
  Payload ID: 17330
  Gene Symbol: TAF5
  Gene Name: TAF5 RNA polymerase II, TATA box binding protein (TBP)-associated factor, 100kDa
  Uniprot ID: Q15542
  ENSP ID: ENSP00000358854
MAALAEEQTEVAVKLEPEGPPTLLPPQAGDGAGEGSGGTTNNGPNGGGGNVAASSSTGGDGGTPKPTVAVSAAAPAGAAPVPAAAPDAGAPHDRQTLLAVLQFLRQSKLREAEEALRREAGLLEEAVAGSGAPGEVDSAGAEVTSALLSRVTASAPGPAAPDPPGTGASGATVVSGSASGPAAPGKVGSVAVEDQPDVSAVLSAYNQQGDPTMYEEYYSGLKHFIECSLDCHRAELSQLFYPLFVHMYLELVYNQHENEAKSFFEKFHGDQECYYQDDLRVLSSLTKKEHMKGNETMLDFRTSKFVLRISRDSYQLLKRHLQEKQNNQIWNIVQEHLYIDIFDGMPRSKQQIDAMVGSLAGEAKREANKSKVFFGLLKEPEIEVPLDDEDEEGENEEGKPKKKKPKKDSIGSKSKKQDPNAPPQNRIPLPELKDSDKLDKIMNMKETTKRVRLGPDCLPSICFYTFLNAYQGLTAVDVTDDSSLIAGGFADSTVRVWSVTPKKLRSVKQASDLSLIDKESDDVLERIMDEKTASELKILYGHSGPVYGASFSPDRNYLLSSSEDGTVRLWSLQTFTCLVGYKGHNYPVWDTQFSPYGYYFVSGGHDRVARLWATDHYQPLRIFAGHLADVNCTRFHPNSNYVATGSADRTVRLWDVLNGNCVRIFTGHKGPIHSLTFSPNGRFLATGATDGRVLLWDIGHGLMVGELKGHTDTVCSLRFSRDGEILASGSMDNTVRLWDAIKAFEDLETDDFTTATGHINLPENSQELLLGTYMTKSTPVVHLHFTRRNLVLAAGAYSPQ

SEQ ID NO: 86561 - protein, 589 aa, Homo sapiens
  Payload ID: 17331
  Gene Symbol: TAF5L
  Gene Name: TAF5-like RNA polymerase II, p300/CBP-associated factor (PCAF)-associated factor, 65kDa
  Uniprot ID: O75529
  ENSP ID: ENSP00000258281
MKRVRTEQIQMAVSCYLKRRQYVDSDGPLKQGLRLSQTAEEMAANLTVQSESGCANIVSAAPCQAEPQQYEVQFGRLRNFLTDSDSQHSHEVMPLLYPLFVYLHLNLVQNSPKSTVESFYSRFHGMFLQNASQKDVIEQLQTTQTIQDILSNFKLRAFLDNKYVVRLQEDSYNYLIRYLQSDNNTALCKVLTLHIHLDVQPAKRTDYQLYASGSSSRSENNGLEPPDMPSPILQNEAALEVLQESIKRVKDGPPSLTTICFYAFYNTEQLLNTAEISPDSKLLAAGFDNSCIKLWSLRSKKLKSEPHQVDVSRIHLACDILEEEDDEDDNAGTEMKILRGHCGPVYSTRFLADSSGLLSCSEDMSIRYWDLGSFTNTVLYQGHAYPVWDLDISPYSLYFASGSHDRTARLWSFDRTYPLRIYAGHLADVDCVKFHPNSNYLATGSTDKTVRLWSAQQGNSVRLFTGHRGPVLSLAFSPNGKYLASAGEDQRLKLWDLASGTLYKELRGHTDNITSLTFSPDSGLIASASMDNSVRVWDIRNTYCSAPADGSSSELVGVYTGQMSNVLSVQFMACNLLLVTGITQENQEH

SEQ ID NO: 86562 - protein, 84 aa, Homo sapiens
  Payload ID: 17331
  Gene Symbol: TAF5L
  Gene Name: TAF5-like RNA polymerase II, p300/CBP-associated factor (PCAF)-associated factor, 65kDa
  ENSP ID: ENSP00000355634
MKRVRTEQIQMAVSCYLKRRQYVDSDGPLKQGLRLSQTAEEMAANLTGNGGGSSGGVSLEQENSRQYPCGITSPLLKTVPERAD

SEQ ID NO: 86563 - protein, 325 aa, Homo sapiens
  Payload ID: 17331
  Gene Symbol: TAF5L
  Gene Name: TAF5-like RNA polymerase II, p300/CBP-associated factor (PCAF)-associated factor, 65kDa
  Uniprot ID: O75529
  ENSP ID: ENSP00000355635
MKRVRTEQIQMAVSCYLKRRQYVDSDGPLKQGLRLSQTAEEMAANLTVQSESGCANIVSAAPCQAEPQQYEVQFGRLRNFLTDSDSQHSHEVMPLLYPLFVYLHLNLVQNSPKSTVESFYSRFHGMFLQNASQKDVIEQLQTTQTIQDILSNFKLRAFLDNKYVVRLQEDSYNYLIRYLQSDNNTALCKVLTLHIHLDVQPAKRTDYQLYASGSSSRSENNGLEPPDMPSPILQNEAALEVLQESIKRVKDGPPSLTTICFYAFYNTEQLLNTAEISPDSKLLAAGFDNSCIKLWSLRSKKLKSEPHQVDVSRIHLACDILEEEV

SEQ ID NO: 86564 - protein, 589 aa, Homo sapiens; identical to SEQ ID NO: 86561
  Payload ID: 17331
  Gene Symbol: TAF5L
  Gene Name: TAF5-like RNA polymerase II, p300/CBP-associated factor (PCAF)-associated factor, 65kDa
  Uniprot ID: O75529
  ENSP ID: ENSP00000355636

SEQ ID NO: 86565 - protein, 677 aa, Homo sapiens
  Payload ID: 17332
  Gene Symbol: TAF6
  Gene Name: TAF6 RNA polymerase II, TATA box binding protein (TBP)-associated factor, 80kDa
  Uniprot ID: P49848
  ENSP ID: ENSP00000344537
MAEEKKLKLSNTVLPSESMKVVAESMGIAQIQEETCQLLTDEVSYRIKEIAQDALKFMHMGKRQKLTTSDIDYALKLKNVEPLYGFHAQEFIPFRFASGGGRELYFYEEKEVDLSDIINTPLPRVPLDVCLKAHWLSIEGCQPAIPENPPPAPKEQQKAEATEPLKSAKPGQEEDGPLKGKGQGATTADGKGKEKKAPPLLEGAPLRLKPRSIHELSVEQQLYYKEITEACVGSCEAKRAEALQSIATDPGLYQMLPRFSTFISEGVRVNVVQNNLALLIYLMRMVKALMDNPTLYLEKYVHELIPAVMTCIVSRQLCLRPDVDNHWALRDFAARLVAQICKHFSTTTNNIQSRITKTFTKSWVDEKTPWTTRYGSIAGLAELGHDVIKTLILPRLQQEGERIRSVLDGPVLSNIDRIGADHVQSLLLKHCAPVLAKLRPPPDNQDAYRAEFGSLGPLLCSQVVKARAQAALQAQQVNRTTLTITQPRPTLTLSQAPQPGPRTPGLLKVPGSIALPVQTLVSARAAAPPQPSPPPTKFIVMSSSSSAPSTQQVLSLSTSAPGSGSTTTSPVTTTVPSVQPIVKLVSTATTAPPSTAPSGPGSVQKYIVVSLPPTGEGKGGPTSHPSPVPPPASSPSPLSGSALCGGKQEAGDSPPPAPGTPKANGSQPNSGSPQPAP

SEQ ID NO: 86566 - protein, 677 aa, Homo sapiens; identical to SEQ ID NO: 86565
  Payload ID: 17332
  Gene Symbol: TAF6
  Gene Name: TAF6 RNA polymerase II, TATA box binding protein (TBP)-associated factor, 80kDa
  Uniprot ID: P49848
  ENSP ID: ENSP00000389575

SEQ ID NO: 86567 - protein, 134 aa, Homo sapiens
  Payload ID: 17332
  Gene Symbol: TAF6
  Gene Name: TAF6 RNA polymerase II, TATA box binding protein (TBP)-associated factor, 80kDa
  ENSP ID: ENSP00000390073
MAEEKKLKLSNTVLPSESMKVVAESMGIAQIQEETCQLLTDEVSYRIKEIAQDALKFMHMGKRQKLTTSDIDYALKLKNVEPLYGFHAQEFIPFRFASGGGRELYFYEEKEVDLSDIINTPLPRVPLDVCLKAH

SEQ ID NO: 86568 - protein, 76 aa, Homo sapiens
  Payload ID: 17332
  Gene Symbol: TAF6
  Gene Name: TAF6 RNA polymerase II, TATA box binding protein (TBP)-associated factor, 80kDa
  ENSP ID: ENSP00000390220
MAEEKKLKLSNTVLPSESMKVVAESMGIAQIQEETCQLLTDEVSYRIKEIAQDALKFMHMGKRQKLTTSDIDYALK

SEQ ID NO: 86569 - protein, 13 aa, Homo sapiens
  Payload ID: 17332
  Gene Symbol: TAF6
  Gene Name: TAF6 RNA polymerase II, TATA box binding protein (TBP)-associated factor, 80kDa
  ENSP ID: ENSP00000395627
MAEEKKLKLSNTV

SEQ ID NO: 86570 - protein, 714 aa, Homo sapiens
  Payload ID: 17332
  Gene Symbol: TAF6
  Gene Name: TAF6 RNA polymerase II, TATA box binding protein (TBP)-associated factor, 80kDa
  Uniprot ID: P49848
  ENSP ID: ENSP00000399982
MTKRRLQTITACLQLREGSPSLHRGLHPSREEKRDSRMAEEKKLKLSNTVLPSESMKVVAESMGIAQIQEETCQLLTDEVSYRIKEIAQDALKFMHMGKRQKLTTSDIDYALKLKNVEPLYGFHAQEFIPFRFASGGGRELYFYEEKEVDLSDIINTPLPRVPLDVCLKAHWLSIEGCQPAIPENPPPAPKEQQKAEATEPLKSAKPGQEEDGPLKGKGQGATTADGKGKEKKAPPLLEGAPLRLKPRSIHELSVEQQLYYKEITEACVGSCEAKRAEALQSIATDPGLYQMLPRFSTFISEGVRVNVVQNNLALLIYLMRMVKALMDNPTLYLEKYVHELIPAVMTCIVSRQLCLRPDVDNHWALRDFAARLVAQICKHFSTTTNNIQSRITKTFTKSWVDEKTPWTTRYGSIAGLAELGHDVIKTLILPRLQQEGERIRSVLDGPVLSNIDRIGADHVQSLLLKHCAPVLAKLRPPPDNQDAYRAEFGSLGPLLCSQVVKARAQAALQAQQVNRTTLTITQPRPTLTLSQAPQPGPRTPGLLKVPGSIALPVQTLVSARAAAPPQPSPPPTKFIVMSSSSSAPSTQQVLSLSTSAPGSGSTTTSPVTTTVPSVQPIVKLVSTATTAPPSTAPSGPGSVQKYIVVSLPPTGEGKGGPTSHPSPVPPPASSPSPLSGSALCGGKQEAGDSPPPAPGTPKANGSQPNSGSPQPAP

SEQ ID NO: 86571 - protein, 114 aa, Homo sapiens
  Payload ID: 17332
  Gene Symbol: TAF6
  Gene Name: TAF6 RNA polymerase II, TATA box binding protein (TBP)-associated factor, 80kDa
  ENSP ID: ENSP00000406315
MAEEKKLKLSNTVLPSESMKVVAESMGIAQIQEETCQLLTDEVSYRIKEIAQDALKFMHMGKRQKLTTSDIDYALKLKNVEPLYGFHAQEFIPFRFASGGGRELYFYEEKEVDL

SEQ ID NO: 86572 - protein, 232 aa, Homo sapiens
  Payload ID: 17332
  Gene Symbol: TAF6
  Gene Name: TAF6 RNA polymerase II, TATA box binding protein (TBP)-associated factor, 80kDa
  ENSP ID: ENSP00000410012
MAEEKKLKLSNTVLPSESMKVVAESMGIAQIQEETCQLLTDEVSYRIKEIAQDALKFMHMGKRQKLTTSDIDYALKLKNVEPLYGFHAQEFIPFRFASGGGRELYFYEEKEVDLSDIINTPLPRVPLDVCLKAPKEQQKAEATEPLKSAKPGQEEDGPLKGKGQGATTADGKGKEKKAPPLLEGAPLRLKPRSIHELSVEQQLYYKEITEACVGSCEAKRAEALQSIATDPG

SEQ ID NO: 86573 - protein, 156 aa, Homo sapiens
  Payload ID: 17332
  Gene Symbol: TAF6
  Gene Name: TAF6 RNA polymerase II, TATA box binding protein (TBP)-associated factor, 80kDa
  ENSP ID: ENSP00000412346
MAEEKKLKLSNTVLPSESMKVVAESMGIAQIQEETCQLLTDEVSYRIKEIAQDALKFMHMGKRQKLTTSDIDYALKLKNVEPLYGFHAQEFIPFRFASGGGRELYFYEEKEVDLSDIINTPLPRVPLDVCLKAPKEQQKAEATEPLKSAKPGQEED

SEQ ID NO: 86574 - protein, 114 aa, Homo sapiens
  Payload ID: 17332
  Gene Symbol: TAF6
  Gene Name: TAF6 RNA polymerase II, TATA box binding protein (TBP)-associated factor, 80kDa
  ENSP ID: ENSP00000413614
MAEEKKLKLSNTVLPSESMKVVAESMGIAQIQEETCQLLTDEVSYRIKEIAQDALKFMHMGKRQKLTTSDIDYALKLKNVEPLYGFHAQEFIPFRFASGGGRELYFYEEKELIG

SEQ ID NO: 86575 - protein, 677 aa, Homo sapiens; identical to SEQ ID NO: 86565
  Payload ID: 17332
  Gene Symbol: TAF6
  Gene Name: TAF6 RNA polymerase II, TATA box binding protein (TBP)-associated factor, 80kDa
  Uniprot ID: P49848
  ENSP ID: ENSP00000416396

SEQ ID NO: 86576 - protein, 255 aa, Homo sapiens
  Payload ID: 17332
  Gene Symbol: TAF6
  Gene Name: TAF6 RNA polymerase II, TATA box binding protein (TBP)-associated factor, 80kDa
  ENSP ID: ENSP00000419555
MAEEKKLKLSNTVLPSESMKVVAESMGIAQIQEETCQLLTDEVSYRIKEIAQDALKFMHMGKRQKLTTSDIDYALKLKNVEPLYGFHAQEFIPFRFASGGGRELYFYEEKEVDLSDIINTPLPRVPLDVCLKAHWLSIEGCQPAIPENPPPAPKEQQKAEATEPLKSAKPGQEEDGPLKGKGQGATTADGKGKEKKAPPLLEGAPLRLKPRSIHELSVEQQLYYKEITEACVGSCEAKRAEALQSIATDPGLYQM

SEQ ID NO: 86577 - protein, 734 aa, Homo sapiens
  Payload ID: 17332
  Gene Symbol: TAF6
  Gene Name: TAF6 RNA polymerase II, TATA box binding protein (TBP)-associated factor, 80kDa
  ENSP ID: ENSP00000419760
MDIRHSEFLPCLHCPPFVGPLPVSHVSFSSACPVPLPGSPSLHRGLHPSREEKRDSRMAEEKKLKLSNTVLPSESMKVVAESMGIAQIQEETCQLLTDEVSYRIKEIAQDALKFMHMGKRQKLTTSDIDYALKLKNVEPLYGFHAQEFIPFRFASGGGRELYFYEEKEVDLSDIINTPLPRVPLDVCLKAHWLSIEGCQPAIPENPPPAPKEQQKAEATEPLKSAKPGQEEDGPLKGKGQGATTADGKGKEKKAPPLLEGAPLRLKPRSIHELSVEQQLYYKEITEACVGSCEAKRAEALQSIATDPGLYQMLPRFSTFISEGVRVNVVQNNLALLIYLMRMVKALMDNPTLYLEKYVHELIPAVMTCIVSRQLCLRPDVDNHWALRDFAARLVAQICKHFSTTTNNIQSRITKTFTKSWVDEKTPWTTRYGSIAGLAELGHDVIKTLILPRLQQEGERIRSVLDGPVLSNIDRIGADHVQSLLLKHCAPVLAKLRPPPDNQDAYRAEFGSLGPLLCSQVVKARAQAALQAQQVNRTTLTITQPRPTLTLSQAPQPGPRTPGLLKVPGSIALPVQTLVSARAAAPPQPSPPPTKFIVMSSSSSAPSTQQVLSLSTSAPGSGSTTTSPVTTTVPSVQPIVKLVSTATTAPPSTAPSGPGSVQKYIVVSLPPTGEGKGGPTSHPSPVPPPASSPSPLSGSALCGGKQEAGDSPPPAPGTPKANGSQPNSGSPQPAP

SEQ ID NO: 86578 - protein, 9 aa, Homo sapiens
  Payload ID: 17332
  Gene Symbol: TAF6
  Gene Name: TAF6 RNA polymerase II, TATA box binding protein (TBP)-associated factor, 80kDa
  ENSP ID: ENSP00000427710
MAEEKKLKL

SEQ ID NO: 86579 - protein, 113 aa, Homo sapiens
  Payload ID: 17332
  Gene Symbol: TAF6
  Gene Name: TAF6 RNA polymerase II, TATA box binding protein (TBP)-associated factor, 80kDa
  ENSP ID: ENSP00000428071
MAEEKKLKLSNTVLPSESMKVVAESMGIAQIQEETCQLLTDEDALKFMHMGKRQKLTTSDIDYALKLKNVEPLYGFHAQEFIPFRFASGGGRELYFYEEKEVDLSDIINTPLP

SEQ ID NO: 86580 - protein, 141 aa, Homo sapiens
  Payload ID: 17332
  Gene Symbol: TAF6
  Gene Name: TAF6 RNA polymerase II, TATA box binding protein (TBP)-associated factor, 80kDa
  ENSP ID: ENSP00000428639
MAEEKKLKLSNTVLPSESMKVVAESMGIAQIQEETCQLLTDEDALKFMHMGKRQKLTTSDIDYALKLKNVEPLYGFHAQEFIPFRFASGGGRELYFYEEKEVDLSDIINTPLPRVPLDVCLKAHWLSIEGCQPAIPENPPP

SEQ ID NO: 86581 - protein, 622 aa, Homo sapiens
  Payload ID: 17333
  Gene Symbol: TAF6L
  Gene Name: TAF6-like RNA polymerase II, p300/CBP-associated factor (PCAF)-associated factor, 65kDa
  Uniprot ID: Q9Y6J9
  ENSP ID: ENSP00000294168
MSEREERRFVEIPRESVRLMAESTGLELSDEVAALLAEDVCYRLREATQNSSQFMKHTKRRKLTVEDFNRALRWSSVEAVCGYGSQEALPMRPAREGELYFPEDREVNLVELALATNIPKGCAETAVRVHVSYLDGKGNLAPQGSVPSAVSSLTDDLLKYYHQVTRAVLGDDPQLMKVALQDLQTNSKIGALLPYFVYVVSGVKSVSHDLEQLHRLLQVARSLFRNPHLCLGPYVRCLVGSVLYCVLEPLAASINPLNDHWTLRDGAALLLSHIFWTHGDLVSGLYQHILLSLQKILADPVRPLCCHYGAVVGLHALGWKAVERVLYPHLSTYWTNLQAVLDDYSVSNAQVKADGHKVYGAILVAVERLLKMKAQAAEPNRGGPGGRGCRRLDDLPWDSLLFQESSSGGGAEPSFGSGLPLPPGGAGPEDPSLSVTLADIYRELYAFFGDSLATRFGTGQPAPTAPRPPGDKKEPAAAPDSVRKMPQLTASAIVSPHGDESPRGSGGGGPASASGPAASESRPLPRVHRARGAPRQQGPGTGTRDVFQKSRFAPRGAPHFRFIIAGRQAGRRCRGRLFQTAFPAPYGPSPASRYVQKLPMIGRTSRPARRWALSDYSLYLPL

SEQ ID NO: 86582 - protein, 145 aa, Homo sapiens
  Payload ID: 17333
  Gene Symbol: TAF6L
  Gene Name: TAF6-like RNA polymerase II, p300/CBP-associated factor (PCAF)-associated factor, 65kDa
  ENSP ID: ENSP00000434662
MSEREERRFVEIPRESVRLMAESTGLELSDEVAALLAEDVCYRLREATQNSSQFMKHTKRRKLTVEDFNRALRWSSVEAVCGYGSQEALPMRPAREGELYFPEDREVNLVELALATNIPKGCAETAVRVHVSYLDGKGNLAPQGS

SEQ ID NO: 86583 - protein, 50 aa, Homo sapiens
  Payload ID: 17333
  Gene Symbol: TAF6L
  Gene Name: TAF6-like RNA polymerase II, p300/CBP-associated factor (PCAF)-associated factor, 65kDa
  ENSP ID: ENSP00000435116
MSEREERRFVEIPRESVRLMAESTGLELSDEVAALLAEDVCYRLREATQN

SEQ ID NO: 86584 - protein, 63 aa, Homo sapiens
  Payload ID: 17333
  Gene Symbol: TAF6L
  Gene Name: TAF6-like RNA polymerase II, p300/CBP-associated factor (PCAF)-associated factor, 65kDa
  ENSP ID: ENSP00000435443
MSEREERRFVEIPRESVRLMAESTGLELSDEVAALLAEDVCYRLREATQLSVHEAHQTPEADG

SEQ ID NO: 86585 - protein, 349 aa, Homo sapiens
  Payload ID: 17334
  Gene Symbol: TAF7
  Gene Name: TAF7 RNA polymerase II, TATA box binding protein (TBP)-associated factor, 55kDa
  Uniprot ID: Q15545
  ENSP ID: ENSP00000312709
MSKSKDDAPHELESQFILRLPPEYASTVRRAVQSGHVNLKDRLTIELHPDGRHGIVRVDRVPLASKLVDLPCVMESLKTIDKKTFYKTADICQMLVSTVDGDLYPPVEEPVASTDPKASKKKDKDKEKKFIWNHGITLPLKNVRKRRFRKTAKKKYIESPDVEKEVKRLLSTDAEAVSTRWEIIAEDETKEAENQGLDISSPGMSGHRQGHDSLEHDELREIFNDLSSSSEDEDETQHQDEEDINIIDTEEDLERQLQDKLNESDEQHQENEGTNQLVMGIQKQIDNMKGKLQETQDRAKRQEDLIMKVENLALKNRFQAVLDELKQKEDREKEQLSSLQEELESLLEK

SEQ ID NO: 86586 - protein, 48 aa, Homo sapiens
  Payload ID: 17334
  Gene Symbol: TAF7
  Gene Name: TAF7 RNA polymerase II, TATA box binding protein (TBP)-associated factor, 55kDa
  ENSP ID: ENSP00000485510
MSKSKDDAPHELESQFILRLPPEYASTVRRAVQSGHVNLKDRLTIELH

SEQ ID NO: 86587 - protein, 302 aa, Homo sapiens
  Payload ID: 17335
  Gene Symbol: TAF7L
  Gene Name: TAF7-like RNA polymerase II, TATA box binding protein (TBP)-associated factor, 50kDa
  Uniprot ID: Q5H9L4
  ENSP ID: ENSP00000320283
MSESQDEVPDEVENQFILRLPLEHACTVRNLARSQSVKMKDKLKIDLLPDGRHAVVEVEDVPLAAKLVDLPCVIESLRTLDKKTFYKTADISQMLVCTADGDIHLSPEEPAASTDPNIVRKKERGREEKCVWKHGITPPLKNVRKKRFRKTQKKVPDVKEMEKSSFTEYIESPDVENEVKRLLRSDAEAVSTRWEVIAEDGTKEIESQGSIPGFLISSGMSSHKQGHTSSVMEIQKQIEKKEKKLHKIQNKAQRQKDLIMKVENLTLKNHFQSVLEQLELQEKQKNEKLISLQEQLQRFLKK

SEQ ID NO: 86588 - protein, 376 aa, Homo sapiens
  Payload ID: 17335
  Gene Symbol: TAF7L
  Gene Name: TAF7-like RNA polymerase II, TATA box binding protein (TBP)-associated factor, 50kDa
  Uniprot ID: Q5H9L4
  ENSP ID: ENSP00000349235
MSESQDEVPDEVENQFILRLPLEHACTVRNLARSQSVKMKDKLKIDLLPDGRHAVVEVEDVPLAAKLVDLPCVIESLRTLDKKTFYKTADISQMLVCTADGDIHLSPEEPAASTDPNIVRKKERGREEKCVWKHGITPPLKNVRKKRFRKTQKKVPDVKEMEKSSFTEYIESPDVENEVKRLLRSDAEAVSTRWEVIAEDGTKEIESQGSIPGFLISSGMSSHKQGHTSSEYDMLREMFSDSRSNNDDDEDEDDEDEDEDEDEDEDEDKEEEEEDCSEEYLERQLQAEFIESGQYRANEGTSSIVMEIQKQIEKKEKKLHKIQNKAQRQKDLIMKVENLTLKNHFQSVLEQLELQEKQKNEKLISLQEQLQRFLKK

SEQ ID NO: 86589 - protein, 462 aa, Homo sapiens
  Payload ID: 17335
  Gene Symbol: TAF7L
  Gene Name: TAF7-like RNA polymerase II, TATA box binding protein (TBP)-associated factor, 50kDa
  Uniprot ID: Q5H9L4
  ENSP ID: ENSP00000361998
MECPEGQLPISSENDSTPTVSTSEVTSQQEPQILVDRGSETTYESSADIAGDEGTQIPADEDTQTDADSSAQAAAQAPENFQEGKDMSESQDEVPDEVENQFILRLPLEHACTVRNLARSQSVKMKDKLKIDLLPDGRHAVVEVEDVPLAAKLVDLPCVIESLRTLDKKTFYKTADISQMLVCTADGDIHLSPEEPAASTDPNIVRKKERGREEKCVWKHGITPPLKNVRKKRFRKTQKKVPDVKEMEKSSFTEYIESPDVENEVKRLLRSDAEAVSTRWEVIAEDGTKEIESQGSIPGFLISSGMSSHKQGHTSSEYDMLREMFSDSRSNNDDDEDEDDEDEDEDEDEDEDEDKEEEEEDCSEEYLERQLQAEFIESGQYRANEGTSSIVMEIQKQIEKKEKKLHKIQNKAQRQKDLIMKVENLTLKNHFQSVLEQLELQEKQKNEKLISLQEQLQRFLKK

SEQ ID NO: 86590 - protein, 310 aa, Homo sapiens
  Payload ID: 17336
  Gene Symbol: TAF8
  Gene Name: TAF8 RNA polymerase II, TATA box binding protein (TBP)-associated factor, 43kDa
  Uniprot ID: Q7Z7C8
  ENSP ID: ENSP00000362068
MADAAATAGAGGSGTRSGSKQSTNPADNYHLARRRTLQVVVSSLLTEAGFESAEKASVETLTEMLQSYISEIGRSAKSYCEHTARTQPTLSDIVVTLVEMGFNVDTLPAYAKRSQRMVITAPPVTNQPVTPKALTAGQNRPHPPHIPSHFPEFPDPHTYIKTPTYREPVSDYQVLREKAASQRRDVERALTRFMAKTGETQSLFKDDVSTFPLIAARPFTIPYLTALLPSELEMQQMEETDSSEQDEQTDTENLALHISMEDSGAEKENTSVLQQNPSLSGSRNGEENIIDNPYLRPVKKPKIRRKKSLS

SEQ ID NO: 86591 - protein, 174 aa, Homo sapiens
  Payload ID: 17336
  Gene Symbol: TAF8
  Gene Name: TAF8 RNA polymerase II, TATA box binding protein (TBP)-associated factor, 43kDa
  ENSP ID: ENSP00000362069
MADAAATAGAGGSGTRSGSKQSTNPADNYHLARRRTLQVVVSSLLTEAGFESAEKASVETLTEMLQSYISEIGRSAKSYCEHTARTQPTLSDIVVTLVEMGFNVDTLPAYAKRSQRMVITAPPVTNQPVTPKALTAGQNRPHPPHIPSHFPEFPDPHTYIKTPVSDEALGLRVV

SEQ ID NO: 86592 - protein, 338 aa, Homo sapiens
  Payload ID: 17336
  Gene Symbol: TAF8
  Gene Name: TAF8 RNA polymerase II, TATA box binding protein (TBP)-associated factor, 43kDa
  Uniprot ID: Q7Z7C8
  ENSP ID: ENSP00000362073
MADAAATAGAGGSGTRSGSKQSTNPADNYHLARRRTLQVVVSSLLTEAGFESAEKASVETLTEMLQSYISEIGRSAKSYCEHTARTQPTLSDIVVTLVEMGFNVDTLPAYAKRSQRMVITAPPVTNQPVTPKALTAGQNRPHPPHIPSHFPEFPDPHTYIKTPTYREPVSDYQVLREKAASQRRDVERALTRFMAKTGETQSLFKDDVSTFPLIAARPFTIPYLTALLPSELEMQQMEETDSSEQDEQTDTENLALHISMIESRSVTQAGVQWQDLGSLQPPPPGFKRFSSLSLLSSWNYRRILEPRRRTPLSCSRTPPCRVAGMGRRTSSITLICGR

SEQ ID NO: 86593 - protein, 311 aa, Homo sapiens
  Payload ID: 17336
  Gene Symbol: TAF8
  Gene Name: TAF8 RNA polymerase II, TATA box binding protein (TBP)-associated factor, 43kDa
  Uniprot ID: Q7Z7C8
  ENSP ID: ENSP00000411900
MADAAATAGAGGSGTRSGSKQSTNPADNYHLARRRTLQVVVSSLLTEAGFESAEKASVETLTEMLQSYISEIGRSAKSYCEHTARTQPTLSDIVVTLVEMGFNVDTLPAYAKRSQRMVITAPPVTNQPVTPKALTAGQNRPHPPHIPSHFPEFPDPHTYIKTPTYREPVSDYQVLREKAASQRRDVERALTRFMAKTGETQSLFKDDVSTFPLIAARPFTIPYLTALLPSELEMQQMEETDSSEQDEQTDTENLALHISMEDSGAEKENTSVLQQNPSLSGSRNGEENIIDNPYLRPVKKPKIRRKKPDTF

SEQ ID NO: 86594 - protein, 60 aa, Homo sapiens
  Payload ID: 17336
  Gene Symbol: TAF8
  Gene Name: TAF8 RNA polymerase II, TATA box binding protein (TBP)-associated factor, 43kDa
  ENSP ID: ENSP00000417738
MLQSYISEIGRSAKSYCEHTARTQPTLSDIVVTLVEMGFNVDTLPAYAKRSQRMVITARK

SEQ ID NO: 86595 - protein, 123 aa, Homo sapiens
  Payload ID: 17336
  Gene Symbol: TAF8
  Gene Name: TAF8 RNA polymerase II, TATA box binding protein (TBP)-associated factor, 43kDa
  ENSP ID: ENSP00000417760
MADAAATAGAGGSGTRSGSKQSTNPADNYHLARRRTLQVVVSSLLTEAGFESAEKASVETLTEMLQSYISEIGRSAKSYCEHTARTQPTLSDIVVTLVEMGFNVDTLPAYAKRSQRMVITARK

SEQ ID NO: 86596 - protein, 338 aa, Homo sapiens; identical to SEQ ID NO: 86592
  Payload ID: 17336
  Gene Symbol: TAF8
  Gene Name: TAF8 RNA polymerase II, TATA box binding protein (TBP)-associated factor, 43kDa
  Uniprot ID: Q7Z7C8
  ENSP ID: ENSP00000417867

SEQ ID NO: 86597 - protein, 234 aa, Homo sapiens
  Payload ID: 17336
  Gene Symbol: TAF8
  Gene Name: TAF8 RNA polymerase II, TATA box binding protein (TBP)-associated factor, 43kDa
  ENSP ID: ENSP00000418029
MLQSYISEIGRSAKSYCEHTARTQPTLSDIVVTLVEMGFNVDTLPAYAKRSQRMVITAPPVTNQPVTPKALTAGQNRPHPPHIPSHFPEFPDPHTYIKTPTYREPVSDYQVLREKAASQRRDVERALTRFMAKTGETQSLFKDDVSTFPSLLPSELEMQQMEETDSSEQDEQTDTENLALHISMEDSGAEKENTSVLQQNPSLSGSRNGEENIIDNPYLRPVKKPKIRRKKSLS

SEQ ID NO: 86598 - protein, 264 aa, Homo sapiens; identical to SEQ ID NO: 2876
  Payload ID: 17337
  Gene Symbol: TAF9
  Gene Name: TAF9 RNA polymerase II, TATA box binding protein (TBP)-associated factor, 32kDa
  Uniprot ID: Q16594
  ENSP ID: ENSP00000217893

SEQ ID NO: 86599 - protein, 264 aa, Homo sapiens; identical to SEQ ID NO: 2876
  Payload ID: 17337
  Gene Symbol: TAF9
  Gene Name: TAF9 RNA polymerase II, TATA box binding protein (TBP)-associated factor, 32kDa
  Uniprot ID: Q16594
  ENSP ID: ENSP00000370193

SEQ ID NO: 86600 - protein, 264 aa, Homo sapiens; identical to SEQ ID NO: 2876
  Payload ID: 17337
  Gene Symbol: TAF9
  Gene Name: TAF9 RNA polymerase II, TATA box binding protein (TBP)-associated factor, 32kDa
  Uniprot ID: Q16594
  ENSP ID: ENSP00000421873

SEQ ID NO: 86601 - protein, 127 aa, Homo sapiens; identical to SEQ ID NO: 2881
  Payload ID: 17337
  Gene Symbol: TAF9
  Gene Name: TAF9 RNA polymerase II, TATA box binding protein (TBP)-associated factor, 32kDa
  ENSP ID: ENSP00000425798

SEQ ID NO: 86602 - protein, 197 aa, Homo sapiens; identical to SEQ ID NO: 2882
  Payload ID: 17337
  Gene Symbol: TAF9
  Gene Name: TAF9 RNA polymerase II, TATA box binding protein (TBP)-associated factor, 32kDa
  ENSP ID: ENSP00000425944

SEQ ID NO: 86603 - protein, 135 aa, Homo sapiens; identical to SEQ ID NO: 2884
  Payload ID: 17337
  Gene Symbol: TAF9
  Gene Name: TAF9 RNA polymerase II, TATA box binding protein (TBP)-associated factor, 32kDa
  ENSP ID: ENSP00000426283

SEQ ID NO: 86604 - protein, 166 aa, Homo sapiens; identical to SEQ ID NO: 2885
  Payload ID: 17337
  Gene Symbol: TAF9
  Gene Name: TAF9 RNA polymerase II, TATA box binding protein (TBP)-associated factor, 32kDa
  ENSP ID: ENSP00000427343

SEQ ID NO: 86605 - protein, 102 aa, Homo sapiens; identical to SEQ ID NO: 2878
  Payload ID: 17337
  Gene Symbol: TAF9
  Gene Name: TAF9 RNA polymerase II, TATA box binding protein (TBP)-associated factor, 32kDa
  ENSP ID: ENSP00000427617

SEQ ID NO: 86606 - protein, 169 aa, Homo sapiens; identical to SEQ ID NO: 2873
  Payload ID: 17337
  Gene Symbol: TAF9
  Gene Name: TAF9 RNA polymerase II, TATA box binding protein (TBP)-associated factor, 32kDa
  ENSP ID: ENSP00000480829

SEQ ID NO: 86607 - protein, 141 aa, Homo sapiens; identical to SEQ ID NO: 2875
  Payload ID: 17337
  Gene Symbol: TAF9
  Gene Name: TAF9 RNA polymerase II, TATA box binding protein (TBP)-associated factor, 32kDa
  ENSP ID: ENSP00000483874

SEQ ID NO: 86608 - protein, 172 aa, Homo sapiens; identical to SEQ ID NO: 2874
  Payload ID: 17337
  Gene Symbol: TAF9
  Gene Name: TAF9 RNA polymerase II, TATA box binding protein (TBP)-associated factor, 32kDa
  ENSP ID: ENSP00000484679

SEQ ID NO: 86609 - protein, 47 aa, Homo sapiens; identical to SEQ ID NO: 2883
  Payload ID: 17337
  Gene Symbol: TAF9
  Gene Name: TAF9 RNA polymerase II, TATA box binding protein (TBP)-associated factor, 32kDa
  ENSP ID: ENSP00000485291

SEQ ID NO: 86610 - protein, 109 aa, Homo sapiens; identical to SEQ ID NO: 2880
  Payload ID: 17337
  Gene Symbol: TAF9
  Gene Name: TAF9 RNA polymerase II, TATA box binding protein (TBP)-associated factor, 32kDa
  ENSP ID: ENSP00000485297

SEQ ID NO: 86611 - protein, 251 aa, Homo sapiens
  Payload ID: 17338
  Gene Symbol: TAF9B
  Gene Name: TAF9B RNA polymerase II, TATA box binding protein (TBP)-associated factor, 31kDa
  Uniprot ID: Q9HBM6
  ENSP ID: ENSP00000339917
MESGKMAPPKNAPRDALVMAQILKDMGITEYEPRVINQMLEFAFRYVTTILDDAKIYSSHAKKPNVDADDVRLAIQCRADQSFTSPPPRDFLLDIARQKNQTPLPLIKPYAGPRLPPDRYCLTAPNYRLKSLIKKGPNQGRLVPRLSVGAVSSKPTTPTIATPQTVSVPNKVATPMSVTSQRFTVQIPPSQSTPVKPVPATTAVQNVLINPSMIGPKNILITTNMVSSQNTANEANPLKRKHEDDDDNDIM

SEQ ID NO: 86612 - protein, 262 aa, Homo sapiens
  Payload ID: 17339
  Gene Symbol: TAZ
  Gene Name: tafazzin
  ENSP ID: ENSP00000358791
MPLHVKWPFPAVPPLTWTLASSVVMGLVGTYSCFWTSEWAQAEAGPPGYPCPAGGILKLRHIWNLKLMRWTPAAADICFTKELHSHFFSLGKCVPVCRGDGVYQKGMDFILEKLNHGDWVHIFPEGIGRLIAECHLNPIILPLWHVGEPGDGDREMASGVGGLGLPLVPGCPAPPHVWPSVHCAAGMNDVLPNSPPYFPRFGQKITVLIGKPFSALPVLERLRAENKSAVEMRKALTDFIQEEFQHLKTQAEQLHNHLQPGR

SEQ ID NO: 86613 - protein, 184 aa, Homo sapiens
  Payload ID: 17339
  Gene Symbol: TAZ
  Gene Name: tafazzin
  ENSP ID: ENSP00000398193
MPLHVKWPFPAVPPLTWTLASSVVMGLVGTYSCFWTKYMNHLTVHNREVLYELIEKRGPATPLITVSNHQSCMDDPHLWGILKLRHIWNLKLMRWTPAAADICFTKELHSHFFSLGKCVPVCRDGVYQKGMDFILEKLNHGDWVHIFPEGKVNMSSEFLRFKWGIGRLIAECHLNPIILPLWHV

SEQ ID NO: 86614 - protein, 34 aa, Homo sapiens
  Payload ID: 17339
  Gene Symbol: TAZ
  Gene Name: tafazzin
  ENSP ID: ENSP00000406257
  MOD_RES (1)..(1): Any amino acid
XLITVSNHQSCMDDPHLWGILKLRHIWNLKLMRW

SEQ ID NO: 86615 - protein, 278 aa, Homo sapiens
  Payload ID: 17339
  Gene Symbol: TAZ
  Gene Name: tafazzin
  Uniprot ID: Q16635
  ENSP ID: ENSP00000419854
MPLHVKWPFPAVPPLTWTLASSVVMGLVGTYSCFWTKYMNHLTVHNREVLYELIEKRGPATPLITVSNHQSCMDDPHLWGILKLRHIWNLKLMRWTPAAADICFTKELHSHFFSLGKCVPVCRGAEFFQAENEGKGVLDTGRHMPGAGKRREKGDGVYQKGMDFILEKLNHGDWVHIFPEGIGRLIAECHLNPIILPLWHVGMNDVLPNSPPYFPRFGQKITVLIGKPFSALPVLERLRAENKSAVEMRKALTDFIQEEFQHLKTQAEQLHNHLQPGR

SEQ ID NO: 86616 - protein, 292 aa, Homo sapiens
  Payload ID: 17339
  Gene Symbol: TAZ
  Gene Name: tafazzin
  Uniprot ID: Q16635
  ENSP ID: ENSP00000469981
MPLHVKWPFPAVPPLTWTLASSVVMGLVGTYSCFWTKYMNHLTVHNREVLYELIEKRGPATPLITVSNHQSCMDDPHLWGILKLRHIWNLKLMRWTPAAADICFTKELHSHFFSLGKCVPVCRGAEFFQAENEGKGVLDTGRHMPGAGKRREKGDGVYQKGMDFILEKLNHGDWVHIFPEGKVNMSSEFLRFKWGIGRLIAECHLNPIILPLWHVGMNDVLPNSPPYFPRFGQKITVLIGKPFSALPVLERLRAENKSAVEMRKALTDFIQEEFQHLKTQAEQLHNHLQPGR

SEQ ID NO: 86617 - protein, 248 aa, Homo sapiens
  Payload ID: 17339
  Gene Symbol: TAZ
  Gene Name: tafazzin
  Uniprot ID: Q16635
  ENSP ID: ENSP00000478154
MPLHVKWPFPAVPPLTWTLASSVVMGLVGTYSCFWTKYMNHLTVHNREVLYELIEKRGPATPLITVSNHQSCMDDPHLWGILKLRHIWNLKLMRWTPAAADICFTKELHSHFFSLGKCVPVCRGDGVYQKGMDFILEKLNHGDWVHIFPEGIGRLIAECHLNPIILPLWHVGMNDVLPNSPPYFPRFGQKITVLIGKPFSALPVLERLRAENKSAVEMRKALTDFIQEEFQHLKTQAEQLHNHLQPGR

SEQ ID NO: 86618 - protein, 95 aa, Homo sapiens
  Payload ID: 17339
  Gene Symbol: TAZ
  Gene Name: tafazzin
  ENSP ID: ENSP00000479311
MPLHVKWPFPAVPPLTWTLASSVVMGLVGTYSCFWTKYMNHLTVHNREVLYELIEKRGPATPLITVSNHQSCMDDPHLWGILKLRHIWNLKLMRW

SEQ ID NO: 86619 - protein, 95 aa, Homo sapiens; identical to SEQ ID NO: 86618
  Payload ID: 17339
  Gene Symbol: TAZ
  Gene Name: tafazzin
  ENSP ID: ENSP00000480133

SEQ ID NO: 86620 - protein, 262 aa, Homo sapiens
  Payload ID: 17339
  Gene Symbol: TAZ
  Gene Name: tafazzin
  Uniprot ID: Q16635
  ENSP ID: ENSP00000481037
MPLHVKWPFPAVPPLTWTLASSVVMGLVGTYSCFWTKYMNHLTVHNREVLYELIEKRGPATPLITVSNHQSCMDDPHLWGILKLRHIWNLKLMRWTPAAADICFTKELHSHFFSLGKCVPVCRGDGVYQKGMDFILEKLNHGDWVHIFPEGKVNMSSEFLRFKWGIGRLIAECHLNPIILPLWHVGMNDVLPNSPPYFPRFGQKITVLIGKPFSALPVLERLRAENKSAVEMRKALTDFIQEEFQHLKTQAEQLHNHLQPGR

SEQ ID NO: 86621 - protein, 95 aa, Homo sapiens; identical to SEQ ID NO: 86618
  Payload ID: 17339
  Gene Symbol: TAZ
  Gene Name: tafazzin
  ENSP ID: ENSP00000481645

SEQ ID NO: 86622 - protein, 196 aa, Homo sapiens
  Payload ID: 17339
  Gene Symbol: TAZ
  Gene Name: tafazzin
  ENSP ID: ENSP00000482070
MPLHVKWPFPAVPPLTWTLASSVVMGLVGTYSCFWTSEWAQAEAGPPGYPCPAGEYMNHLTVHNREVLYELIEKRGPATPLITVSNHQSCMDDPHLWGILKLRHIWNLKLMRWTPAAADICFTKELHSHFFSLGKCVPVCRGDGVYQKGMDFILEKLNHGDWVHIFPEGKVNMSSEFLRFKWGIGRLIAECHLNPI

SEQ ID NO: 86623 - protein, 170 aa, Homo sapiens
  Payload ID: 17339
  Gene Symbol: TAZ
  Gene Name: tafazzin
  ENSP ID: ENSP00000483636
MPLHVKWPFPAVPPLTWTLASSVVMGLVGTYSCFWTSEWAQAEAGPPGYPCPAGEYMNHLTVHNREVLYELIEKRGPATPLITVSNHQSCMDDPHLWGILKLRHIWNLKLMRWTPAAADICFTKELHSHFFSLGKCVPVCRGAEFFQAENEGKGVLDTGRHMPGAGKRRE

SEQ ID NO: 86624 - protein, 2541 aa, Homo sapiens
  Payload ID: 17340
  Gene Symbol: TLN1
  Gene Name: talin 1
  Uniprot ID: Q9Y490
  ENSP ID: ENSP00000316029
MVALSLKISIGNVVKTMQFEPSTMVYDACRIIRERIPEAPAGPPSDFGLFLSDDDPKKGIWLEAGKALDYYMLRNGDTMEYRKKQRPLKIRMLDGTVKTIMVDDSKTVTDMLMTICARIGITNHDEYSLVRELMEEKKEEITGTLRKDKTLLRDEKKMEKLKQKLHTDDELNWLDHGRTLREQGVEEHETLLLRRKFFYSDQNVDSRDPVQLNLLYVQARDDILNGSHPVSFDKACEFAGFQCQIQFGPHNEQKHKAGFLDLKDFLPKEYVKQKGERKIFQAHKNCGQMSEIEAKVRYVKLARSLKTYGVSFFLVKEKMKGKNKLVPRLLGITKECVMRVDEKTKEVIQEWNLTNIKRWAASPKSFTLDFGDYQDGYYSVQTTEGEQIAQLIAGYIDIILKKKKSKDHFGLEGDEESTMLEDSVSPKKSTVLQQQYNRVGKVEHGSVALPAIMRSGASGPENFQVGSMPPAQQQITSGQMHRGHMPPLTSAQQALTGTINSSMQAVQAAQATLDDFDTLPPLGQDAASKAWRKNKMDESKHEIHSQVDAITAGTASVVNLTAGDPAETDYTAVGCAVTTISSNLTEMSRGVKLLAALLEDEGGSGRPLLQAAKGLAGAVSELLRSAQPASAEPRQNLLQAAGNVGQASGELLQQIGESDTDPHFQDALMQLAKAVASAAAALVLKAKSVAQRTEDSGLQTQVIAAATQCALSTSQLVACTKVVAPTISSPVCQEQLVEAGRLVAKAVEGCVSASQAATEDGQLLRGVGAAATAVTQALNELLQHVKAHATGAGPAGRYDQATDTILTVTENIFSSMGDAGEMVRQARILAQATSDLVNAIKADAEGESDLENSRKLLSAAKILADATAKMVEAAKGAAAHPDSEEQQQRLREAAEGLRMATNAAAQNAIKKKLVQRLEHAAKQAAASATQTIAAAQHAASTPKASAGPQPLLVQSCKAVAEQIPLLVQGVRGSQAQPDSPSAQLALIAASQSFLQPGGKMVAAAKASVPTIQDQASAMQLSQCAKNLGTALAELRTAAQKAQEACGPLEMDSALSVVQNLEKDLQEVKAAARDGKLKPLPGETMEKCTQDLGNSTKAVSSAIAQLLGEVAQGNENYAGIAARDVAGGLRSLAQAARGVAALTSDPAVQAIVLDTASDVLDKASSLIEEAKKAAGHPGDPESQQRLAQVAKAVTQALNRCVSCLPGQRDVDNALRAVGDASKRLLSDSLPPSTGTFQEAQSRLNEAAAGLNQAATELVQASRGTPQDLARASGRFGQDFSTFLEAGVEMAGQAPSQEDRAQVVSNLKGISMSSSKLLLAAKALSTDPAAPNLKSQLAAAARAVTDSINQLITMCTQQAPGQKECDNALRELETVRELLENPVQPINDMSYFGCLDSVMENSKVLGEAMTGISQNAKNGNLPEFGDAISTASKALCGFTEAAAQAAYLVGVSDPNSQAGQQGLVEPTQFARANQAIQMACQSLGEPGCTQAQVLSAATIVAKHTSALCNSCRLASARTTNPTAKRQFVQSAKEVANSTANLVKTIKALDGAFTEENRAQCRAATAPLLEAVDNLSAFASNPEFSSIPAQISPEGRAAMEPIVISAKTMLESAGGLIQTARALAVNPRDPPSWSVLAGHSRTVSDSIKKLITSMRDKAPGQLECETAIAALNSCLRDLDQASLAAVSQQLAPREGISQEALHTQMLTAVQEISHLIEPLANAARAEASQLGHKVSQMAQYFEPLTLAAVGAASKTLSHPQQMALLDQTKTLAESALQLLYTAKEAGGNPKQAAHTQEALEEAVQMMTEAVEDLTTTLNEAASAAGVVGGMVDSITQAINQLDEGPMGEPEGSFVDYQTTMVRTAKAIAVTVQEMVTKSNTSPEELGPLANQLTSDYGRLASEAKPAAVAAENEEIGSHIKHRVQELGHGCAALVTKAGALQCSPSDAYTKKELIECARRVSEKVSHVLAALQAGNRGTQACITAASAVSGIIADLDTTIMFATAGTLNREGTETFADHREGILKTAKVLVEDTKVLVQNAAGSQEKLAQAAQSSVATITRLADVVKLGAASLGAEDPETQVVLINAVKDVAKALGDLISATKAAAGKVGDDPAVWQLKNSAKVMVTNVTSLLKTVKAVEDEATKGTRALEATTEHIRQELAVFCSPEPPAKTSTPEDFIRMTKGITMATAKAVAAGNSCRQEDVIATANLSRRAIADMLRACKEAAYHPEVAPDVRLRALHYGRECANGYLELLDHVLLTLQKPSPELKQQLTGHSKRVAGSVTELIQAAEAMKGTEWVDPEDPTVIAENELLGAAAAIEAAAKKLEQLKPRAKPKEADESLNFEEQILEAAKSIAAATSALVKAASAAQRELVAQGKVGAIPANALDDGQWSQGLISAARMVAAATNNLCEAANAAVQGHASQEKLISSAKQVAASTAQLLVACKVKADQDSEAMKRLQAAGNAVKRASDNLVKAAQKAAAFEEQENETVVVKEKMVGGIAQIIAAQEEMLRKERELEEARKKLAQIRQQQYKFLPSELRDEH

SEQ ID NO: 86625 - protein, 2542 aa, Homo sapiens
  Payload ID: 17341
  Gene Symbol: TLN2
  Gene Name: talin 2
  Uniprot ID: Q9Y4G6
  ENSP ID: ENSP00000303476
MVALSLKICVRHCNVVKTMQFEPSTAVYDACRVIRERVPEAQTGQASDYGLFLSDEDPRKGIWLEAGRTLDYYMLRNGDILEYKKKQRPQKIRMLDGSVKTVMVDDSKTVGELLVTICSRIGITNYEEYSLIQETIEEKKEEGTGTLKKDRTLLRDERKMEKLKAKLHTDDDLNWLDHSRTFREQGVDENETLLLRRKFFYSDQNVDSRDPVQLNLLYVQARDDILNGSHPVSFEKACEFGGFQAQIQFGPHVEHKHKPGFLDLKEFLPKEYIKQRGAEKRIFQEHKNCGEMSEIEAKVKYVKLARSLRTYGVSFFLVKEKMKGKNKLVPRLLGITKDSVMRVDEKTKEVLQEWPLTTVKRWAASPKSFTLDFGEYQESYYSVQTTEGEQISQLIAGYIDIILKKKQSKDRFGLEGDEESTMLEESVSPKKSTILQQQFNRTGKAEHGSVALPAVMRSGSSGPETFNVGSMPSPQQQVMVGQMHRGHMPPLTSAQQALMGTINTSMHAVQQAQDDLSELDSLPPLGQDMASRVWVQNKVDESKHEIHSQVDAITAGTASVVNLTAGDPADTDYTAVGCAITTISSNLTEMSKGVKLLAALMDDEVGSGEDLLRAARTLAGAVSDLLKAVQPTSGEPRQTVLTAAGSIGQASGDLLRQIGENETDERFQDVLMSLAKAVANAAAMLVLKAKNVAQVAEDTVLQNRVIAAATQCALSTSQLVACAKVVSPTISSPVCQEQLIEAGKLVDRSVENCVRACQAATTDSELLKQVSAAASVVSQALHDLLQHVRQFASRGEPIGRYDQATDTIMCVTESIFSSMGDAGEMVRQARVLAQATSDLVNAMRSDAEAEIDMENSKKLLAAAKLLADSTARMVEAAKGAAANPENEDQQQRLREAAEGLRVATNAAAQNAIKKKIVNRLEVAAKQAAAAATQTIAASQNAAVSNKNPAAQQQLVQSCKAVADHIPQLVQGVRGSQAQAEDLSAQLALIISSQNFLQPGSKMVSSAKAAVPTVSDQAAAMQLSQCAKNLATSLAELRTASQKAHEACGPMEIDSALNTVQTLKNELQDAKMAAVESQLKPLPGETLEKCAQDLGSTSKAVGSSMAQLLTCAAQGNEHYTGVAARETAQALKTLAQAARGVAASTTDPAAAHAMLDSARDVMEGSAMLIQEAKQALIAPGDAERQQRLAQVAKAVSHSLNNCVNCLPGQKDVDVALKSIGESSKKLLVDSLPPSTKPFQEAQSELNQAAADLNQSAGEVVHATRGQSGELAAASGKFSDDFDEFLDAGIEMAGQAQTKEDQIQVIGNLKNISMASSKLLLAAKSLSVDPGAPNAKNLLAAAARAVTESINQLITLCTQQAPGQKECDNALRELETVKGMLDNPNEPVSDLSYFDCIESVMENSKVLGESMAGISQNAKTGDLPAFGECVGIASKALCGLTEAAAQAAYLVGISDPNSQAGHQGLVDPIQFARANQAIQMACQNLVDPGSSPSQVLSAATIVAKHTSALCNACRIASSKTANPVAKRHFVQSAKEVANSTANLVKTIKALDGDFSEDNRNKCRIATAPLIEAVENLTAFASNPEFVSIPAQISSEGSQAQEPILVSAKTMLESSSYLIRTARSLAINPKDPPTWSVLAGHSHTVSDSIKSLITSIRDKAPGQRECDYSIDGINRCIRDIEQASLAAVSQSLATRDDISVEALQEQLTSVVQEIGHLIDPIATAARGEAAQLGHKVTQLASYFEPLILAAVGVASKILDHQQQMTVLDQTKTLAESALQMLYAAKEGGGNPKAQHTHDAITEAAQLMKEAVDDIMVTLNEAASEVGLVGGMVDAIAEAMSKLDEGTPPEPKGTFVDYQTTVVKYSKAIAVTAQEMMTKSVTNPEELGGLASQMTSDYGHLAFQGQMAAATAEPEEIGFQIRTRVQDLGHGCIFLVQKAGALQVCPTDSYTKRELIECARAVTEKVSLVLSALQAGNKGTQACITAATAVSGIIADLDTTIMFATAGTLNAENSETFADHRENILKTAKALVEDTKLLVSGAASTPDKLAQAAQSSAATITQLAEVVKLGAASLGSDDPETQVVLINAIKDVAKALSDLISATKGAASKPVDDPSMYQLKGAAKVMVTNVTSLLKTVKAVEDEATRGTRALEATIECIKQELTVFQSKDVPEKTSSPEESIRMTKGITMATAKAVAAGNSCRQEDVIATANLSRKAVSDMLTACKQASFHPDVSDEVRTRALRFGTECTLGYLDLLEHVLVILQKPTPEFKQQLAAFSKRVAGAVTELIQAAEAMKGTEWVDPEDPTVIAETELLGAAASIEAAAKKLEQLKPRAKPKQADETLDFEEQILEAAKSIAAATSALVKSASAAQRELVAQGKVGSIPANAADDGQWSQGLISAARMVAAATSSLCEAANASVQGHASEEKLISSAKQVAASTAQLLVACKVKADQDSEAMRRLQAAGNAVKRASDNLVRAAQKAAFGKADDDDVVVKTKFVGGIAQIIAAQEEMLKKERELEEARKKLAQIRQQQYKFLPTELREDEG

SEQ ID NO: 86626 - protein, 2542 aa, Homo sapiens; identical to SEQ ID NO: 86625
  Payload ID: 17341
  Gene Symbol: TLN2
  Gene Name: talin 2
  Uniprot ID: Q9Y4G6
  ENSP ID: ENSP00000453508

SEQ ID NO: 86627 - protein, 1471 aa, Homo sapiens
  Payload ID: 17341
  Gene Symbol: TLN2
  Gene Name: talin 2
  ENSP ID: ENSP00000453730
EKCAQDLGSTSKAVGSSMAQLLTCAAQGNEHYTGVAARETAQALKTLAQAARGVAASTTDPAAAHAMLDSARDVMEGSAMLIQEAKQALIAPGDAERQQRLAQVAKAVSHSLNNCVNCLPGQKDVDVALKSIGESSKKLLVDSLPPSTKPFQEAQSELNQAAADLNQSAGEVVHATRGQSGELAAASGKFSDDFDEFLDAGIEMAGQAQTKEDQIQVIGNLKNISMASSKLLLAAKSLSVDPGAPNAKNLLAAAARAVTESINQLITLCTQQAPGQKECDNALRELETVKGMLDNPNEPVSDLSYFDCIESVMENSKVLGESMAGISQNAKTGDLPAFGECVGIASKALCGLTEAAAQAAYLVGISDPNSQAGHQGLVDPIQFARANQAIQMACQNLVDPGSSPSQVLSAATIVAKHTSALCNACRIASSKTANPVAKRHFVQSAKEVANSTANLVKTIKALDGDFSEDNRNKCRIATAPLIEAVENLTAFASNPEFVSIPAQISSEGSQAQEPILVSAKTMLESSSYLIRTARSLAINPKDPPTWSVLAGHSHTVSDSIKSLITSIRDKAPGQRECDYSIDGINRCIRDIEQASLAAVSQSLATRDDISVEALQEQLTSVVQEIGHLIDPIATAARGEAAQLGHKVTQLASYFEPLILAAVGVASKILDHQQQMTVLDQTKTLAESALQMLYAAKEGGGNPKAQHTHDAITEAAQLMKEAVDDIMVTLNEAASEVGLVGGMVDAIAEAMSKLDEGTPPEPKGTFVDYQTTVVKYSKAIAVTAQEMMTKSVTNPEELGGLASQMTSDYGHLAFQGQMAAATAEPEEIGFQIRTRVQDLGHGCIFLVQKAGALQVCPTDSYTKRELIECARAVTEKVSLVLSALQAGNKGTQACITAATAVSGIIADLDTTIMFATAGTLNAENSETFADHRENILKTAKALVEDTKLLVSGAASTPDKLAQAAQSSAATITQLAEVVKLGAASLGSDDPETQVVLINAIKDVAKALSDLISATKGAASKPVDDPSMYQLKGAAKVMVTNVTSLLKTVKAVEDEATRGTRALEATIECIKQELTVFQSKDVPEKTSSPEESIRMTKGITMATAKAVAAGNSCRQEDVIATANLSRKAVSDMLTACKQASFHPDVSDEVRTRALRFGTECTLGYLDLLEHVLVILQKPTPEFKQQLAAFSKRVAGAVTELIQAAEAMKGTEWVDPEDPTVIAETELLGAAASIEAAAKKLEQLKPRAKPKQADETLDFEEQILEAAKSIAAATSALVKSASAAQRELVAQGKVGSIPANAADDGQWSQGLISAARMVAAATSSLCEAANASVQGHASEEKLISSAKQVAASTAQLLVACKVKADQDSEAMRRLQVMVTDAGGKILLLERAAGNAVKRASDNLVRAAQKAAFGKADDDDVVVKTKFVGGIAQIIAAQEEMLKKERELEEARKKLAQIRQQQYKFLPTELREDEG

SEQ ID NO: 86628 - protein, 330 aa, Homo sapiens
  Payload ID: 17341
  Gene Symbol: TLN2
  Gene Name: talin 2
  ENSP ID: ENSP00000453812
MLESSSYLIRTARSLAINPKDPPTWSVLAGHSHTVSDSIKSLITSIRDKAPGQRECDYSIDGINRCIRDIEQASLAAVSQSLATRDDISVEALQEQLTSVVQEIGHLIDPIATAARGEAAQLGHKVTQLASYFEPLILAAVGVASKILDHQQQMTVLDQTKTLAESALQMLYAAKEGGGNPKAQHTHDAITEAAQLMKEAVDDIMVTLNEAASEVGLVGGMVDAIAEAMSKLDEGTPPEPKGTFVDYQTTVVKYSKAIAVTAQEMMTKSVTNPEELGGLASQMTSDYGHLAFQGQMAAATAEPEEVCHLKTPILRCTHTLVPTPGYFFIA

SEQ ID NO: 86629 - protein, 316 aa, Homo sapiens
  Payload ID: 17342
  Gene Symbol: TAMM41
  Gene Name: TAM41 mitochondrial translocator assembly and maintenance homolog
  Uniprot ID: Q96BW9
  ENSP ID: ENSP00000273037
MALQTLQSSWVTFRKILSHFPEELSLAFVYGSGVYRQAGPSSDQKNAMLDFVFTVDDPVAWHSKNLKKNWSHYSFLKVLGPKIITSIQNNYGAGVYYNSLIMCNGRLIKYGVISTNVLIEDLLNWNNLYIAGRLQKPVKIISVNEDVTLRSALDRNLKSAVTAAFLMLPESFSEEDLFIEIAGLSYSGDFRMVVGEDKTKVLNIVKPNIAHFRELYGSILQENPQVVYKSQQGWLEIDKSPEGQFTQLMTLPKTLQQQINHIMDPPGKNRDVEETLFQVAHDPDCGDVVRLGLKKSVIYSSLKLHKMWKGWLRKTS

SEQ ID NO: 86630 - protein, 452 aa, Homo sapiens
  Payload ID: 17342
  Gene Symbol: TAMM41
  Gene Name: TAM41 mitochondrial translocator assembly and maintenance homolog
  Uniprot ID: Q96BW9
  ENSP ID: ENSP00000388598
MALQTLQSSWVTFRKILSHFPEELSLAFVYGSGVYRQAGPSSDQKNAMLDFVFTVDDPVAWHSKNLKKNWSHYSFLKVLGPKIITSIQNNYGAGVYYNSLIMCNGRLIKYGVISTNVLIEDLLNWNNLYIAGRLQKPVKIISVNEDVTLRSALDRNLKSAVTAAFLMLPESFSEEDLFIEIAGLSYSGDFRMVVGEDKTKVLNIVKPNIAHFRELYGSILQENPQVVYKSQQGWLEIDKSPEGQFTQLMTLPKTLQQQINHIMDPPGKNRDVEETLFQVAHDPDCGDVVRLGLSAIVRPSSIRQSTKGIFTAGKSFGNPCVTYLLTEWLPHSWLQCKALYLLGACEMLSFDGHKLGYCSKVQTGITAAEPGGRTMSDHWQCCWKLYCPSEFSETLPVCRVFPSYCFIYQSYRCIGLQKQQHLCSPSSSPSLRQLLPSVLVGYFCCYCHFSKW

SEQ ID NO: 86631 - protein, 107 aa, Homo sapiens; identical to SEQ ID NO: 1120
  Payload ID: 17342
  Gene Symbol: TAMM41
  Gene Name: TAM41 mitochondrial translocator assembly and maintenance homolog
  ENSP ID: ENSP00000390910

SEQ ID NO: 86632 - protein, 151 aa, Homo sapiens
  Payload ID: 17342
  Gene Symbol: TAMM41
  Gene Name: TAM41 mitochondrial translocator assembly and maintenance homolog
  ENSP ID: ENSP00000392289
MALQTLQSSWVTFRKILSHFPEELSLAFVYGSGVYRQAGPSSDQKNAMLDFVFTVDDPVAWHSKNLKKNWSHYSFLKVLGPKIITSIQNNYGAGVYYNSLIMCNGRLIKYGVISTNVLIEDLLNWNNLYIAGRLQKPASLAVSQEFTGFSL

SEQ ID NO: 86633 - protein, 337 aa, Homo sapiens
  Payload ID: 17342
  Gene Symbol: TAMM41
  Gene Name: TAM41 mitochondrial translocator assembly and maintenance homolog
  Uniprot ID: Q96BW9
  ENSP ID: ENSP00000398596
MALQTLQSSWVTFRKILSHFPEELSLAFVYGSGVYRQAGPSSDQKNAMLDFVFTVDDPVAWHSKNLKKNWSHYSFLKVLGPKIITSIQNNYGAGVYYNSLIMCNGRLIKYGVISTNVLIEDLLNWNNLYIAGRLQKPVKIISVNEDVTLRSALDRNLKSAVTAAFLMLPESFSEEDLFIEIAGLSYSGDFRMVVGEDKTKVLNIVKPNIAHFRELYGSILQENPQVVYKSQQGWLEIDKSPEGQFTQLMTLPKTLQQQINHIMDPPGKNRDVEETLFQVAHDPDCGDVVRLGLSAIVRPSSIRQSTKGIFTAGLKKSVIYSSLKLHKMWKGWLRKTS

SEQ ID NO: 86634 - protein, 55 aa, Homo sapiens
  Payload ID: 17342
  Gene Symbol: TAMM41
  Gene Name: TAM41 mitochondrial translocator assembly and maintenance homolog
  ENSP ID: ENSP00000399218
  MOD_RES (1)..(1): Any amino acid
XDFRMVVGEDKTKVLNIVKPNIAHFRELYGSILQENPQVVYKSQQGWLEVTVCGK

SEQ ID NO: 86635 - protein, 151 aa, Homo sapiens; identical to SEQ ID NO: 86632
  Payload ID: 17342
  Gene Symbol: TAMM41
  Gene Name: TAM41 mitochondrial translocator assembly and maintenance homolog
  ENSP ID: ENSP00000406054

SEQ ID NO: 86636 - protein, 151 aa, Homo sapiens; identical to SEQ ID NO: 86632
  Payload ID: 17342
  Gene Symbol: TAMM41
  Gene Name: TAM41 mitochondrial translocator assembly and maintenance homolog
  ENSP ID: ENSP00000485057

SEQ ID NO: 86637 - protein, 151 aa, Homo sapiens; identical to SEQ ID NO: 86632
  Payload ID: 17342
  Gene Symbol: TAMM41
  Gene Name: TAM41 mitochondrial translocator assembly and maintenance homolog
  ENSP ID: ENSP00000485060

SEQ ID NO: 86638 - protein, 107 aa, Homo sapiens; identical to SEQ ID NO: 1120
  Payload ID: 17342
  Gene Symbol: TAMM41
  Gene Name: TAM41 mitochondrial translocator assembly and maintenance homolog
  ENSP ID: ENSP00000485177

SEQ ID NO: 86639 - protein, 55 aa, Homo sapiens; identical to SEQ ID NO: 86634
  Payload ID: 17342
  Gene Symbol: TAMM41
  Gene Name: TAM41 mitochondrial translocator assembly and maintenance homolog
  ENSP ID: ENSP00000485204
  MOD_RES (1)..(1): Any amino acid

SEQ ID NO: 86640 - protein, 236 aa, Homo sapiens
  Payload ID: 17342
  Gene Symbol: TAMM41
  Gene Name: TAM41 mitochondrial translocator assembly and maintenance homolog
  ENSP ID: ENSP00000485433
MALQTLQSSWVTFRKILSHFPEELSLAFVYGSGVYRQAGPSSDQKNAMLDFVFTVDDPVAWHSKNLKKNWSHYSFLKVLGPKIITSIQNNYGAGVYYNSLIMCNGRLIKYGVISTNVLIEDLLNWNNLYIAGRLQKPVKIISVNEDVTLRSALDRNLKSAVTAAFLMLPESFSEEDLFIEIAGLSYSGDFRMVVGEDKTKVLNIVKPNIAHFRELYGSILQENPQVVYKSQQGWLE

SEQ ID NO: 86641 - protein, 236 aa, Homo sapiens; identical to SEQ ID NO: 86640
  Payload ID: 17342
  Gene Symbol: TAMM41
  Gene Name: TAM41 mitochondrial translocator assembly and maintenance homolog
  ENSP ID: ENSP00000485550

SEQ ID NO: 86642 - protein, 236 aa, Homo sapiens; identical to SEQ ID NO: 86640
  Payload ID: 17342
  Gene Symbol: TAMM41
  Gene Name: TAM41 mitochondrial translocator assembly and maintenance homolog
  ENSP ID: ENSP00000485654

SEQ ID NO: 86643 - protein, 107 aa, Homo sapiens; identical to SEQ ID NO: 1120
  Payload ID: 17342
  Gene Symbol: TAMM41
  Gene Name: TAM41 mitochondrial translocator assembly and maintenance homolog
  ENSP ID: ENSP00000486481

SEQ ID NO: 86644 - protein, 490 aa, Homo sapiens
  Payload ID: 17343
  Gene Symbol: TC2N
  Gene Name: tandem C2 domains, nuclear
  Uniprot ID: Q8N9U0
  ENSP ID: ENSP00000343199
MATEFIKSCCGGCFYGETEKHNFSVERDFKAAVPNSQNATISVPPLTSVSVKPQLGCTEDYLLSKLPSDGKEVPFVVPKFKLSYIQPRTQETPSHLEELEGSARASFGDRKVELSSSSQHGPSYDVYNPFYMYQHISPDLSRRFPPRSEVKRLYGSVCDLRTNKLPGSPGLSKSMFDLTNSSQRFIQRHDSLSSVPSSSSSRKNSQGSNRSLDTITLSGDERDFGRLNVKLFYNSSVEQIWITVLQCRDLSWPSSYGDTPTVSIKGILTLPKPVHFKSSAKEGSNAIEFMETFVFAIKLQNLQTVRLVFKIQTQTPRKKTIGECSMSLRTLSTQEMDYSLDITPPSKISVCHAELELGTCFQAVNSRIQLQILEARYLPSSSTPLTLSFFVKVGMFSSGELIYKKKTRLLKASNGRVKWGETMIFPLIQSEKEIVFLIKLYSRSSVRRKHFVGQIWISEDSNNIEAVNQWKETVINPEKVVIRWHKLNPS

SEQ ID NO: 86645 - protein, 490 aa, Homo sapiens; identical to SEQ ID NO: 86644
  Payload ID: 17343
  Gene Symbol: TC2N
  Gene Name: tandem C2 domains, nuclear
  Uniprot ID: Q8N9U0
  ENSP ID: ENSP00000353802

SEQ ID NO: 86646 - protein, 490 aa, Homo sapiens; identical to SEQ ID NO: 86644
  Payload ID: 17343
  Gene Symbol: TC2N
  Gene Name: tandem C2 domains, nuclear
  Uniprot ID: Q8N9U0
  ENSP ID: ENSP00000387882

SEQ ID NO: 86647 - protein, 242 aa, Homo sapiens
  Payload ID: 17343
  Gene Symbol: TC2N
  Gene Name: tandem C2 domains, nuclear
  ENSP ID: ENSP00000450922
RSLDTITLSGDERDFGRLNVKLFYNSSVEQIWITVLQAIEFMETFVFAIKLQNLQTVRLVFKIQTQTPRKKTIGECSMSLRTLSTQEMDYSLDITPPSKISVCHAELELGTCFQAVNSRIQLQILEARYLPSSSTPLTLSFFVKVGMFSSGELIYKKKTRLLKASNGRVKWGETMIFPLIQSEKEIVFLIKLYSRSSVRRKHFVGQIWISEDSNNIEAVNQWKETVINPEKVVIRWHKLNPS

SEQ ID NO: 86648 - protein, 426 aa, Homo sapiens
  Payload ID: 17343
  Gene Symbol: TC2N
  Gene Name: tandem C2 domains, nuclear
  Uniprot ID: Q8N9U0
  ENSP ID: ENSP00000451317
MATEFIKSCCGGCFYGETEKHNFSVERDFKAAVPNSQNATISVPPLTSVSVKPQLGCTEDYLLSKLPSDGKEVPFVVPKFKLSYIQPRTQETPSHLEELEGSARASFGDRKVELSSSSQHGPSYDVYNPFYMYQHISPDLSRRFPPRSEVKRLYGSVCDLRTNKLPGSPGLSKSMFDLTNSSQRFIQRHDSLSSVPSSSSSRKNSQGSNRSLDTITLSGDERDFGRLNVKLFYNSSVEQIWITVLQCRDLSWPSSYGDTPTVSIKGILTLPKPVHFKSSAKEGSNVCHAELELGTCFQAVNSRIQLQILEARYLPSSSTPLTLSFFVKVGMFSSGELIYKKKTRLLKASNGRVKWGETMIFPLIQSEKEIVFLIKLYSRSSVRRKHFVGQIWISEDSNNIEAVNQWKETVINPEKVVIRWHKLNPS

SEQ ID NO: 86649 - protein, 490 aa, Homo sapiens; identical to SEQ ID NO: 86644
  Payload ID: 17343
  Gene Symbol: TC2N
  Gene Name: tandem C2 domains, nuclear
  Uniprot ID: Q8N9U0
  ENSP ID: ENSP00000478127

SEQ ID NO: 86650 - protein, 490 aa, Homo sapiens; identical to SEQ ID NO: 86644
  Payload ID: 17343
  Gene Symbol: TC2N
  Gene Name: tandem C2 domains, nuclear
  Uniprot ID: Q8N9U0
  ENSP ID: ENSP00000483305

SEQ ID NO: 86651 - protein, 490 aa, Homo sapiens; identical to SEQ ID NO: 86644
  Payload ID: 17343
  Gene Symbol: TC2N
  Gene Name: tandem C2 domains, nuclear
  Uniprot ID: Q8N9U0
  ENSP ID: ENSP00000487608

SEQ ID NO: 86652 - protein, 242 aa, Homo sapiens; identical to SEQ ID NO: 86647
  Payload ID: 17343
  Gene Symbol: TC2N
  Gene Name: tandem C2 domains, nuclear
  ENSP ID: ENSP00000488045

SEQ ID NO: 86653 - protein, 426 aa, Homo sapiens; identical to SEQ ID NO: 86648
  Payload ID: 17343
  Gene Symbol: TC2N
  Gene Name: tandem C2 domains, nuclear
  Uniprot ID: Q8N9U0
  ENSP ID: ENSP00000488431

SEQ ID NO: 86654 - protein, 729 aa, Homo sapiens
  Payload ID: 17344
  Gene Symbol: TBK1
  Gene Name: TANK-binding kinase 1
  Uniprot ID: Q9UHD2
  ENSP ID: ENSP00000329967
MQSTSNHLWLLSDILGQGATANVFRGRHKKTGDLFAIKVFNNISFLRPVDVQMREFEVLKKLNHKNIVKLFAIEEETTTRHKVLIMEFCPCGSLYTVLEEPSNAYGLPESEFLIVLRDVVGGMNHLRENGIVHRDIKPGNIMRVIGEDGQSVYKLTDFGAARELEDDEQFVSLYGTEEYLHPDMYERAVLRKDHQKKYGATVDLWSIGVTFYHAATGSLPFRPFEGPRRNKEVMYKIITGKPSGAISGVQKAENGPIDWSGDMPVSCSLSRGLQVLLTPVLANILEADQEKCWGFDQFFAETSDILHRMVIHVFSLQQMTAHKIYIHSYNTATIFHELVYKQTKIISSNQELIYEGRRLVLEPGRLAQHFPKTTEENPIFVVSREPLNTIGLIYEKISLPKVHPRYDLDGDASMAKAITGVVCYACRIASTLLLYQELMRKGIRWLIELIKDDYNETVHKKTEVVITLDFCIRNIEKTVKVYEKLMKINLEAAELGEISDIHTKLLRLSSSQGTIETSLQDIDSRLSPGGSLADAWAHQEGTHPKDRNVEKLQVLLNCMTEIYYQFKKDKAERRLAYNEEQIHKFDKQKLYYHATKAMTHFTDECVKKYEAFLNKSEEWIRKMLHLRKQLLSLTNQCFDIEEEVSKYQEYTNELQETLPQKMFTASSGIKHTMTPIYPSSNTLVEMTLGMKKLKEEMEGVVKELAENNHILERFGSLTMDGGLRNVDCL

SEQ ID NO: 86655 - protein, 48 aa, Homo sapiens
  Payload ID: 17344
  Gene Symbol: TBK1
  Gene Name: TANK-binding kinase 1
  ENSP ID: ENSP00000444428
MREFEVLKKLNHKNIVKLFAIEEETTTRHKVLIMEFCPCGSLYTVLEE

SEQ ID NO: 86656 - protein, 98 aa, Homo sapiens
  Payload ID: 17344
  Gene Symbol: TBK1
  Gene Name: TANK-binding kinase 1
  ENSP ID: ENSP00000445628
MQSTSNHLWLLSDILGQGATANVFRGRHKKTGDLFAIKVFNNISFLRPVDVQMREFEVLKKLNHKNIVKLFAIEEETTTRHKVLIMEFCPCGSLYTVL

SEQ ID NO: 86657 - protein, 103 aa, Homo sapiens
  Payload ID: 17344
  Gene Symbol: TBK1
  Gene Name: TANK-binding kinase 1
  ENSP ID: ENSP00000445834
MQSTSNHLWLLSDILGQGATANVFRGRHKKTGDLFAIKVFNNISFLRPVDVQMREFEVLKKLNHKNIVKLFAIEEETTTRHKVLIMEFCPCGSLYTVLEEPSN

SEQ ID NO: 86658 - protein, 1729 aa, Homo sapiens
  Payload ID: 17345
  Gene Symbol: TNKS1BP1
  Gene Name: tankyrase 1 binding protein 1, 182kDa
  Uniprot ID: Q9C0C2
  ENSP ID: ENSP00000350990
MKVSTLRESSAMASPLPREMEEELVPTGSEPGDTRAKPPVKPKPRALPAKPALPAKPSLLVPVGPRPPRGPLAELPSARKMNMLAGPQPYGGSKRPLPFAPRPAVEASTGGEATQETGKEEAGKEEPPPLTPPARCAAPGGVRKAPAPFRPASERFAATTVEEILAKMEQPRKEVLASPDRLWGSRLTFNHDGSSRYGPRTYGTTTAPRDEDGSTLFRGWSQEGPVKSPAECREEHSKTPEERSLPSDLAFNGDLAKAASSELPADISKPWIPSSPAPSSENGGPASPGLPAEASGSGPGSPHLHPPDKSSPCHSQLLEAQTPEASQASPCPAVTPSAPSAALPDEGSRHTPSPGLPAEGAPEAPRPSSPPPEVLEPHSLDQPPATSPRPLIEVGELLDLTRTFPSGGEEEAKGDAHLRPTSLVQRRFSEGVLQSPSQDQEKLGGSLAALPQGQGSQLALDRPFGAESNWSLSQSFEWTFPTRPSGLGVWRLDSPPPSPITEASEAAEAAEAGNLAVSSREEGVSQQGQGAGSAPSGSGSSWVQGDDPSMSLTQKGDGESQPQFPAVPLEPLPTTEGTPGLPLQQAEERYESQEPLAGQESPLPLATREAALPILEPVLGQEQPAAPDQPCVLFADAPEPGQALPVEEEAVTLARAETTQARTEAQDLCRASPEPPGPESSSRWLDDLLASPPPSGGGARRGAGAELKDTQSPSTCSEGLLGWSQKDLQSEFGITGDPQPSSFSPSSWCQGASQDYGLGGASPRGDPGLGERDWTSKYGQGAGEGSTREWASRCGIGQEEMEASSSQDQSKVSAPGVLTAQDRVVGKPAQLGTQRSQEADVQDWEFRKRDSQGTYSSRDAELQDQEFGKRDSLGTYSSRDVSLGDWEFGKRDSLGAYASQDANEQGQDLGKRDHHGRYSSQDADEQDWEFQKRDVSLGTYGSRAAEPQEQEFGKSAWIRDYSSGGSSRTLDAQDRSFGTRPLSSGFSPEEAQQQDEEFEKKIPSVEDSLGEGSRDAGRPGERGSGGLFSPSTAHVPDGALGQRDQSSWQNSDASQEVGGHQERQQAGAQGPGSADLEDGEMGKRGWVGEFSLSVGPQREAAFSPGQQDWSRDFCIEASERSYQFGIIGNDRVSGAGFSPSSKMEGGHFVPPGKTTAGSVDWTDQLGLRNLEVSSCVGSGGSSEARESAVGQMGWSGGLSLRDMNLTGCLESGGSEEPGGIGVGEKDWTSDVNVKSKDLAEVGEGGGHSQARESGVGQTDWSGVEAGEFLKSRERGVGQADWTPDLGLRNMAPGAVCSPGESKELGVGQMDWGNNLGLRDLEVTCDPDSGGSQGLRGCGVGQMDWTQDLAPQNVELFGAPSEAREHGVGGVSQCPEPGLRHNGSLSPGLEARDPLEARELGVGETSGPETQGEDYSSSSLEPHPADPGMETGEALSFGASPGRCPARPPPSGSQGLLEEMLAASSSKAVARRESAASGLGGLLEEEGAGAGAAQEEVLEPGRDSPPSWRPQPDGEASQTEDVDGTWGSSAARWSDQGPAQTSRRPSQGPPARSPSQDFSFIEDTEILDSAMYRSRANLGRKRGHRAPVIRPGGTLGLSEAADSDAHLFQDSTEPRASRVPSSDEEVVEEPQSRRTRMSLGTKGLKVNLFPGLSPSALKAKLRPRNRSAEEGELAESKSSQKESAVQRSKSCKVPGLGKPLTLPPKPEKSSGSEGSSPNWLQALKLKKKKV

SEQ ID NO: 86659 - protein, 243 aa, Homo sapiens
  Payload ID: 17345
  Gene Symbol: TNKS1BP1
  Gene Name: tankyrase 1 binding protein 1, 182kDa
  ENSP ID: ENSP00000431616
MKVSTLRESSAMASPLPREMEEELVPTGSEPGDTRAKPPVKPKPRALPAKPALPAKPSLLVPVGPRPPRGPLAELPSARKMNMLAGPQPYGGSKRPLPFAPRPAVEASTGGEATQETGKEEAGKEEPPPLTPPARCAAPGGVRKAPAPFRPASERFAATTVEEILAKMEQPRKEVLASPDRLWGSRLTFNHDGSSRYGPRTYGTTTAPRDEDGSTLFRGWSQEGPVKSPAECREEHSKTPEER

SEQ ID NO: 86660 - protein, 143 aa, Homo sapiens
  Payload ID: 17345
  Gene Symbol: TNKS1BP1
  Gene Name: tankyrase 1 binding protein 1, 182kDa
  ENSP ID: ENSP00000433576
MKVSTLRESSAMASPLPREMEEELVPTGSEPGDTRAKPPVKPKPRALPAKPALPAKPSLLVPVGPRPPRGPLAELPSARKMNMLAGPQPYGGSKRPLPFAPRPAVEASTGGEATQETGKEEAGKEEPPPLTPPARCAAPGGVR

SEQ ID NO: 86661 - protein, 1729 aa, Homo sapiens; identical to SEQ ID NO: 86658
  Payload ID: 17345
  Gene Symbol: TNKS1BP1
  Gene Name: tankyrase 1 binding protein 1, 182kDa
  Uniprot ID: Q9C0C2
  ENSP ID: ENSP00000437271

SEQ ID NO: 86662 - protein, 1327 aa, Homo sapiens
  Payload ID: 17346
  Gene Symbol: TNKS
  Gene Name: tankyrase, TRF1-interacting ankyrin-related ADP-ribose polymerase
  Uniprot ID: O95271
  ENSP ID: ENSP00000311579
MAASRRSQHHHHHHQQQLQPAPGASAPPPPPPPPLSPGLAPGTTPASPTASGLAPFASPRHGLALPEGDGSRDPPDRPRSPDPVDGTSCCSTTSTICTVAAAPVVPAVSTSSAAGVAPNPAGSGSNNSPSSSSSPTSSSSSSPSSPGSSLAESPEAAGVSSTAPLGPGAAGPGTGVPAVSGALRELLEACRNGDVSRVKRLVDAANVNAKDMAGRKSSPLHFAAGFGRKDVVEHLLQMGANVHARDDGGLIPLHNACSFGHAEVVSLLLCQGADPNARDNWNYTPLHEAAIKGKIDVCIVLLQHGADPNIRNTDGKSALDLADPSAKAVLTGEYKKDELLEAARSGNEEKLMALLTPLNVNCHASDGRKSTPLHLAAGYNRVRIVQLLLQHGADVHAKDKGGLVPLHNACSYGHYEVTELLLKHGACVNAMDLWQFTPLHEAASKNRVEVCSLLLSHGADPTLVNCHGKSAVDMAPTPELRERLTYEFKGHSLLQAAREADLAKVKKTLALEIINFKQPQSHETALHCAVASLHPKRKQVTELLLRKGANVNEKNKDFMTPLHVAAERAHNDVMEVLHKHGAKMNALDTLGQTALHRAALAGHLQTCRLLLSYGSDPSIISLQGFTAAQMGNEAVQQILSESTPIRTSDVDYRLLEASKAGDLETVKQLCSSQNVNCRDLEGRHSTPLHFAAGYNRVSVVEYLLHHGADVHAKDKGGLVPLHNACSYGHYEVAELLVRHGASVNVADLWKFTPLHEAAAKGKYEICKLLLKHGADPTKKNRDGNTPLDLVKEGDTDIQDLLRGDAALLDAAKKGCLARVQKLCTPENINCRDTQGRNSTPLHLAAGYNNLEVAEYLLEHGADVNAQDKGGLIPLHNAASYGHVDIAALLIKYNTCVNATDKWAFTPLHEAAQKGRTQLCALLLAHGADPTMKNQEGQTPLDLATADDIRALLIDAMPPEALPTCFKPQATVVSASLISPASTPSCLSAASSIDNLTGPLAELAVGGASNAGDGAAGTERKEGEVAGLDMNISQFLKSLGLEHLRDIFETEQITLDVLADMGHEELKEIGINAYGHRHKLIKGVERLLGGQQGTNPYLTFHCVNQGTILLDLAPEDKEYQSVEEEMQSTIREHRDGGNAGGIFNRYNVIRIQKVVNKKLRERFCHRQKEVSEENHNHHNERMLFHGSPFINAIIHKGFDERHAYIGGMFGAGIYFAENSSKSNQYVYGIGGGTGCPTHKDRSCYICHRQMLFCRVTLGKSFLQFSTMKMAHAPPGHHSVIGRPSVNGLAYAEYVIYRGEQAYPEYLITYQIMKPEAPSQTATAAEQKT

SEQ ID NO: 86663 - protein, 61 aa, Homo sapiens
  Payload ID: 17346
  Gene Symbol: TNKS
  Gene Name: tankyrase, TRF1-interacting ankyrin-related ADP-ribose polymerase
  ENSP ID: ENSP00000428185
LGKSFLQFSTMKMAHAPPGHHSVIGRPSVNGLAYAEYVIYRGEQVDTLKARHLCSIPAKNT

SEQ ID NO: 86664 - protein, 617 aa, Homo sapiens
  Payload ID: 17346
  Gene Symbol: TNKS
  Gene Name: tankyrase, TRF1-interacting ankyrin-related ADP-ribose polymerase
  ENSP ID: ENSP00000428299
MAASRRSQHHHHHHQQQLQPAPGASAPPPPPPPPLSPGLAPGTTPASPTASGLAPFASPRHGLALPEGDGSRDPPDRPRSPDPVDGTSCCSTTSTICTVAAAPVVPAVSTSSAAGVAPNPAGSGSNNSPSSSSSPTSSSSSSPSSPGSSLAESPEAAGVSSTAPLGPGAAGPGTGVPAVSGALRELLEACRNGDVSRVKRLVDAANVNAKDMAGRKSSPLHFAAGFGRKDVVEHLLQMGANVHARDDGGLIPLHNACSFGHAEVVSLLLCQGADPNARDNWNYTPLHEAAIKGKIDVCIVLLQHGADPNIRNTDGKSALDLADPSAKAVLTGEYKKDELLEAARSGNEEKLMALLTPLNVNCHASDGRKSTPLHLAAGYNRVRIVQLLLQHGADVHAKDKGGLVPLHNACSYGHYEVTELLLKHGACVNAMDLWQFTPLHEAASKNRVEVCSLLLSHGADPTLVNCHGKSAVDMAPTPELRERLTYEFKGHSLLQAAREADLAKVKKTLALEIINFKQPQSHETALHCAVASLHPKRKQVTELLLRKGANVNEKNKDFMTPLHVAAERAHNDVMEVLHKHGAKVRHTPEQSARLSTEQPAALNTASLSPIFLKKLIL

SEQ ID NO: 86665 - protein, 1090 aa, Homo sapiens
  Payload ID: 17346
  Gene Symbol: TNKS
  Gene Name: tankyrase, TRF1-interacting ankyrin-related ADP-ribose polymerase
  ENSP ID: ENSP00000429890
MGANVHARDDGGLIPLHNACSFGHAEVVSLLLCQGADPNARDNWNYTPLHEAAIKGKIDVCIVLLQHGADPNIRNTDGKSALDLADPSAKAVLTGEYKKDELLEAARSGNEEKLMALLTPLNVNCHASDGRKSTPLHLAAGYNRVRIVQLLLQHGADVHAKDKGGLVPLHNACSYGHYEVTELLLKHGACVNAMDLWQFTPLHEAASKNRVEVCSLLLSHGADPTLVNCHGKSAVDMAPTPELRERLTYEFKGHSLLQAAREADLAKVKKTLALEIINFKQPQSHETALHCAVASLHPKRKQVTELLLRKGANVNEKNKDFMTPLHVAAERAHNDVMEVLHKHGAKMNALDTLGQTALHRAALAGHLQTCRLLLSYGSDPSIISLQGFTAAQMGNEAVQQILSESTPIRTSDVDYRLLEASKAGDLETVKQLCSSQNVNCRDLEGRHSTPLHFAAGYNRVSVVEYLLHHGADVHAKDKGGLVPLHNACSYGHYEVAELLVRHGASVNVADLWKFTPLHEAAAKGKYEICKLLLKHGADPTKKNRDGNTPLDLVKEGDTDIQDLLRGDAALLDAAKKGCLARVQKLCTPENINCRDTQGRNSTPLHLAAGYNNLEVAEYLLEHGADVNAQDKGGLIPLHNAASYGHVDIAALLIKYNTCVNATDKWAFTPLHEAAQKGRTQLCALLLAHGADPTMKNQEGQTPLDLATADDIRALLIDAMPPEALPTCFKPQATVVSASLISPASTPSCLSAASSIDNLTGPLAELAVGGASNAGDGAAGTERKEGEVAGLDMNISQFLKSLGLEHLRDIFETEQITLDVLADMGHEELKEIGINAYGHRHKLIKGVERLLGGQQGTNPYLTFHCVNQGTILLDLAPEDKEYQSVEEEMQSTIREHRDGGNAGGIFNRYNVIRIQKVVNKKLRERFCHRQKEVSEENHNHHNERMLFHGSPFINAIIHKGFDERHAYIGGMFGAGIYFAENSSKSNQYVYGIGGGTGCPTHKDRSCYICHRQMLFCRVTLGKSFLQFSTMKMAHAPPGHHSVIGRPSVNGLAYAEYVIYRGEQAYPEYLITYQIMKPEAPSQTATAAEQKT

SEQ ID NO: 86666 - protein, 243 aa, Homo sapiens
  Payload ID: 17346
  Gene Symbol: TNKS
  Gene Name: tankyrase, TRF1-interacting ankyrin-related ADP-ribose polymerase
  ENSP ID: ENSP00000430920
MAASRRSQHHHHHHQQQLQPAPGASAPPPPPPPPLSPGLAPGTTPASPTASGLAPFASPRHGLALPEGDGSRDPPDRPRSPDPVDGTSCCSTTSTICTVAAAPVVPAVSTSSAAGVAPNPAGSGSNNSPSSSSSPTSSSSSSPSSPGSSLAESPEAAGVSSTAPLGPGAAGPGTGVPAVSGALRELLEACRNGDVSRVKRLVDAANVNAKDMAGRKSSPLHFAAGQRLLNCLLRVMGLGAGSG

SEQ ID NO: 86667 - protein, 68 aa, Homo sapiens
  Payload ID: 17346
  Gene Symbol: TNKS
  Gene Name: tankyrase, TRF1-interacting ankyrin-related ADP-ribose polymerase
  ENSP ID: ENSP00000431098
GCLARVQKLCTPENINCRDTQGRNSTPLHLAAGYNNLEVAEYLLEHGADVNAQDKGGLIPLHNAASYG

SEQ ID NO: 86668 - protein, 1166 aa, Homo sapiens
  Payload ID: 17347
  Gene Symbol: TNKS2
  Gene Name: tankyrase, TRF1-interacting ankyrin-related ADP-ribose polymerase 2
  Uniprot ID: Q9H2K2
  ENSP ID: ENSP00000360689
MSGRRCAGGGAACASAAAEAVEPAARELFEACRNGDVERVKRLVTPEKVNSRDTAGRKSTPLHFAAGFGRKDVVEYLLQNGANVQARDDGGLIPLHNACSFGHAEVVNLLLRHGADPNARDNWNYTPLHEAAIKGKIDVCIVLLQHGAEPTIRNTDGRTALDLADPSAKAVLTGEYKKDELLESARSGNEEKMMALLTPLNVNCHASDGRKSTPLHLAAGYNRVKIVQLLLQHGADVHAKDKGDLVPLHNACSYGHYEVTELLVKHGACVNAMDLWQFTPLHEAASKNRVEVCSLLLSYGADPTLLNCHNKSAIDLAPTPQLKERLAYEFKGHSLLQAAREADVTRIKKHLSLEMVNFKHPQTHETALHCAAASPYPKRKQICELLLRKGANINEKTKEFLTPLHVASEKAHNDVVEVVVKHEAKVNALDNLGQTSLHRAAYCGHLQTCRLLLSYGCDPNIISLQGFTALQMGNENVQQLLQEGISLGNSEADRQLLEAAKAGDVETVKKLCTVQSVNCRDIEGRQSTPLHFAAGYNRVSVVEYLLQHGADVHAKDKGGLVPLHNACSYGHYEVAELLVKHGAVVNVADLWKFTPLHEAAAKGKYEICKLLLQHGADPTKKNRDGNTPLDLVKDGDTDIQDLLRGDAALLDAAKKGCLARVKKLSSPDNVNCRDTQGRHSTPLHLAAGYNNLEVAEYLLQHGADVNAQDKGGLIPLHNAASYGHVDVAALLIKYNACVNATDKWAFTPLHEAAQKGRTQLCALLLAHGADPTLKNQEGQTPLDLVSADDVSALLTAAMPPSALPSCYKPQVLNGVRSPGATADALSSGPSSPSSLSAASSLDNLSGSFSELSSVVSSSGTEGASSLEKKEVPGVDFSITQFVRNLGLEHLMDIFEREQITLDVLVEMGHKELKEIGINAYGHRHKLIKGVERLISGQQGLNPYLTLNTSGSGTILIDLSPDDKEFQSVEEEMQSTVREHRDGGHAGGIFNRYNILKIQKVCNKKLWERYTHRRKEVSEENHNHANERMLFHGSPFVNAIIHKGFDERHAYIGGMFGAGIYFAENSSKSNQYVYGIGGGTGCPVHKDRSCYICHRQLLFCRVTLGKSFLQFSAMKMAHSPPGHHSVTGRPSVNGLALAEYVIYRGEQAYPEYLITYQIMRPEGMVDG

SEQ ID NO: 86669 - protein, 1001 aa, Homo sapiens
  Payload ID: 17348
  Gene Symbol: TAOK1
  Gene Name: TAO kinase 1
  Uniprot ID: Q7L7X3
  ENSP ID: ENSP00000261716
MPSTNRAGSLKDPEIAELFFKEDPEKLFTDLREIGHGSFGAVYFARDVRTNEVVAIKKMSYSGKQSTEKWQDIIKEVKFLQRIKHPNSIEYKGCYLREHTAWLVMEYCLGSASDLLEVHKKPLQEVEIAAITHGALQGLAYLHSHTMIHRDIKAGNILLTEPGQVKLADFGSASMASPANSFVGTPYWMAPEVILAMDEGQYDGKVDVWSLGITCIELAERKPPLFNMNAMSALYHIAQNESPTLQSNEWSDYFRNFVDSCLQKIPQDRPTSEELLKHIFVLRERPETVLIDLIQRTKDAVRELDNLQYRKMKKLLFQEAHNGPAVEAQEEEEEQDHGVGRTGTVNSVGSNQSIPSMSISASSQSSSVNSLPDVSDDKSELDMMEGDHTVMSNSSVIHLKPEEENYREEGDPRTRASDPQSPPQVSRHKSHYRNREHFATIRTASLVTRQMQEHEQDSELREQMSGYKRMRRQHQKQLMTLENKLKAEMDEHRLRLDKDLETQRNNFAAEMEKLIKKHQAAMEKEAKVMSNEEKKFQQHIQAQQKKELNSFLESQKREYKLRKEQLKEELNENQSTPKKEKQEWLSKQKENIQHFQAEEEANLLRRQRQYLELECRRFKRRMLLGRHNLEQDLVREELNKRQTQKDLEHAMLLRQHESMQELEFRHLNTIQKMRCELIRLQHQTELTNQLEYNKRRERELRRKHVMEVRQQPKSLKSKELQIKKQFQDTCKIQTRQYKALRNHLLETTPKSEHKAVLKRLKEEQTRKLAILAEQYDHSINEMLSTQALRLDEAQEAECQVLKMQLQQELELLNAYQSKIKMQAEAQHDRELRELEQRVSLRRALLEQKIEEEMLALQNERTERIRSLLERQAREIEAFDSESMRLGFSNMVLSNLSPEAFSHSYPGASGWSHNPTGGPGPHWGHPMGGPPQAWGHPMQGGPQPWGHPSGPMQGVPRGSSMGVRNSPQALRRTASGGRTEQGMSRSTSVTSQISNGSHMSYT

SEQ ID NO: 86670 - protein, 853 aa, Homo sapiens
  Payload ID: 17348
  Gene Symbol: TAOK1
  Gene Name: TAO kinase 1
  Uniprot ID: Q7L7X3
  ENSP ID: ENSP00000438819
MPSTNRAGSLKDPEIAELFFKEDPEKLFTDLREIGHGSFGAVYFARDVRTNEVVAIKKMSYSGKQSTEKWQDIIKEVKFLQRIKHPNSIEYKGCYLREHTAWLVMEYCLGSASDLLEVHKKPLQEVEIAAITHGALQGLAYLHSHTMIHRDIKAGNILLTEPGQVKLADFGSASMASPANSFVGTPYWMAPEVILAMDEGQYDGKVDVWSLGITCIELAERKPPLFNMNAMSALYHIAQNESPTLQSNEWSDYFRNFVDSCLQKIPQDRPTSEELLKHIFVLRERPETVLIDLIQRTKDAVRELDNLQYRKMKKLLFQEAHNGPAVEAQEEEEEQDHGVGRTGTVNSVGSNQSIPSMSISASSQSSSVNSLPDVSDDKSELDMMEGDHTVMSNSSVIHLKPEEENYREEGDPRTRASDPQSPPQVSRHKSHYRNREHFATIRTASLVTRQMQEHEQDSELREQMSGYKRMRRQHQKQLMTLENKLKAEMDEHRLRLDKDLETQRNNFAAEMEKLIKKHQAAMEKEAKVMSNEEKKFQQHIQAQQKKELNSFLESQKREYKLRKEQLKESKELQIKKQFQDTCKIQTRQYKALRNHLLETTPKSEHKAVLKRLKEEQTRKLAILAEQYDHSINEMLSTQALRLDEAQEAECQVLKMQLQQELELLNAYQSKIKMQAEAQHDRELRELEQRVSLRRALLEQKIEEEMLALQNERTERIRSLLERQAREIEAFDSESMRLGFSNMVLSNLSPEAFSHSYPGASGWSHNPTGGPGPHWGHPMGGPPQAWGHPMQGGPQPWGHPSGPMQGVPRGSSMGVRNSPQALRRTASGGRTEQGMSRSTSVTSQISNGSHMSYT

SEQ ID NO: 86671 - protein, 79 aa, Homo sapiens
  Payload ID: 17348
  Gene Symbol: TAOK1
  Gene Name: TAO kinase 1
  ENSP ID: ENSP00000464562
MPSTNRAGSLKDPEIAELFFKEDPEKLFTDLREIGHGSFGAVYFARDVRTNEVVAIKKMSYSGKQSTEKWQDIIKEVKF

SEQ ID NO: 86672 - protein, 1049 aa, Homo sapiens
  Payload ID: 17349
  Gene Symbol: TAOK2
  Gene Name: TAO kinase 2
  Uniprot ID: Q9UL54
  ENSP ID: ENSP00000279394
MPAGGRAGSLKDPDVAELFFKDDPEKLFSDLREIGHGSFGAVYFARDVRNSEVVAIKKMSYSGKQSNEKWQDIIKEVRFLQKLRHPNTIQYRGCYLREHTAWLVMEYCLGSASDLLEVHKKPLQEVEIAAVTHGALQGLAYLHSHNMIHRDVKAGNILLSEPGLVKLGDFGSASIMAPANSFVGTPYWMAPEVILAMDEGQYDGKVDVWSLGITCIELAERKPPLFNMNAMSALYHIAQNESPVLQSGHWSEYFRNFVDSCLQKIPQDRPTSEVLLKHRFVLRERPPTVIMDLIQRTKDAVRELDNLQYRKMKKILFQEAPNGPGAEAPEEEEEAEPYMHRAGTLTSLESSHSVPSMSISASSQSSSVNSLADASDNEEEEEEEEEEEEEEEGPEAREMAMMQEGEHTVTSHSSIIHRLPGSDNLYDDPYQPEITPSPLQPPAAPAPTSTTSSARRRAYCRNRDHFATIRTASLVSRQIQEHEQDSALREQLSGYKRMRRQHQKQLLALESRLRGEREEHSARLQRELEAQRAGFGAEAEKLARRHQAIGEKEARAAQAEERKFQQHILGQQKKELAALLEAQKRTYKLRKEQLKEELQENPSTPKREKAEWLLRQKEQLQQCQAEEEAGLLRRQRQYFELQCRQYKRKMLLARHSLDQDLLREDLNKKQTQKDLECALLLRQHEATRELELRQLQAVQRTRAELTRLQHQTELGNQLEYNKRREQELRQKHAAQVRQQPKSLKSKELQIKKQFQETCKIQTRQYKALRAHLLETTPKAQHKSLLKRLKEEQTRKLAILAEQYDQSISEMLSSQALRLDETQEAEFQALRQQLQQELELLNAYQSKIKIRTESQHERELRELEQRVALRRALLEQRVEEELLALQTGRSERIRSLLERQAREIEAFDAESMRLGFSSMALGGIPAEAAAQGYPAPPPAPAWPSRPVPRSGAHWSHGPPPPGMPPPAWRQPSLLAPPGPPNWLGPPTQSGTPRGGALLLLRNSPQPLRRAASGGSGSENVGPPAAAVPGPLSRSTSVASHILNGSSHFYS

SEQ ID NO: 86673 - protein, 1235 aa, Homo sapiens
  Payload ID: 17349
  Gene Symbol: TAOK2
  Gene Name: TAO kinase 2
  Uniprot ID: Q9UL54
  ENSP ID: ENSP00000310094
MPAGGRAGSLKDPDVAELFFKDDPEKLFSDLREIGHGSFGAVYFARDVRNSEVVAIKKMSYSGKQSNEKWQDIIKEVRFLQKLRHPNTIQYRGCYLREHTAWLVMEYCLGSASDLLEVHKKPLQEVEIAAVTHGALQGLAYLHSHNMIHRDVKAGNILLSEPGLVKLGDFGSASIMAPANSFVGTPYWMAPEVILAMDEGQYDGKVDVWSLGITCIELAERKPPLFNMNAMSALYHIAQNESPVLQSGHWSEYFRNFVDSCLQKIPQDRPTSEVLLKHRFVLRERPPTVIMDLIQRTKDAVRELDNLQYRKMKKILFQEAPNGPGAEAPEEEEEAEPYMHRAGTLTSLESSHSVPSMSISASSQSSSVNSLADASDNEEEEEEEEEEEEEEEGPEAREMAMMQEGEHTVTSHSSIIHRLPGSDNLYDDPYQPEITPSPLQPPAAPAPTSTTSSARRRAYCRNRDHFATIRTASLVSRQIQEHEQDSALREQLSGYKRMRRQHQKQLLALESRLRGEREEHSARLQRELEAQRAGFGAEAEKLARRHQAIGEKEARAAQAEERKFQQHILGQQKKELAALLEAQKRTYKLRKEQLKEELQENPSTPKREKAEWLLRQKEQLQQCQAEEEAGLLRRQRQYFELQCRQYKRKMLLARHSLDQDLLREDLNKKQTQKDLECALLLRQHEATRELELRQLQAVQRTRAELTRLQHQTELGNQLEYNKRREQELRQKHAAQVRQQPKSLKVRAGQRPPGLPLPIPGALGPPNTGTPIEQQPCSPGQEAVLDQRMLGEEEEAVGERRILGKEGATLEPKQQRILGEESGAPSPSPQKHGSLVDEEVWGLPEEIEELRVPSLVPQERSIVGQEEAGTWSLWGKEDESLLDEEFELGWVQGPALTPVPEEEEEEEEGAPIGTPRDPGDGCPSPDIPPEPPPTHLRPCPASQLPGLLSHGLLAGLSFAVGSSSGLLPLLLLLLLPLLAAQGGGGLQAALLALEVGLVGLGASYLLLCTALHLPSSLFLLLAQGTALGAVLGLSWRRGLMGVPLGLGAAWLLAWPGLALPLVAMAAGGRWVRQQGPRVRRGISRLWLRVLLRLSPMAFRALQGCGAVGDRGLFALYPKTNKDGFRSRLPVPGPRRRNPRTTQHPLALLARVWVLCKGWNWRLARASQGLASHLPPWAIHTLASWGLLRGERPTRIPRLLPRSQRQLGPPASRQPLPGTLAGRRSRTRQSRALPPWR

SEQ ID NO: 86674 - protein, 1062 aa, Homo sapiens
  Payload ID: 17349
  Gene Symbol: TAOK2
  Gene Name: TAO kinase 2
  Uniprot ID: Q9UL54
  ENSP ID: ENSP00000393048
MMGTSQGHVARKSRNWGLNPSRLSSIPLSSTPCHLSPSSLSPFSVAERKPPLFNMNAMSALYHIAQNESPVLQSGHWSEYFRNFVDSCLQKIPQDRPTSEVLLKHRFVLRERPPTVIMDLIQRTKDAVRELDNLQYRKMKKILFQEAPNGPGAEAPEEEEEAEPYMHRAGTLTSLESSHSVPSMSISASSQSSSVNSLADASDNEEEEEEEEEEEEEEEGPEAREMAMMQEGEHTVTSHSSIIHRLPGSDNLYDDPYQPEITPSPLQPPAAPAPTSTTSSARRRAYCRNRDHFATIRTASLVSRQIQEHEQDSALREQLSGYKRMRRQHQKQLLALESRLRGEREEHSARLQRELEAQRAGFGAEAEKLARRHQAIGEKEARAAQAEERKFQQHILGQQKKELAALLEAQKRTYKLRKEQLKEELQENPSTPKREKAEWLLRQKEQLQQCQAEEEAGLLRRQRQYFELQCRQYKRKMLLARHSLDQDLLREDLNKKQTQKDLECALLLRQHEATRELELRQLQAVQRTRAELTRLQHQTELGNQLEYNKRREQELRQKHAAQVRQQPKSLKVRAGQRPPGLPLPIPGALGPPNTGTPIEQQPCSPGQEAVLDQRMLGEEEEAVGERRILGKEGATLEPKQQRILGEESGAPSPSPQKHGSLVDEEVWGLPEEIEELRVPSLVPQERSIVGQEEAGTWSLWGKEDESLLDEEFELGWVQGPALTPVPEEEEEEEEGAPIGTPRDPGDGCPSPDIPPEPPPTHLRPCPASQLPGLLSHGLLAGLSFAVGSSSGLLPLLLLLLLPLLAAQGGGGLQAALLALEVGLVGLGASYLLLCTALHLPSSLFLLLAQGTALGAVLGLSWRRGLMGVPLGLGAAWLLAWPGLALPLVAMAAGGRWVRQQGPRVRRGISRLWLRVLLRLSPMAFRALQGCGAVGDRGLFALYPKTNKDGFRSRLPVPGPRRRNPRTTQHPLALLARVWVLCKGWNWRLARASQGLASHLPPWAIHTLASWGLLRGERPTRIPRLLPRSQRQLGPPASRQPLPGTLAGRRSRTRQSRALPPWR

SEQ ID NO: 86675 - protein, 1122 aa, Homo sapiens
  Payload ID: 17349
  Gene Symbol: TAOK2
  Gene Name: TAO kinase 2
  Uniprot ID: Q9UL54
  ENSP ID: ENSP00000440336
MPAGGRAGSLKDPDVAELFFKDDPEKLFSDLREIGHGSFGAVYFARDVRNSEVVAIKKMSYSGKQSNEKWQDIIKEVRFLQKLRHPNTIQYRGCYLREHTAWLVMEYCLGSASDLLEVHKKPLQEVEIAAVTHGALQGLAYLHSHNMIHRDVKAGNILLSEPGLVKLGDFGSASIMAPANSFVGTPYWMAPEVILAMDEGQYDGKVDVWSLGITCIELAERKPPLFNMNAMSALYHIAQNESPVLQSGHWSEYFRNFVDSCLQKIPQDRPTSEVLLKHRFVLRERPPTVIMDLIQRTKDAVRELDNLQYRKMKKILFQEAPNGPGAEAPEEEEEAEPYMHRAGTLTSLESSHSVPSMSISASSQSSSVNSLADASDNEEEEEEEEEEEEEEEGPEAREMAMMQEGEHTVTSHSSIIHRLPGSDNLYDDPYQPEITPSPLQPPAAPAPTSTTSSARRRAYCRNRDHFATIRTASLVSRQIQEHEQDSALREQLSGYKRMRRQHQKQLLALESRLRGEREEHSARLQRELEAQRAGFGAEAEKLARRHQAIGEKEARAAQAEERKFQQHILGQQKKELAALLEAQKRTYKLRKEQLKEELQENPSTPKREKAEWLLRQKEQLQQCQAEEEAGLLRRQRQYFELQCRQYKRKMLLARHSLDQDLLREDLNKKQTQKDLECALLLRQHEATRELELRQLQAVQRTRAELTRLQHQTELGNQLEYNKRREQELRQKHAAQVRQQPKSLKERSIVGQEEAGTWSLWGKEDESLLDEEFELGWVQGPALTPVPEEEEEEEEGAPIGTPRDPGDGCPSPDIPPEPPPTHLRPCPASQLPGLLSHGLLAGLSFAVGSSSGLLPLLLLLLLPLLAAQGGGGLQAALLALEVGLVGLGASYLLLCTALHLPSSLFLLLAQGTALGAVLGLSWRRGLMGVPLGLGAAWLLAWPGLALPLVAMAAGGRWVRQQGPRVRRGISRLWLRVLLRLSPMAFRALQGCGAVGDRGLFALYPKTNKDGFRSRLPVPGPRRRNPRTTQHPLALLARVWVLCKGWNWRLARASQGLASHLPPWAIHTLASWGLLRGERPTRIPRLLPRSQRQLGPPASRQPLPGTLAGRRSRTRQSRALPPWR

SEQ ID NO: 86676 - protein, 898 aa, Homo sapiens
  Payload ID: 17350
  Gene Symbol: TAOK3
  Gene Name: TAO kinase 3
  Uniprot ID: Q9H2K8
  ENSP ID: ENSP00000376317
MRKGVLKDPEIADLFYKDDPEELFIGLHEIGHGSFGAVYFATNAHTSEVVAIKKMSYSGKQTHEKWQDILKEVKFLRQLKHPNTIEYKGCYLKEHTAWLVMEYCLGSASDLLEVHKKPLQEVEIAAITHGALHGLAYLHSHALIHRDIKAGNILLTEPGQVKLADFGSASMASPANSFVGTPYWMAPEVILAMDEGQYDGKVDIWSLGITCIELAERKPPLFNMNAMSALYHIAQNDSPTLQSNEWTDSFRRFVDYCLQKIPQERPTSAELLRHDFVRRDRPLRVLIDLIQRTKDAVRELDNLQYRKMKKILFQETRNGPLNESQEDEEDSEHGTSLNREMDSLGSNHSIPSMSVSTGSQSSSVNSMQEVMDESSSELVMMHDDESTINSSSSVVHKKDHVFIRDEAGHGDPRPEPRPTQSVQSQALHYRNRERFATIKSASLVTRQIHEHEQENELREQMSGYKRMRRQHQKQLIALENKLKAEMDEHRLKLQKEVETHANNSSIELEKLAKKQVAIIEKEAKVAAADEKKFQQQILAQQKKDLTTFLESQKKQYKICKEKIKEEMNEDHSTPKKEKQERISKHKENLQHTQAEEEAHLLTQQRLYYDKNCRFFKRKIMIKRHEVEQQNIREELNKKRTQKEMEHAMLIRHDESTRELEYRQLHTLQKLRMDLIRLQHQTELENQLEYNKRRERELHRKHVMELRQQPKNLKAMEMQIKKQFQDTCKVQTKQYKALKNHQLEVTPKNEHKTILKTLKDEQTRKLAILAEQYEQSINEMMASQALRLDEAQEAECQALRLQLQQEMELLNAYQSKIKMQTEAQHERELQKLEQRVSLRRAHLEQKIEEELAALQKERSERIKNLLERQEREIETFDMESLRMGFGNLVTLDFPKEDYR

SEQ ID NO: 86677 - protein, 898 aa, Homo sapiens; identical to SEQ ID NO: 86676
  Payload ID: 17350
  Gene Symbol: TAOK3
  Gene Name: TAO kinase 3
  Uniprot ID: Q9H2K8
  ENSP ID: ENSP00000416374

SEQ ID NO: 86678 - protein, 185 aa, Homo sapiens
  Payload ID: 17350
  Gene Symbol: TAOK3
  Gene Name: TAO kinase 3
  ENSP ID: ENSP00000437389
QRLLLERTHCLVHKKPLQEVEIAAITHGALHGLAYLHSHALIHRDIKAGNILLTEPGQVKLADFGSASMASPANSFVGTPYWMAPEVILAMDEGQYDGKVDIWSLGITCIELAERKPPLFNMNAMSALYHIAQNDSPTLQSNEWTDSFRRFVDYCLQKIPQERPTSAELLRHDFVRRDRPLRVLI

SEQ ID NO: 86679 - protein, 18 aa, Homo sapiens
  Payload ID: 17350
  Gene Symbol: TAOK3
  Gene Name: TAO kinase 3
  ENSP ID: ENSP00000438766
MRKGVLKDPEIADLFYKD

SEQ ID NO: 86680 - protein, 93 aa, Homo sapiens
  Payload ID: 17350
  Gene Symbol: TAOK3
  Gene Name: TAO kinase 3
  ENSP ID: ENSP00000438820
MRKGVLKDPEIADLFYKDDPEELFIGLHEIGHGSFGAVYFATNAHTSEVVAIKKMSYSGKQTHEKWQDILKEVKFLRQLKHPNTIEYKGCYLK

SEQ ID NO: 86681 - protein, 14 aa, Homo sapiens
  Payload ID: 17350
  Gene Symbol: TAOK3
  Gene Name: TAO kinase 3
  ENSP ID: ENSP00000439620
MSGYKRMRRQHQKQ

SEQ ID NO: 86682 - protein, 57 aa, Homo sapiens
  Payload ID: 17350
  Gene Symbol: TAOK3
  Gene Name: TAO kinase 3
  ENSP ID: ENSP00000440315
MRKGVLKDPEIADLFYKDDPEELFIGLHEIGHGSFGAVYFATNAHTSEVVAIKKMSY

SEQ ID NO: 86683 - protein, 36 aa, Homo sapiens
  Payload ID: 17350
  Gene Symbol: TAOK3
  Gene Name: TAO kinase 3
  ENSP ID: ENSP00000441071
MRKGVLKDPEIADLFYKDDPEELFIGLHEIGHGSFG

SEQ ID NO: 86684 - protein, 93 aa, Homo sapiens
  Payload ID: 17350
  Gene Symbol: TAOK3
  Gene Name: TAO kinase 3
  ENSP ID: ENSP00000441932
MELLNAYQSKIKMQTEAQHERELQKLEQRVSLRRAHLEQKIEEELAALQKERSERIKNLLERQEREIETFDMESLRMGFGNLVTLDFPKEDYR

SEQ ID NO: 86685 - protein, 21 aa, Homo sapiens
  Payload ID: 17350
  Gene Symbol: TAOK3
  Gene Name: TAO kinase 3
  ENSP ID: ENSP00000442541
MRKGVLKDPEIADLFYKDDPE

SEQ ID NO: 86686 - protein, 136 aa, Homo sapiens
  Payload ID: 17350
  Gene Symbol: TAOK3
  Gene Name: TAO kinase 3
  ENSP ID: ENSP00000443465
MRKGVLKDPEIADLFYKDDPEELFIGLHEIGHGSFGAVYFATNAHTSEVVAIKKMSYSGKQTHEKWQDILKEVKFLRQLKHPNTIEYKGCYLKEHTAWLVMEYCLGSASDLLEVHKKPLQEVEIAAITHGALHGLA

SEQ ID NO: 86687 - protein, 38 aa, Homo sapiens
  Payload ID: 17350
  Gene Symbol: TAOK3
  Gene Name: TAO kinase 3
  ENSP ID: ENSP00000443487
MSGYKRMRRQHQKQLIALENKLKAEMDEHRLKLQKEVE

SEQ ID NO: 86688 - protein, 438 aa, Homo sapiens
  Payload ID: 17350
  Gene Symbol: TAOK3
  Gene Name: TAO kinase 3
  ENSP ID: ENSP00000443834
MSGYKRMRRQHQKQLIALENKLKAEMDEHRLKLQKEVETHANNSSIELEKLAKKQVAIIEKEAKVAAADEKKFQQQILAQQKKDLTTFLESQKKQYKICKEKIKEEMNEDHSTPKKEKQERISKHKENLQHTQAEEEAHLLTQQRLYYDKNCRFFKRKIMIKRHEVEQQNIREELNKKRTQKEMEHAMLIRHDESTRELEYRQLHTLQKLRMDLIRLQHQTELENQLEYNKRRERELHRKHVMELRQQPKNLKAMEMQIKKQFQDTCKVQTKQYKALKNHQLEVTPKNEHKTILKTLKDEQTRKLAILAEQYEQSINEMMASQALRLDEAQEAECQALRLQLQQEMELLNAYQSKIKMQTEAQHERELQKLEQRVSLRRAHLEQKIEEELAALQKERSERIKNLLERQEREIETFDMESLRMGFGNLVTLDFPKEDYR

SEQ ID NO: 86689 - protein, 61 aa, Homo sapiens
  Payload ID: 17350
  Gene Symbol: TAOK3
  Gene Name: TAO kinase 3
  ENSP ID: ENSP00000444057
MRKGVLKDPEIADLFYKDDPEELFIGLHEIGHGSFGAVYFATNAHTSEVVAIKKMSYSGKQ

SEQ ID NO: 86690 - protein, 466 aa, Homo sapiens
  Payload ID: 17351
  Gene Symbol: TAPBP
  Gene Name: TAP binding protein (tapasin)
  ENSP ID: ENSP00000363696
MKSLSLLLAVALGLATAVSAGPAVIECWFVEDASGKGLAKRPGALLLRQGPGEPPPRPDLDPELYLSVHDPAGALQAAFRRYPRGAPAPHCEMSRFVPLPASAKWASGLTPAQNCPRALDGAWLMVSISSPVLSLSSLLRPQPEPQQEPVLITMATVEMGFHHVGQAALELLTSVVLTVLTHTPAPRVRLGQDALLDLSFAYMPPTSEAASSLAPGPPPFGLEWRRQHLGKGHLLLAATPGLNGQMPAAQEGAVAFAAWDDDEPWGPWTGNGTFWLPRVQPFQEGTYLATIHLPYLQGQVTLELAVYKPPKVSLMPATLARAAPGEAPPELLCLVSHFYPSGGLEVEWELRGGPGGRSQKAEGQRWLSALRHHSDGSVSLSGHLQPPPVTTEQHGARYACRIHHPSLPASGRSAEVTLEVAGLSGPSLEDSVGLFLSAFLLLGLFKALGWAAVYLSTCKDSKKKAE

SEQ ID NO: 86691 - protein, 448 aa, Homo sapiens
  Payload ID: 17351
  Gene Symbol: TAPBP
  Gene Name: TAP binding protein (tapasin)
  Uniprot ID: O15533
  ENSP ID: ENSP00000363700
MKSLSLLLAVALGLATAVSAGPAVIECWFVEDASGKGLAKRPGALLLRQGPGEPPPRPDLDPELYLSVHDPAGALQAAFRRYPRGAPAPHCEMSRFVPLPASAKWASGLTPAQNCPRALDGAWLMVSISSPVLSLSSLLRPQPEPQQEPVLITMATVVLTVLTHTPAPRVRLGQDALLDLSFAYMPPTSEAASSLAPGPPPFGLEWRRQHLGKGHLLLAATPGLNGQMPAAQEGAVAFAAWDDDEPWGPWTGNGTFWLPRVQPFQEGTYLATIHLPYLQGQVTLELAVYKPPKVSLMPATLARAAPGEAPPELLCLVSHFYPSGGLEVEWELRGGPGGRSQKAEGQRWLSALRHHSDGSVSLSGHLQPPPVTTEQHGARYACRIHHPSLPASGRSAEVTLEVAGLSGPSLEDSVGLFLSAFLLLGLFKALGWAAVYLSTCKDSKKKAE

SEQ ID NO: 86692 - protein, 504 aa, Homo sapiens
  Payload ID: 17351
  Gene Symbol: TAPBP
  Gene Name: TAP binding protein (tapasin)
  ENSP ID: ENSP00000372542
MKSLSLLLAVALGLATAVSAGPAVIECWFVEDASGKGLAKRPGALLLRQGPGEPPPRPDLDPELYLSVHDPAGALQAAFRRYPRGAPAPHCEMSRFVPLPASAKWASGLTPAQNCPRALDGAWLMVSISSPVLSLSSLLRPQPEPQQEPVLITMATVVLTVLTHTPAPRVRLGQDALLDLSFAYMPPTSEAASSLAPGPPPFGLEWRRQHLGKGHLLLAATPGLNGQMPAAQEGAVAFAAWDDDEPWGPWTGNGTFWLPTVQPFQEGTYLATIHLPYLQGQVTLELAVYKPPKVSLMPATLARAAPGEAPPELLCLVSHFYPSGGLEVEWELRGGPGGRSQKAEGQRWLSALRHHSDGSVSLSGHLQPPPVTTEQHGARYACRIHHPSLPASGRSAEVTLEVAGLSGPSLEDSVGLFLSAFLLLGLFKALGWAAVYLSTCKDSKKVQCSTSLYLSLVTLSPHPISKPMEGGCWCGRQNLGLEFTLIWVKTWHYILTVGLFEHAT

SEQ ID NO: 86693 - protein, 448 aa, Homo sapiens
  Payload ID: 17351
  Gene Symbol: TAPBP
  Gene Name: TAP binding protein (tapasin)
  Uniprot ID: O15533
  ENSP ID: ENSP00000372543
MKSLSLLLAVALGLATAVSAGPAVIECWFVEDASGKGLAKRPGALLLRQGPGEPPPRPDLDPELYLSVHDPAGALQAAFRRYPRGAPAPHCEMSRFVPLPASAKWASGLTPAQNCPRALDGAWLMVSISSPVLSLSSLLRPQPEPQQEPVLITMATVVLTVLTHTPAPRVRLGQDALLDLSFAYMPPTSEAASSLAPGPPPFGLEWRRQHLGKGHLLLAATPGLNGQMPAAQEGAVAFAAWDDDEPWGPWTGNGTFWLPTVQPFQEGTYLATIHLPYLQGQVTLELAVYKPPKVSLMPATLARAAPGEAPPELLCLVSHFYPSGGLEVEWELRGGPGGRSQKAEGQRWLSALRHHSDGSVSLSGHLQPPPVTTEQHGARYACRIHHPSLPASGRSAEVTLEVAGLSGPSLEDSVGLFLSAFLLLGLFKALGWAAVYLSTCKDSKKKAE

SEQ ID NO: 86694 - protein, 466 aa, Homo sapiens
  Payload ID: 17351
  Gene Symbol: TAPBP
  Gene Name: TAP binding protein (tapasin)
  ENSP ID: ENSP00000372544
MKSLSLLLAVALGLATAVSAGPAVIECWFVEDASGKGLAKRPGALLLRQGPGEPPPRPDLDPELYLSVHDPAGALQAAFRRYPRGAPAPHCEMSRFVPLPASAKWASGLTPAQNCPRALDGAWLMVSISSPVLSLSSLLRPQPEPQQEPVLITMATVEMGFHHVGQAALELLTSVVLTVLTHTPAPRVRLGQDALLDLSFAYMPPTSEAASSLAPGPPPFGLEWRRQHLGKGHLLLAATPGLNGQMPAAQEGAVAFAAWDDDEPWGPWTGNGTFWLPTVQPFQEGTYLATIHLPYLQGQVTLELAVYKPPKVSLMPATLARAAPGEAPPELLCLVSHFYPSGGLEVEWELRGGPGGRSQKAEGQRWLSALRHHSDGSVSLSGHLQPPPVTTEQHGARYACRIHHPSLPASGRSAEVTLEVAGLSGPSLEDSVGLFLSAFLLLGLFKALGWAAVYLSTCKDSKKKAE

SEQ ID NO: 86695 - protein, 504 aa, Homo sapiens [sequence omitted]

SEQ ID NO: 86696 - protein, 448 aa, Homo sapiens; identical to SEQ ID NO: 86691
  Payload ID: 17351
  Gene Symbol: TAPBP
  Gene Name: TAP binding protein (tapasin)
  Uniprot ID: O15533
  ENSP ID: ENSP00000372685

SEQ ID NO: 86697 - protein, 504 aa, Homo sapiens [sequence omitted]

SEQ ID NO: 86698 - protein, 156 aa, Homo sapiens
  Payload ID: 17351
  Gene Symbol: TAPBP
  Gene Name: TAP binding protein (tapasin)
  ENSP ID: ENSP00000387803
MKSLSLLLAVALGLATAVSAGPAVIECWFVEDASGKGLAKRPGALLLRQGPGEPPPRPDLDPELYLSVHDPAGALQAAFRRYPRGAPAPHCEMSRFVPLPASAKWASGLTPAQNCPRALDGAWLMVSISSMGHAMPVEFTIPACLPRGAALRSPWR

SEQ ID NO: 86699 - protein, 466 aa, Homo sapiens; identical to SEQ ID NO: 86690
  Payload ID: 17351
  Gene Symbol: TAPBP
  Gene Name: TAP binding protein (tapasin)
  ENSP ID: ENSP00000389692

SEQ ID NO: 86700 - protein, 202 aa, Homo sapiens
  Payload ID: 17351
  Gene Symbol: TAPBP
  Gene Name: TAP binding protein (tapasin)
  ENSP ID: ENSP00000389929
MKSLSLLLAVALGLATAVSAGPAVIECWFVEDASGKGLAKRPGALLLRQGPGEPPPRPDLDPELYLSVHVVLTVLTHTPAPRVRLGQDALLDLSFAYMPPTSEAASSLAPGPPPFGLEWRRQHLGKGHLLLAATPGLNGQMPAAQEGAVAFAAWDDDEPWGPWTGNGTFWLPRVQPFQEGTYLATIHLPYLQGQVTLELAVY

SEQ ID NO: 86701 - protein, 448 aa, Homo sapiens; identical to SEQ ID NO: 86693
  Payload ID: 17351
  Gene Symbol: TAPBP
  Gene Name: TAP binding protein (tapasin)
  Uniprot ID: O15533
  ENSP ID: ENSP00000395701

SEQ ID NO: 86702 - protein, 202 aa, Homo sapiens
  Payload ID: 17351
  Gene Symbol: TAPBP
  Gene Name: TAP binding protein (tapasin)
  ENSP ID: ENSP00000398088
MKSLSLLLAVALGLATAVSAGPAVIECWFVEDASGKGLAKRPGALLLRQGPGEPPPRPDLDPELYLSVHVVLTVLTHTPAPRVRLGQDALLDLSFAYMPPTSEAASSLAPGPPPFGLEWRRQHLGKGHLLLAATPGLNGQMPAAQEGAVAFAAWDDDEPWGPWTGNGTFWLPTVQPFQEGTYLATIHLPYLQGQVTLELAVY

SEQ ID NO: 86703 - protein, 448 aa, Homo sapiens; identical to SEQ ID NO: 86691
  Payload ID: 17351
  Gene Symbol: TAPBP
  Gene Name: TAP binding protein (tapasin)
  Uniprot ID: O15533
  ENSP ID: ENSP00000402087

SEQ ID NO: 86704 - protein, 466 aa, Homo sapiens; identical to SEQ ID NO: 86690
  Payload ID: 17351
  Gene Symbol: TAPBP
  Gene Name: TAP binding protein (tapasin)
  ENSP ID: ENSP00000404363

SEQ ID NO: 86705 - protein, 504 aa, Homo sapiens; identical to SEQ ID NO: 86692
  Payload ID: 17351
  Gene Symbol: TAPBP
  Gene Name: TAP binding protein (tapasin)
  ENSP ID: ENSP00000404833

SEQ ID NO: 86706 - protein, 504 aa, Homo sapiens [sequence omitted]

SEQ ID NO: 86707 - protein, 202 aa, Homo sapiens; identical to SEQ ID NO: 86700
  Payload ID: 17351
  Gene Symbol: TAPBP
  Gene Name: TAP binding protein (tapasin)
  ENSP ID: ENSP00000408033

SEQ ID NO: 86708 - protein, 202 aa, Homo sapiens; identical to SEQ ID NO: 86700
  Payload ID: 17351
  Gene Symbol: TAPBP
  Gene Name: TAP binding protein (tapasin)
  ENSP ID: ENSP00000415565

SEQ ID NO: 86709 - protein, 192 aa, Homo sapiens
  Payload ID: 17351
  Gene Symbol: TAPBP
  Gene Name: TAP binding protein (tapasin)
  ENSP ID: ENSP00000417523
MKSLSLLLAVALDPAGALQAAFRRYPRGAPAPHCEMSRFVPLPASAKWASGLTPAQNCPRALDGAWLMVSISSPVLSLSSLLRPQPEPQQEPVLITMATVVLTVLTHTPAPRVRLGQDALLDLSFAYMPPTSEAASSLAPGPPPFGLEWRRQHLGKGHLLLAATPGLNGQMPAAQEGAVAFAAWDDDEPWGP

SEQ ID NO: 86710 - protein, 466 aa, Homo sapiens; identical to SEQ ID NO: 86694
  Payload ID: 17351
  Gene Symbol: TAPBP
  Gene Name: TAP binding protein (tapasin)
  ENSP ID: ENSP00000417949

SEQ ID NO: 86711 - protein, 361 aa, Homo sapiens
  Payload ID: 17351
  Gene Symbol: TAPBP
  Gene Name: TAP binding protein (tapasin)
  ENSP ID: ENSP00000419659
MKSLSLLLAVALGLATAVSAGPAVIECWFVEDASGKGLAKRPGALLLRQGPGEPPPRPDLDPELYLSVHVVLTVLTHTPAPRVRLGQDALLDLSFAYMPPTSEAASSLAPGPPPFGLEWRRQHLGKGHLLLAATPGLNGQMPAAQEGAVAFAAWDDDEPWGPWTGNGTFWLPTVQPFQEGTYLATIHLPYLQGQVTLELAVYKPPKVSLMPATLARAAPGEAPPELLCLVSHFYPSGGLEVEWELRGGPGGRSQKAEGQRWLSALRHHSDGSVSLSGHLQPPPVTTEQHGARYACRIHHPSLPASGRSAEVTLEVAGLSGPSLEDSVGLFLSAFLLLGLFKALGWAAVYLSTCKDSKKKAE

SEQ ID NO: 86712 - protein, 156 aa, Homo sapiens; identical to SEQ ID NO: 86698
  Payload ID: 17351
  Gene Symbol: TAPBP
  Gene Name: TAP binding protein (tapasin)
  ENSP ID: ENSP00000447220

SEQ ID NO: 86713 - protein, 361 aa, Homo sapiens; identical to SEQ ID NO: 86711
  Payload ID: 17351
  Gene Symbol: TAPBP
  Gene Name: TAP binding protein (tapasin)
  ENSP ID: ENSP00000447665

SEQ ID NO: 86714 - protein, 448 aa, Homo sapiens
  Payload ID: 17351
  Gene Symbol: TAPBP
  Gene Name: TAP binding protein (tapasin)
  ENSP ID: ENSP00000447823
MKSLSLLLAVALGLATAVSAGPAVIECWFVEDASGKGLAKRPGALLLRQGPGEPPPRPDLDPELYLSVHDPAGALQAAFRRYPRGAPAPHCEMSRFVPLPASAKWASGLTPAQNCPRALDGAWLMVSISSPVLSLSSLLRPQPEPQQEPVLITMATVVLTVLTHTPAPRVRLGQDALLDLSFAYMPPTSEAASSLAPGPPPFGLEWRRQHLGKGHLLLAATPGLNGQMPAAQEGAVAFAAWDDDEPWGPWTGNGTFWLPRVQPFQEGTYLATIHLPYLQGQVTLELAVYKPPKVSLMPATLARAAPGEAPPELLCLVSHFYPSGGLEVEWELRGGPGGRSQKAEGQRWLSALRHHSDGSVSLSGHLQPPPVTTEQHGARYACRIHHPSLPASGRSAEVTLEVAGLSGPSLEDSVGLFLSAFLLLGLFKALGWAAVYLSTCKDSKKHAT

SEQ ID NO: 86715 - protein, 156 aa, Homo sapiens; identical to SEQ ID NO: 86698
  Payload ID: 17351
  Gene Symbol: TAPBP
  Gene Name: TAP binding protein (tapasin)
  ENSP ID: ENSP00000447932

SEQ ID NO: 86716 - protein, 448 aa, Homo sapiens; identical to SEQ ID NO: 86714
  Payload ID: 17351
  Gene Symbol: TAPBP
  Gene Name: TAP binding protein (tapasin)
  ENSP ID: ENSP00000448168

SEQ ID NO: 86717 - protein, 448 aa, Homo sapiens; identical to SEQ ID NO: 86714
  Payload ID: 17351
  Gene Symbol: TAPBP
  Gene Name: TAP binding protein (tapasin)
  ENSP ID: ENSP00000450358

SEQ ID NO: 86718 - protein, 468 aa, Homo sapiens
  Payload ID: 17352
  Gene Symbol: TAPBPL
  Gene Name: TAP binding protein-like
  Uniprot ID: Q9BX59
  ENSP ID: ENSP00000266556
MGTQEGWCLLLCLALSGAAETKPHPAEGQWRAVDVVLDCFLAKDGAHRGALASSEDRARASLVLKQVPVLDDGSLEDFTDFQGGTLAQDDPPIIFEASVDLVQIPQAEALLHADCSGKEVTCEISRYFLQMTETTVKTAAWFMANMQVSGGGPSISLVMKTPRVTKNEALWHPTLNLPLSPQGTVRTAVEFQVMTQTQSLSFLLGSSASLDCGFSMAPGLDLISVEWRLQHKGRGQLVYSWTAGQGQAVRKGATLEPAQLGMARDASLTLPGLTIQDEGTYICQITTSLYRAQQIIQLNIQASPKVRLSLANEALLPTLICDIAGYYPLDVVVTWTREELGGSPAQVSGASFSSLRQSVAGTYSISSSLTAEPGSAGATYTCQVTHISLEEPLGASTQVVPPERRTALGVIFASSLFLLALMFLGLQRRQAPTGLGLLQAERWETTSCADTQSSHLHEDRTARVSQPS

SEQ ID NO: 86719 - protein, 185 aa, Homo sapiens
  Payload ID: 17352
  Gene Symbol: TAPBPL
  Gene Name: TAP binding protein-like
  ENSP ID: ENSP00000445341
MGTQEGWCLLLCLALSGAAETMDLVQIPQAEALLHADCSGKEVTCEISRYFLQMTETTVKTAAWFMANMQVSGGGPSISLVMKTPRVTKNEALWHPTLNLPLSPQGTVRTAVEFQVMTQTQSLSFLLGSSASLDCGFSMAPGLDLISVEWRLQHKGRGRGDLHLPDHHLSVPSSADHPAQHPSFP

SEQ ID NO: 86720 - protein, 537 aa, Homo sapiens
  Payload ID: 17353
  Gene Symbol: TPRN
  Gene Name: taperin
  ENSP ID: ENSP00000327617
NSFTVHPRGLHRGAGARLLSNGHSAPEPRAGPANRLAGSPPGSGQWKPKVESGDPSLHPPPSPGTPSATPASPPASATPSQRQCVSAATSTNDSFEIRPAPKPVMETIPLGDLQARALASLRANSRNSFMVIPKSKASGAPPPEGRQSVELPKGDLGPASPSQELGSQPVPGGDGAPALGKSPLEVEAQWAVEEGACPRTATALADRAIRWQRPSSPPPFLPAASEEAEPAEGLRVPGLAKNSREYVRPGLPVTFIDEVDSEEAPQAAKLPYLPHPARPLHPARPGCVAELQPRGSNTFTVVPKRKPGTLQDQHFSQANREPRPREAEEEEASCLLGPTLKKRYPTVHEIEVIGGYLALQKSCLTKAGSSRKKMKISFNDKSLQTTFEYPSESSLEQEEEVDQQEEEEEEEEEEEEEEEGSGSEEKPFALFLPRATFVSSVRPESSRLPEGSSGLSSYTPKHSVAFSKWQEQALEQAPREAEPPPVEAMVRCGGVERWGESDTRASPCVHILSSHFQLTPASQNDLSDFRSEPALYF

SEQ ID NO: 86721 - protein, 711 aa, Homo sapiens
  Payload ID: 17353
  Gene Symbol: TPRN
  Gene Name: taperin
  Uniprot ID: Q4KMQ1
  ENSP ID: ENSP00000387100
MAALGRPGSGPRAAVPAWKREILERKRAKLAALGGGAGPGAAEPEQRVLAESLGPLRENPFMLLEAERRRGGGAAGARLLERYRRVPGVRALRADSVLIIETVPGFPPAPPAPGAAQIRAAEVLVYGAPPGRVSRLLERFDPPAAPRRRGSPERARPPPPPPPPAPPRPPPAAPSPPAAPGPRGGGASPGARRSDFLQKTGSNSFTVHPRGLHRGAGARLLSNGHSAPEPRAGPANRLAGSPPGSGQWKPKVESGDPSLHPPPSPGTPSATPASPPASATPSQRQCVSAATSTNDSFEIRPAPKPVMETIPLGDLQARALASLRANSRNSFMVIPKSKASGAPPPEGRQSVELPKGDLGPASPSQELGSQPVPGGDGAPALGKSPLEVEAQWAVEEGACPRTATALADRAIRWQRPSSPPPFLPAASEEAEPAEGLRVPGLAKNSREYVRPGLPVTFIDEVDSEEAPQAAKLPYLPHPARPLHPARPGCVAELQPRGSNTFTVVPKRKPGTLQDQHFSQANREPRPREAEEEEASCLLGPTLKKRYPTVHEIEVIGGYLALQKSCLTKAGSSRKKMKISFNDKSLQTTFEYPSESSLEQEEEVDQQEEEEEEEEEEEEEEEGSGSEEKPFALFLPRATFVSSVRPESSRLPEGSSGLSSYTPKHSVAFSKWQEQALEQAPREAEPPPVEAMLTPASQNDLSDFRSEPALYF

SEQ ID NO: 86722 - protein, 1621 aa, Homo sapiens
  Payload ID: 17354
  Gene Symbol: TARBP1
  Gene Name: TAR (HIV-1) RNA binding protein 1
  Uniprot ID: Q13395
  ENSP ID: ENSP00000040877
MEWVLAEALLSQSRDPRALLGALCQGEASAERVETLRFLLQRLEDEEARGSGGAGALPEAAREVAAGYLVPLLRSLRGRPAGGPDPSLQPRHRRRVLRAAGAALRSCVRLAGRPQLAAALAEEALRDLLAGWRAPGAEAAVEVLAAVGPCLRPREDGPLLERVAGTAVALALGGGGDGDEAGPAEDAAALVAGRLLPVLVQCGGAALRAVWGGLAAPGASLGSGRVEEKLLVLSALAEKLLPEPGGDRARGAREAGPDARRCWRFWRTVQAGLGQADALTRKRARYLLQRAVEVSAELGADCTCGPQEGNGPSLFWWSERKKDELLKFWENYILIMETLEGNQIHVIKPVLPKLNNLFEYAVSEENGCWLFHPSWHMCIYKRMFESENKILSKEGVIHFLELYETKILPFSPEFSEFIIGPLMDALSESSLYSRSPGQPIGSCSPLGLKLQKFLVTYISLLPEEIKSSFLLKFIRKMTSRHWCAVPILFLSKALANVPRHKALGIDGLLALRDVIHCTMITHQILLRGAAQCYLLQTAMNLLDVEKVSLSDVSTFLMSLRQEESLGRGTSLWTELCDWLRVNESYFKPSPTCSSIGLHKTSLNAYVKSIVQEYVKSSAWETGENCFMPDWFEAKLVSLMVLLAVDVEGMKTQYSGKQRTENVLRIFLDPLLDVLMKFSTNAYMPLLKTDRCLQLLLKLLNTCRLKGSSAQDDEVSTVLQNFFMSTTESISEFILRRLTMNELNSVSDLDRCHLYLMVLTELINLHLKVGWKRGNPIWRVISLLKNASIQHLQEMDSGQEPTVGSQIQRVVSMAALAMVCEAIDQKPELQLDSLHAGPLESFLSSLQLNQTLQKPHAEEQSSYAHPLECSSVLEESSSSQGWGKIVAQYIHDQWVCLSFLLKKYHTLIPTTGSEILEPFLPAVQMPIRTLQSALEALTVLSSDQVLPVFHCLKVLVPKLLTSSESLCIESFDMAWKIISSLSNTQLIFWANLKAFVQFVFDNKVLTIAAKIKGQAYFKIKEIMYKIIEMSAIKTGVFNTLISYCCQSWIVSASNVSQGSLSSAKNYSELILEACIFGTVFRRDQRLVQDVQTFIENLGHDCAANIVMENTKREDHYVRICAVKFLCLLDGSNMSHKLFIEDLAIKLLDKDELVSKSKKRYYVNSLQHRVKNRVWQTLLVLFPRLDQNFLNGIIDRIFQAGFTNNQASIKYFIEWIIILILHKFPQFLPKFWDCFSYGEENLKTSICTFLAVLSHLDIITQNIPEKKLILKQALIVVLQWCFNHNFSVRLYALVALKKLWTVCKVLSVEEFDALTPVIESSLHQVESMHGAGNAKKNWQRIQEHFFFATFHPLKDYCLETIFYILPRLSGLIEDEWITIDKFTRFTDVPLAAGFQWYLSQTQLSKLKPGDWSQQDIGTNLVEADNQAEWTDVQKKIIPWNSRVSDLDLELLFQDRAARLGKSISRLIVVASLIDKPTNLGGLCRTCEVFGASVLVVGSLQCISDKQFQHLSVSAEQWLPLVEVKPPQLIDYLQQKKTEGYTIIGVEQTAKSLDLTQYCFPEKSLLLLGNEREGIPANLIQQLDVCVEIPQQGIIRSLNVHVSGALLIWEYTRQQLLSHGDTKP

SEQ ID NO: 86723 - protein, 366 aa, Homo sapiens
  Payload ID: 17355
  Gene Symbol: TARBP2
  Gene Name: TAR (HIV-1) RNA binding protein 2
  Uniprot ID: Q15633
  ENSP ID: ENSP00000266987
MSEEEQGSGTTTGCGLPSIEQMLAANPGKTPISLLQEYGTRIGKTPVYDLLKAEGQAHQPNFTFRVTVGDTSCTGQGPSKKAAKHKAAEVALKHLKGGSMLEPALEDSSSFSPLDSSLPEDIPVFTAAAAATPVPSVVLTRSPPMELQPPVSPQQSECNPVGALQELVVQKGWRLPEYTVTQESGPAHRKEFTMTCRVERFIEIGSGTSKKLAKRNAAAKMLLRVHTVPLDARDGNEVEPDDDHFSIGVGSRLDGLRNRGPGCTWDSLRNSVGEKILSLRSCSLGSLGALGPACCRVLSELSEEQAFHVSYLDIEELSLSGLCQCLVELSTQPATVCHGSATTREAARGEAARRALQYLKIMAGSK

SEQ ID NO: 86724 - protein, 345 aa, Homo sapiens
  Payload ID: 17355
  Gene Symbol: TARBP2
  Gene Name: TAR (HIV-1) RNA binding protein 2
  Uniprot ID: Q15633
  ENSP ID: ENSP00000377885
MLAANPGKTPISLLQEYGTRIGKTPVYDLLKAEGQAHQPNFTFRVTVGDTSCTGQGPSKKAAKHKAAEVALKHLKGGSMLEPALEDSSSFSPLDSSLPEDIPVFTAAAAATPVPSVVLTRSPPMELQPPVSPQQSECNPVGALQELVVQKGWRLPEYTVTQESGPAHRKEFTMTCRVERFIEIGSGTSKKLAKRNAAAKMLLRVHTVPLDARDGNEVEPDDDHFSIGVGSRLDGLRNRGPGCTWDSLRNSVGEKILSLRSCSLGSLGALGPACCRVLSELSEEQAFHVSYLDIEELSLSGLCQCLVELSTQPATVCHGSATTREAARGEAARRALQYLKIMAGSK

SEQ ID NO: 86725 - protein, 345 aa, Homo sapiens; identical to SEQ ID NO: 86724
  Payload ID: 17355
  Gene Symbol: TARBP2
  Gene Name: TAR (HIV-1) RNA binding protein 2
  Uniprot ID: Q15633
  ENSP ID: ENSP00000416077

SEQ ID NO: 86726 - protein, 92 aa, Homo sapiens
  Payload ID: 17355
  Gene Symbol: TARBP2
  Gene Name: TAR (HIV-1) RNA binding protein 2
  ENSP ID: ENSP00000447262
MLAANPGKTPISLLQEYGTRIGKTPVYDLLKAEGQAHQPNFTFRVTVGDTSCTGQGPSKKAAKHKAAEVALKHLKGGSMLEPALEDSRLFTA

SEQ ID NO: 86727 - protein, 227 aa, Homo sapiens
  Payload ID: 17355
  Gene Symbol: TARBP2
  Gene Name: TAR (HIV-1) RNA binding protein 2
  ENSP ID: ENSP00000447767
  MOD_RES (1)..(1): Any amino acid
XPISLLQEYGTRIGKTPVYDLLKAEGQAHQPNFTFRVTVGDTSCTGQGPSKKAAKHKAAEVALKHLKGGSMLEPALEDSSSFSPLDSSLPEDIPVFTAAAAATPVPSVVLTRSPPMELQPPVSPQQSECNPVGALQELVVQKGWRLPEYTVTQESGPAHRKEFTMTCRVERFIEIGCGLPPGWSSKPGPRLHLGFSTKFSRREDPVPPQLLPGLPGCPGPCLLPCPQ

SEQ ID NO: 86728 - protein, 94 aa, Homo sapiens
  Payload ID: 17355
  Gene Symbol: TARBP2
  Gene Name: TAR (HIV-1) RNA binding protein 2
  ENSP ID: ENSP00000447993
MSEEEQGSGTTTGCGLPSLLQEYGTRIGKTPVYDLLKAEGQAHQPNFTFRVTVGDTSCTGQGPSKKAAKHKAAEVALKHLKGGSMLEPALEDSR

SEQ ID NO: 86729 - protein, 196 aa, Homo sapiens
  Payload ID: 17355
  Gene Symbol: TARBP2
  Gene Name: TAR (HIV-1) RNA binding protein 2
  ENSP ID: ENSP00000448199
MLEPALEDSSSFSPLDSSLPEDIPVFTAAAAATPVPSVVLTRSPPMELQPPVSPQQSECNPVGALQELVVQKGWRLPEYTVTQESGPAHRKEFTMTCRVERFIEIGSGTSKKLAKRNAAAKMLLRVHTVPLDARDGNEVEPDDDHFSIGVGSRLDGLRNRGPGCTWDSLRNSVGEKILSLRSCSLGSLGALGPACC

SEQ ID NO: 86730 - protein, 88 aa, Homo sapiens
  Payload ID: 17355
  Gene Symbol: TARBP2
  Gene Name: TAR (HIV-1) RNA binding protein 2
  ENSP ID: ENSP00000448943
MLAANPGKTPISLLQEYGTRIGKTPVYDLLKAEGQAHQPNFTFRVTVGDTSCTGQGPSKKAAKHKAAEVALKHLKGGSMLEPALEDSR

SEQ ID NO: 86731 - protein, 187 aa, Homo sapiens
  Payload ID: 17355
  Gene Symbol: TARBP2
  Gene Name: TAR (HIV-1) RNA binding protein 2
  ENSP ID: ENSP00000448948
MLAANPGKTPISLLQEYGTRIGKTPVYDLLKAEGQAHQPNFTFRVTVGDTSCTGQGPSKKAAKHKAAEVALKHLKGGSMLEPALEDSSSFSPLDSSLPEDIPVFTAAAAATPVPSVVLTRSPPMELQPPVSPQQSECNPVGALQSLRLLRGDQRGCEKPFFTQPHAPCVSLPRSWWCRKAGGCRSTQ

SEQ ID NO: 86732 - protein, 165 aa, Homo sapiens
  Payload ID: 17355
  Gene Symbol: TARBP2
  Gene Name: TAR (HIV-1) RNA binding protein 2
  ENSP ID: ENSP00000449537
MSEEEQGSGTTTGCGLPSSFSPLDSSLPEDIPVFTAAAAATPVPSVVLTRSPPMELQPPVSPQQSECNPVGALQELVVQKGWRLPEYTVTQESGPAHRKEFTMTCRVERFIEIGCGLPPGWSSKPGPRLHLGFSTKFSRREDPVPPQLLPGLPGCPGPCLLPCPQ

SEQ ID NO: 86733 - protein, 113 aa, Homo sapiens
  Payload ID: 17355
  Gene Symbol: TARBP2
  Gene Name: TAR (HIV-1) RNA binding protein 2
  ENSP ID: ENSP00000450320
MSEEEQGSGTTTGCGLPSIEQMLAANPGKTPISLLQEYGTRIGKTPVYDLLKAEGQAHQPNFTFRVTVGDTSCTGQGPSKKAAKHKAAEVALKHLKGGSMLEPALEDSRLFTA

SEQ ID NO: 86734 - protein, 160 aa, Homo sapiens
  Payload ID: 17355
  Gene Symbol: TARBP2
  Gene Name: TAR (HIV-1) RNA binding protein 2
  ENSP ID: ENSP00000458011
MLEPALEDSSSFSPLDSSLPEDIPVFTAAAAATPVPSVVLTRSPPMELQPPVSPQQSECNPVGALQELVVQKGWRLPEYTVTQESGPAHRKEFTMTCRVERFIEIGSGTSKKLAKRNAAAKMLLRVHTVPLDARDGNEVEPDDDHFSIGVGSRLDGLRNR

SEQ ID NO: 86735 - protein, 414 aa, Homo sapiens
  Payload ID: 17356
  Gene Symbol: TARDBP
  Gene Name: TAR DNA binding protein
  Uniprot ID: Q13148
  ENSP ID: ENSP00000240185
MSEYIRVTEDENDEPIEIPSEDDGTVLLSTVTAQFPGACGLRYRNPVSQCMRGVRLVEGILHAPDAGWGNLVYVVNYPKDNKRKMDETDASSAVKVKRAVQKTSDLIVLGLPWKTTEQDLKEYFSTFGEVLMVQVKKDLKTGHSKGFGFVRFTEYETQVKVMSQRHMIDGRWCDCKLPNSKQSQDEPLRSRKVFVGRCTEDMTEDELREFFSQYGDVMDVFIPKPFRAFAFVTFADDQIAQSLCGEDLIIKGISVHISNAEPKHNSNRQLERSGRFGGNPGGFGNQGGFGNSRGGGAGLGNNQGSNMGGGMNFGAFSINPAMMAAAQAALQSSWGMMGMLASQQNQSGPSGNNQNQGNMQREPNQAFGSGNNSYSGSNSGAAIGWGSASNAGSGSGFNGGFGSSMDSKSSGWGM

SEQ ID NO: 86736 - protein, 295 aa, Homo sapiens
  Payload ID: 17356
  Gene Symbol: TARDBP
  Gene Name: TAR DNA binding protein
  ENSP ID: ENSP00000313129
MSEYIRVTEDENDEPIEIPSEDDGTVLLSTVTAQFPGACGLRYRNPVSQCMRGVRLVEGILHAPDAGWGNLVYVVNYPKDNKRKMDETDASSAVKVKRAVQKTSDLIVLGLPWKTTEQDLKEYFSTFGEVLMVQVKKDLKTGHSKGFGFVRFTEYETQVKVMSQRHMIDGRWCDCKLPNSKQSQDEPLRSRKVFVGRCTEDMTEDELREFFSQYGDVMDVFIPKPFRAFAFVTFADDQIAQSLCGEDLIIKGISVHISNAEPKHNSNRQLERSGRFGVHLISNVYGRSTSLKVVL

SEQ ID NO: 86737 - protein, 84 aa, Homo sapiens
  Payload ID: 17356
  Gene Symbol: TARDBP
  Gene Name: TAR DNA binding protein
  ENSP ID: ENSP00000404666
MSEYIRVTEDENDEPIEIPSEDDGTVLLSTVTAQFPGACGLRYRNPVSQCMRGVRLVEGILHAPDAGWGNLVYVVNYPKGQERS

SEQ ID NO: 86738 - protein, 298 aa, Homo sapiens; identical to SEQ ID NO: 76003
  Payload ID: 17356
  Gene Symbol: TARDBP
  Gene Name: TAR DNA binding protein
  ENSP ID: ENSP00000432132

SEQ ID NO: 86739 - protein, 80 aa, Homo sapiens
  Payload ID: 17356
  Gene Symbol: TARDBP
  Gene Name: TAR DNA binding protein
  ENSP ID: ENSP00000465080
MSEYIRVTEDENDEPIEIPSEDDGTVLLSTVTAQFPGACGLRYRNPVSQCMRGVRLVEGILHAPDAGWGNLVYVVNYPKV

SEQ ID NO: 86740 - protein, 201 aa, Homo sapiens
  Payload ID: 17356
  Gene Symbol: TARDBP
  Gene Name: TAR DNA binding protein
  ENSP ID: ENSP00000465240
MSEYIRVTEDENDEPIEIPSEDDGTVLLSTVTAQFPGACGLRYRNPVSQCMRGVRLVEGILHAPDAGWGNLVYVVNYPKDNKRKMDETDASSAVKVKRAVQKTSDLIVLGLPWKTTEQDLKEYFSTFGEVLMVQVKKDLKTGHSKGFGFVRFTEYETQVKVMSQRHMIDGRWCDCKLPNSKQSQDEPLRSRKVFVGRCTED

SEQ ID NO: 86741 - protein, 65 aa, Homo sapiens
  Payload ID: 17356
  Gene Symbol: TARDBP
  Gene Name: TAR DNA binding protein
  ENSP ID: ENSP00000465888
  MOD_RES (1)..(1): Any amino acid
XADDQIAQSLCGEDLIIKGISVHISNAEPKHNSNRQLERSGRFGGNPVHLISNVYGRSTSLKVVL

SEQ ID NO: 86742 - protein, 275 aa, Homo sapiens
  Payload ID: 17356
  Gene Symbol: TARDBP
  Gene Name: TAR DNA binding protein
  ENSP ID: ENSP00000466842
MSEYIRVTEDENDEPIEIPSEDDGTVLLSTVTAQFPGACGLRYRNPVSQCMRGVRLVEGILHAPDAGWGNLVYVVNYPKGWTWWLTSVIPATREAEAGESLEPGRQRLQRGEIAPLHSSLDNKRKMDETDASSAVKVKRAVQKTSDLIVLGLPWKTTEQDLKEYFSTFGEVLMVQVKKDLKTGHSKGFGFVRFTEYETQVKVMSQRHMIDGRWCDCKLPNSKQSQDEPLRSRKVFVGRCTEDMTEDELREFFSQYGDVMDVFIPKPFRAFAFVTF

SEQ ID NO: 86743 - protein, 16 aa, Homo sapiens
  Payload ID: 17356
  Gene Symbol: TARDBP
  Gene Name: TAR DNA binding protein
  ENSP ID: ENSP00000467020
LISNVYGRSTSLKVVL

SEQ ID NO: 86744 - protein, 35 aa, Homo sapiens
  Payload ID: 17356
  Gene Symbol: TARDBP
  Gene Name: TAR DNA binding protein
  ENSP ID: ENSP00000477852
  MOD_RES (1)..(1): Any amino acid
XAAIGWGSASNAGSGSGFNGGFGSSMDSKSSGWGM

SEQ ID NO: 86745 - protein, 212 aa, Homo sapiens
  Payload ID: 17356
  Gene Symbol: TARDBP
  Gene Name: TAR DNA binding protein
  ENSP ID: ENSP00000479219
  MOD_RES (1)..(1): Any amino acid
XTDASSAVKVKRAVQKTSDLIVLGLPWKTTEQDLKEYFSTFGEVLMVQVKKDLKTGHSKGFGFVRFTEYETQVKVMSQRHMIDGRWCDCKLPNSKQSQDEPLRSRKVFVGRCTEDMTEDELREFFSQYGDVMDVFIPKPFRAFAFVTFADDQIAQSLCGEDLIIKGISVHISNAEPKHNSNRQLERSGRFGGNPVHLISNVYGRSTSLKVVL

SEQ ID NO: 86746 - protein, 115 aa, Homo sapiens
  Payload ID: 17356
  Gene Symbol: TARDBP
  Gene Name: TAR DNA binding protein
  ENSP ID: ENSP00000479758
  MOD_RES (1)..(1): Any amino acid
XNNQGSNMGGGMNFGAFSINPAMMAAAQAALQSSWGMMGMLASQQNQSGPSGNNQNQGNMQREPNQAFGSGNNSYSGSNSGAAIGWGSASNAGSGSGFNGGFGSSMDSKSSGWGM

SEQ ID NO: 86747 - protein, 138 aa, Homo sapiens
  Payload ID: 17356
  Gene Symbol: TARDBP
  Gene Name: TAR DNA binding protein
  ENSP ID: ENSP00000479978
  MOD_RES (1)..(1): Any amino acid
XRFTEYETQVKVMSQRHMIDGRWCDCKLPNSKQSQDEPLRSRKVFVGRCTEDMTEDELREFFSQYGDVMDVFIPKPFRAFAFVTFADDQIAQSLCGEDLIIKGISVHISNAEPKHNSNRQLERSGRFGGNPVQYEAFI

SEQ ID NO: 86748 - protein, 243 aa, Homo sapiens
  Payload ID: 17356
  Gene Symbol: TARDBP
  Gene Name: TAR DNA binding protein
  ENSP ID: ENSP00000480690
MSEYIRVTEDENDEPIEIPSEDDGTVLLSTVTAQFPGACGLRYRNPVSQCMRGVRLVEGILHAPDAGWGNLVYVVNYPKDNKRKMDETDASSAVKVKRAVQKTSDLIVLGLPWKTTEQDLKEYFSTFGEVLMVQVKKDLKTGHSKGFGFVRFTEYETQVKVMSQRHMIDGRWCDCKLPNSKIAQSLCGEDLIIKGISVHISNAEPKHNSNRQLERSGRFGGNPGGFGNQGGFGNSRGGGAGLG

SEQ ID NO: 86749 - protein, 149 aa, Homo sapiens
  Payload ID: 17356
  Gene Symbol: TARDBP
  Gene Name: TAR DNA binding protein
  ENSP ID: ENSP00000480771
  MOD_RES (1)..(1): Any amino acid
XRFTEYETQVKVMSQRHMIDGRWCDCKLPNSKQSQDEPLRSRKVFVGRCTEDMTEDELREFFSQYGDVMDVFIPKPFRAFAFVTFADDQIAQSLCGEDLIIKGISVHISNAEPKHNSNRQLERSGRFGGNPVHLISNVYGRSTSLKVVL

SEQ ID NO: 86750 - protein, 200 aa, Homo sapiens
  Payload ID: 17356
  Gene Symbol: TARDBP
  Gene Name: TAR DNA binding protein
  ENSP ID: ENSP00000481206
  MOD_RES (1)..(1): Any amino acid
XDETDASSAVKVKRAVQKTSDLIVLGLPWKTTEQDLKEYFSTFGEVLMVQVKKDLKTGHSKGFGFVRFTEYETQVKVMSQRHMIDGRWCDCKLPNSKQSQDEPLRSRKVFVGRCTEDMTEDELREFFSQYGDVMDVFIPKPFRAFAFVTFADDQIAQSLCGEDLIIKGISVHISNAEPKHNSNRQLERSGRFGVQYEAFI

SEQ ID NO: 86751 - protein, 175 aa, Homo sapiens
  Payload ID: 17356
  Gene Symbol: TARDBP
  Gene Name: TAR DNA binding protein
  ENSP ID: ENSP00000481330
KEYFSTFGEVLMVQVKKDLKTGHSKGFGFVRFTEYETQVKVMSQRHMIDGRWCDCKLPNSKQSQDEPLRSRKVFVGRCTEDMTEDELREFFSQYGDVMDVFIPKPFRAFAFVTFADDQIAQSLCGEDLIIKGISVHISNAEPKHNSNRQLERSGRFGVHLISNVYGRSTSLKVVL

SEQ ID NO: 86752 - protein, 304 aa, Homo sapiens
  Payload ID: 17356
  Gene Symbol: TARDBP
  Gene Name: TAR DNA binding protein
  ENSP ID: ENSP00000482191
MSEYIRVTEDENDEPIEIPSEDDGTVLLSTVTAQFPGACGLRYRNPVSQCMRGVRLVEGILHAPDAGWGNLVYVVNYPKDNKRKMDETDASSAVKVKRAVQKTSDLIVLGLPWKTTEQDLKEYFSTFGEVLMVQVKKDLKTGHSKGFGFVRFTEYETQVKVMSQRHMIDGRWCDCKLPNSKQSQDEPLRSRKVFVGRCTEDMTEDELREFFSQYGDVMDVFIPKPFRAFAFVTFADDQIAQSLCGEDLIIKGISVHISNAEPKHNSNRQLERSGRFGGNPGGFGNQVHLISNVYGRSTSLKVVL

SEQ ID NO: 86753 - protein, 127 aa, Homo sapiens
  Payload ID: 17356
  Gene Symbol: TARDBP
  Gene Name: TAR DNA binding protein
  ENSP ID: ENSP00000482559
CKLPNSKQSQDEPLRSRKVFVGRCTEDMTEDELREFFSQYGDVMDVFIPKPFRAFAFVTFADDQIAQSLCGEDLIIKGISVHISNAEPKHNSNRQLERSGRFGGNPGILSTCFLIQEFVITHHRPRL

SEQ ID NO: 86754 - protein, 78 aa, Homo sapiens
  Payload ID: 17356
  Gene Symbol: TARDBP
  Gene Name: TAR DNA binding protein
  ENSP ID: ENSP00000482754
  MOD_RES (1)..(1): Any amino acid
XQDEPLRSRKVFVGRCTEDMTEDELREFFSQYGDVMDVFIPKPFRAFAFVTFADDQIAQSLCGEDLIIKGISVHKSTI

SEQ ID NO: 86755 - protein, 301 aa, Homo sapiens
  Payload ID: 17356
  Gene Symbol: TARDBP
  Gene Name: TAR DNA binding protein
  ENSP ID: ENSP00000484722
MSEYIRVTEDENDEPIEIPSEDDGTVLLSTVTAQFPGACGLRYRNPVSQCMRGVRLVEGILHAPDAGWGNLVYVVNYPKDNKRKMDETDASSAVKVKRAVQKTSDLIVLGLPWKTTEQDLKEYFSTFGEVLMVQVKKDLKTGHSKGFGFVRFTEYETQVKVMSQRHMIDGRWCDCKLPNSKQSQDEPLRSRKVFVGRCTEDMTEDELREFFSQYGDVMDVFIPKPFRAFAFVTFADDQIAQSLCGEDLIIKGISVHISNAEPKHNSNRQLERSGRFGGNPGILSTCFLIQEFVITHHRPRL

SEQ ID NO: 86756 - protein, 298 aa, Homo sapiens; identical to SEQ ID NO: 76003
  Payload ID: 17356
  Gene Symbol: TARDBP
  Gene Name: TAR DNA binding protein
  ENSP ID: ENSP00000486989

SEQ ID NO: 86757 - protein, 510 aa, Homo sapiens
  Payload ID: 17357
  Gene Symbol: TOE1
  Gene Name: target of EGR1, member 1 (nuclear)
  Uniprot ID: Q96GM8
  ENSP ID: ENSP00000361162
MAADSDDGAVSAPAASDGGVSKSTTSGEELVVQVPVVDVQSNNFKEMWPSLLLAIKTANFVAVDTELSGLGDRKSLLNQCIEERYKAVCHAARTRSILSLGLACFKRQPDKGEHSYLAQVFNLTLLCMEEYVIEPKSVQFLIQHGFNFNQQYAQGIPYHKGNDKGDESQSQSVRTLFLELIRARRPLVLHNGLIDLVFLYQNFYAHLPESLGTFTADLCEMFPAGIYDTKYAAEFHARFVASYLEYAFRKCERENGKQRAAGSPHLTLEFCNYPSSMRDHIDYRCCLPPATHRPHPTSICDNFSAYGWCPLGPQCPQSHDIDLIIDTDEAAAEDKRRRRRRREKRKRALLNLPGTQTSGEAKDGPPKKQVCGDSIKPEETEQEVAADETRNLPHSKQGNKNDLEMGIKAARPEIADRATSEVPGSQASPNPVPGDGLHRAGFDAFMTGYVMAYVEVSQGPQPCSSGPWLPECHNKVYLSGKAVPLTVAKSQFSRSSKAHNQKMKLTWGSS

SEQ ID NO: 86758 - protein, 399 aa, Homo sapiens
  Payload ID: 17358
  Gene Symbol: TOM1L1
  Gene Name: target of myb1 like 1 membrane trafficking protein
  Uniprot ID: O75674
  ENSP ID: ENSP00000343901
MCVQNCGPSFQSLIVKKEFVKENLVKLLNPRYNLPLDIQNRILNFIKTWSQGFPGGVDVSEVKEVYLDLVKKGVQFPPSEAEAETARQETAQISSNPPTSVPTAPALSSVIAPKNSTVTLVPEQIGKLHSELDMVKMNVRVMSAILMENTPGSENHEDIELLQKLYKTGREMQERIMDLLVVVENEDVTVELIQVNEDLNNAILGYERFTRNQQRILEQNKNQKEATNTTSEPSAPSQDLLDLSPSPRMPRATLGELNTMNNQLSGLNFSLPSSDVTNNLKPSLHPQMNLLALENTEIPPFAQRTSQNLTSSHAYDNFLEHSNSVFLQPVSLQTIAAAPSNQSLPPLPSNHPAMTKSDLQPPNYYEVMEFDPLAPAVTTEAIYEEIDAHQHKGAQNDGD

SEQ ID NO: 86759 - protein, 465 aa, Homo sapiens
  Payload ID: 17358
  Gene Symbol: TOM1L1
  Gene Name: target of myb1 like 1 membrane trafficking protein
  ENSP ID: ENSP00000408958
MAFGKSHRDPYATSVGHLIEKATFAGVQTEDWGQFMHICDIINTTQDGPKDAVKALKKRISKNYNHKEIQLTLSLIDMCVQNCGPSFQSLIVKKEFVKENLVKLLNPRYNLPLDIQNRILNFIKTWSQGFPGGVDVSEVKEVYLDLVKKGVQFPPSEAEAETARQETAQISSNPPTSVPTAPALSSVIAPKNSTVTLVPEQIGKLHSELDMVKMNVRVMSAILMENTPGSENHEDIELLQKLYKTGREMQERIMDLLVVVENEDVTVELIQVNEDLNNAILGYERFTRNQQRILEQNKNQKEATNTTSEPSAPSQDLLDLSPSPRMPRATLGELNTMNNQLSGLNFSLPSSDVTNNLKPSLHPQMNLLALENTEIPPFAQRTSQNLTSSHAYDNPVSLQTIAAAPSNQSLPPLPSNHPAMTKSDLQPPNYYEVMEFDPLAPAVTTEAIYEEIDAHQHKGAQNDGD

SEQ ID NO: 86760 - protein, 399 aa, Homo sapiens; identical to SEQ ID NO: 86758
  Payload ID: 17358
  Gene Symbol: TOM1L1
  Gene Name: target of myb1 like 1 membrane trafficking protein
  Uniprot ID: O75674
  ENSP ID: ENSP00000443099

SEQ ID NO: 86761 - protein, 63 aa, Homo sapiens
  Payload ID: 17358
  Gene Symbol: TOM1L1
  Gene Name: target of myb1 like 1 membrane trafficking protein
  ENSP ID: ENSP00000458219
MAFGKSHRDPYATSVGHLIEKATFAGVQTEDWGQFMHICDIINTTQDGLLTCVCRTVVQVSSL

SEQ ID NO: 86762 - protein, 346 aa, Homo sapiens
  Payload ID: 17358
  Gene Symbol: TOM1L1
  Gene Name: target of myb1 like 1 membrane trafficking protein
  Uniprot ID: O75674
  ENSP ID: ENSP00000458553
MAFGKSHRDPYATSVGHLIEKATFAGVQTEDWGQFMHICDIINTTQDGPKDAVKALKKRISKNYNHKEIQLTLSLIDMCVQNCGPSFQSLIVKKEFVKENLVKLLNPRYNLPLDIQNRILNFIKTWSQGFPGGVDVSEVKEVYLDLVKKGVQFPPSEAEAETARQETAQISSNPPTSVPTAPALSSVIAPKNSTVTLVPEQIGKLHSELDMVKMNVRVMSAILMENTPGSENHEDIELLQKLYKTGREMQERIMDLLVVVENEDVTVELIQVNEDLNNAILGYERFTRNQQRILEQNKNQKEATNTTSEPSAPSQDLLDLSPSPRMPRATLGELNTMNNQLSGLSK

SEQ ID NO: 86763 - protein, 252 aa, Homo sapiens
  Payload ID: 17358
  Gene Symbol: TOM1L1
  Gene Name: target of myb1 like 1 membrane trafficking protein
  ENSP ID: ENSP00000458809
  MOD_RES (1)..(1): Any amino acid
XKSHRDPYATSVGHLIEKATFAGVQTEDWGQFMHICDIINTTQDGPKDAVKALKKRISKNYNHKEIQLTLSTWSQGFPGGVDVSEVKEVYLDLVKKGVQFPPSEAEAETARQETAQISSNPPTSVPTAPALSSVIAPKNSTVTLVPEQIGKLHSELDMVKMNVRVMSAILMENTPGSENHEDIELLQKLYKTGREMQERIMDLLVVVENEDVTVELIQVNEDLNNAILGYERFTRNQQRILEQNKNQKEATN

SEQ ID NO: 86764 - protein, 346 aa, Homo sapiens; identical to SEQ ID NO: 86762
  Payload ID: 17358
  Gene Symbol: TOM1L1
  Gene Name: target of myb1 like 1 membrane trafficking protein
  Uniprot ID: O75674
  ENSP ID: ENSP00000458918

SEQ ID NO: 86765 - protein, 106 aa, Homo sapiens
  Payload ID: 17358
  Gene Symbol: TOM1L1
  Gene Name: target of myb1 like 1 membrane trafficking protein
  ENSP ID: ENSP00000459003
MCVQNCGPSFQSLIVKKEFVKENLVKLLNPRYNLPLDIQNRILNFIKTWSQGFPGGVDVSEVKEVYLDLVKKGVQFPPSEAEAETARQETAQISSNPPTSVPTAPA

SEQ ID NO: 86766 - protein, 38 aa, Homo sapiens
  Payload ID: 17358
  Gene Symbol: TOM1L1
  Gene Name: target of myb1 like 1 membrane trafficking protein
  ENSP ID: ENSP00000459079
MAFGKSHRDPYATSVGHLIAQTQQLFLGRKGYICWSSD

SEQ ID NO: 86767 - protein, 229 aa, Homo sapiens
  Payload ID: 17358
  Gene Symbol: TOM1L1
  Gene Name: target of myb1 like 1 membrane trafficking protein
  ENSP ID: ENSP00000460213
MPPGEWNQTEKATFAGVQTEDWGQFMHICDIINTTQDGPKDAVKALKKRISKNYNHKEIQLTLSLIDMCVQNCGPSFQSLIVKKEFVKENLVKLLNPRYNLPLDIQNRILNFIKTWSQGFPGGVDVSEVKEVYLDLVKKGVQFPPSEAEAETARQETAQISSNPPTSVPTAPALSSVIAPKNSTVTLVPEQIGKLHSELDMVKMNVRVMSAILMENTPGSENHEDIELL

SEQ ID NO: 86768 - protein, 92 aa, Homo sapiens
  Payload ID: 17358
  Gene Symbol: TOM1L1
  Gene Name: target of myb1 like 1 membrane trafficking protein
  ENSP ID: ENSP00000460565
MAFGKSHRDPYATSVGHLIEKATFAGVQTEDWGQFMHICDIINTTQDGPKDAVKALKKRISKNYNHKEIQLTLSSRCLLTCVCRTVVQVSSL

SEQ ID NO: 86769 - protein, 225 aa, Homo sapiens
  Payload ID: 17358
  Gene Symbol: TOM1L1
  Gene Name: target of myb1 like 1 membrane trafficking protein
  ENSP ID: ENSP00000460721
MHICDIINTTQDGPKDAVKALKKRISKNYNHKEIQLTLSLIDMCVQNCGPSFQSLIVKKEFVKENLVKLLNPRYNLPLDIQNRILNFIKTWSQGFPGGVDVSEVKEVYLDLVKKGVQFPPSEAEAETARQETAQISSNPPTSVPTAPALSSVIAPKNSTVTLVPEQIGKLHSELDMVKMNVRVMSAILMENTPGSENHEDIELLQVLYDFRDYQSKCLLKLFSKL

SEQ ID NO: 86770 - protein, 476 aa, Homo sapiens
  Payload ID: 17358
  Gene Symbol: TOM1L1
  Gene Name: target of myb1 like 1 membrane trafficking protein
  Uniprot ID: O75674
  ENSP ID: ENSP00000460823
MAFGKSHRDPYATSVGHLIEKATFAGVQTEDWGQFMHICDIINTTQDGPKDAVKALKKRISKNYNHKEIQLTLSLIDMCVQNCGPSFQSLIVKKEFVKENLVKLLNPRYNLPLDIQNRILNFIKTWSQGFPGGVDVSEVKEVYLDLVKKGVQFPPSEAEAETARQETAQISSNPPTSVPTAPALSSVIAPKNSTVTLVPEQIGKLHSELDMVKMNVRVMSAILMENTPGSENHEDIELLQKLYKTGREMQERIMDLLVVVENEDVTVELIQVNEDLNNAILGYERFTRNQQRILEQNKNQKEATNTTSEPSAPSQDLLDLSPSPRMPRATLGELNTMNNQLSGLNFSLPSSDVTNNLKPSLHPQMNLLALENTEIPPFAQRTSQNLTSSHAYDNFLEHSNSVFLQPVSLQTIAAAPSNQSLPPLPSNHPAMTKSDLQPPNYYEVMEFDPLAPAVTTEAIYEEIDAHQHKGAQNDGD

SEQ ID NO: 86771 - protein, 199 aa, Homo sapiens
  Payload ID: 17358
  Gene Symbol: TOM1L1
  Gene Name: target of myb1 like 1 membrane trafficking protein
  ENSP ID: ENSP00000461215
  MOD_RES (1)..(1): Any amino acid
XFGKSHRDPYATSVGHLIEKATFAGVQTEDWGQFMHICDIINTTQDGPKDAVKALKKRISKNYNHKEIQLTLSLIDMCVQNCGPSFQSLIVKKEFVKENLVKLLNPRYNLPLDIQNRILNFIKTWSQGFPGGVDVSEVKEVYLDLVKKGVQFPPSEAEAETARQEIGKLHSELDMVKMNVRVMSAILMENTPGSENHED

SEQ ID NO: 86772 - protein, 469 aa, Homo sapiens
  Payload ID: 17358
  Gene Symbol: TOM1L1
  Gene Name: target of myb1 like 1 membrane trafficking protein
  ENSP ID: ENSP00000461284
MAFGKSHRDPYATSVGHLIEKATFAGVQTEDWGQFMHICDIINTTQDGPKDAVKALKKRISKNYNHKEIQLTLSNCGPSFQSLIVKKEFVKENLVKLLNPRYNLPLDIQNRILNFIKTWSQGFPGGVDVSEVKEVYLDLVKKGVQFPPSEAEAETARQETAQISSNPPTSVPTAPALSSVIAPKNSTVTLVPEQIGKLHSELDMVKMNVRVMSAILMENTPGSENHEDIELLQKLYKTGREMQERIMDLLVVVENEDVTVELIQVNEDLNNAILGYERFTRNQQRILEQNKNQKEATNTTSEPSAPSQDLLDLSPSPRMPRATLGELNTMNNQLSGLNFSLPSSDVTNNLKPSLHPQMNLLALENTEIPPFAQRTSQNLTSSHAYDNFLEHSNSVFLQPVSLQTIAAAPSNQSLPPLPSNHPAMTKSDLQPPNYYEVMEFDPLAPAVTTEAIYEEIDAHQHKGAQNDGD

SEQ ID NO: 86773 - protein, 122 aa, Homo sapiens
  Payload ID: 17358
  Gene Symbol: TOM1L1
  Gene Name: target of myb1 like 1 membrane trafficking protein
  ENSP ID: ENSP00000461396
MHICDIINTTQDGPKDAVKALKKRISKNYNHKEIQLTLSLIDMCVQNCGPSFQSLIVKKEFVKENLVKLLNPRYNLPLDIQNRILNFIKTWSQGFPGGVDVSEVKEVYLDLVKKGVQFPPSE

SEQ ID NO: 86774 - protein, 326 aa, Homo sapiens
  Payload ID: 17358
  Gene Symbol: TOM1L1
  Gene Name: target of myb1 like 1 membrane trafficking protein
  ENSP ID: ENSP00000461876
MCVQNCGPSFQSLIVKKEFVKENLVKLLNPRYNLPLDIQNRILNFIKTWSQGFPGGVDVSEVKEVYLDLVKKGVQFPPSEAEAETARQETAQISSNPPTSVPTAPALSSVIAPKNSTVTLVPEQIGKLHSELDMVKMNVRVMSAILMENTPGSENHEDIELLQKLYKTGREMQERIMDLLVVVENEDVTVELIQVNEDLNNAILGYERFTRNQQRILEQNKNQKEATNTTSEPSAPSQDLLDLSPSPRMPRATLGELNTMNNQLSGLNFSLPSSDVTNNLKPSLHPQMNLLALENTEIPPRDLVLPCWPGCGLKLLTYGDLPTSAS

SEQ ID NO: 86775 - protein, 125 aa, Homo sapiens
  Payload ID: 17358
  Gene Symbol: TOM1L1
  Gene Name: target of myb1 like 1 membrane trafficking protein
  ENSP ID: ENSP00000467227
  MOD_RES (1)..(1): Any amino acid
XFSLPSSDVTNNLKPSLHPQMNLLALENTEIPPFAQRTSQNLTSSHAYDNFLEHSNSVFLQPVSLQTIAAAPSNQSLPPLPSNHPAMTKSDLQPPNYYEVMEFDPLAPAVTTEYIFQLQTYVRRI

SEQ ID NO: 86776 - protein, 462 aa, Homo sapiens
  Payload ID: 17359
  Gene Symbol: TOM1L2
  Gene Name: target of myb1 like 2 membrane trafficking protein
  Uniprot ID: Q6ZVM7
  ENSP ID: ENSP00000312860
MEFLLGNPFSTPVGQCLEKATDGSLQSEDWTLNMEICDIINETEEGPKDAIRALKKRLNGNRNYREVMLALTVLETCVKNCGHRFHILVANRDFIDSVLVKIISPKNNPPTIVQDKVLALIQSVPEVDPAATMPRSQSQQRTSAGSYSSPPPAPYSAPQAPALSVTGPITANSEQIARLRSELDVVRGNTKVMSEMLTEMVPGQEDSSDLELLQELNRTCRAMQQRIVELISRVSNEEVTEELLHVNDDLNNVFLRYERFERYRSGRSVQNASNGVLNEVTEDNLIDLGPGSPAVVSPMVGNTAPPSSLSSQLAGLDLGTESVSGTLSSLQQCNPRDGFDMFAQTRGNSLAEQRKTVTYEDPQAVGGLASALDNRKQSSEGIPVAQPSVMDDIEVWLRTDLKGDDLEEGVTSEEFDKFLEERAKAAEMVPDLPSPPMEAPAPASNPSGRKKPERSEDALFAL

SEQ ID NO: 86777 - protein, 507 aa, Homo sapiens
  Payload ID: 17359
  Gene Symbol: TOM1L2
  Gene Name: target of myb1 like 2 membrane trafficking protein
  Uniprot ID: Q6ZVM7
  ENSP ID: ENSP00000368818
MEFLLGNPFSTPVGQCLEKATDGSLQSEDWTLNMEICDIINETEEGPKDAIRALKKRLNGNRNYREVMLALTVLETCVKNCGHRFHILVANRDFIDSVLVKIISPKNNPPTIVQDKVLALIQAWADAFRSSPDLTGVVHIYEELKRKGVEFPMADLDALSPIHTPQRSVPEVDPAATMPRSQSQQRTSAGSYSSPPPAPYSAPQAPALSVTGPITANSEQIARLRSELDVVRGNTKVMSEMLTEMVPGQEDSSDLELLQELNRTCRAMQQRIVELISRVSNEEVTEELLHVNDDLNNVFLRYERFERYRSGRSVQNASNGVLNEVTEDNLIDLGPGSPAVVSPMVGNTAPPSSLSSQLAGLDLGTESVSGTLSSLQQCNPRDGFDMFAQTRGNSLAEQRKTVTYEDPQAVGGLASALDNRKQSSEGIPVAQPSVMDDIEVWLRTDLKGDDLEEGVTSEEFDKFLEERAKAAEMVPDLPSPPMEAPAPASNPSGRKKPERSEDALFAL

SEQ ID NO: 86778 - protein, 462 aa, Homo sapiens; identical to SEQ ID NO: 86776
  Payload ID: 17359
  Gene Symbol: TOM1L2
  Gene Name: target of myb1 like 2 membrane trafficking protein
  Uniprot ID: Q6ZVM7
  ENSP ID: ENSP00000379088

SEQ ID NO: 86779 - protein, 389 aa, Homo sapiens
  Payload ID: 17359
  Gene Symbol: TOM1L2
  Gene Name: target of myb1 like 2 membrane trafficking protein
  ENSP ID: ENSP00000437655
MEFLLGNPFSTPVGQCLEKATDGSLQSEDWTLNMEICDIINETEEGPKDAIRALKKRLNGNRNYREVMLALTVLETCVKNCGHRFHILVANRDFIDSVLVKIISPKNNPPTIVQDKVLALIQIARLRSELDVVRGNTKVMSEMLTEMVPGQEDSSDLELLQELNRTCRAMQQRIVELISRVSNEEVTEELLHVNDDLNNVFLRYERFERYRSGRSVQNASNGVLNEVTEDNLIDLGPGSPAVVSPMVGNTAPPSSLSSQLAGLDLGTESVSGTLSSLQQCNPRDGFDMFAQTRGNSLAEQRKTVTYEDPQAVGGLASALDNRKQSSEGKGDDLEEGVTSEEFDKFLEERAKAAEMVPDLPSPPMEAPAPASNPSGRKKPERSEDALFAL

SEQ ID NO: 86780 - protein, 483 aa, Homo sapiens
  Payload ID: 17359
  Gene Symbol: TOM1L2
  Gene Name: target of myb1 like 2 membrane trafficking protein
  Uniprot ID: Q6ZVM7
  ENSP ID: ENSP00000438621
MEFLLGNPFSTPVGQCLEKATDGSLQSEDWTLNMEICDIINETEEGPKDAIRALKKRLNGNRNYREVMLALTVLETCVKNCGHRFHILVANRDFIDSVLVKIISPKNNPPTIVQDKVLALIQAWADAFRSSPDLTGVVHIYEELKRKGVEFPMADLDALSPIHTPQRIARLRSELDVVRGNTKVMSEMLTEMVPGQEDSSDLELLQELNRTCRAMQQRIVELISRVSNEEVTEELLHVNDDLNNVFLRYERFERYRSGRSVQNASNGVLNEVTEDNLIDLGPGSPAVVSPMVGNTAPPSSLSSQLAGLDLGTESVSGTLSSLQQCNPRDGFDMFAQTRGNSLAEQRKTVTYEDPQAVGGLASALDNRKQSSEGTFLSSAQKRGRGGESDLEPIDSWLITQGMIPVAQPSVMDDIEVWLRTDLKGDDLEEGVTSEEFDKFLEERAKAAEMVPDLPSPPMEAPAPASNPSGRKKPERSEDALFAL

SEQ ID NO: 86781 - protein, 388 aa, Homo sapiens
  Payload ID: 17359
  Gene Symbol: TOM1L2
  Gene Name: target of myb1 like 2 membrane trafficking protein
  ENSP ID: ENSP00000445188
MEFLLGNPFSTPVGQCLEKATDGSLQSEDWTLNMEICDIINETEEGPKDAIRALKKRLNGNRNYREVMLALTIARLRSELDVVRGNTKVMSEMLTEMVPGQEDSSDLELLQELNRTCRAMQQRIVELISRVSNEEVTEELLHVNDDLNNVFLRYERFERYRSGRSVQNASNGVLNEVTEDNLIDLGPGSPAVVSPMVGNTAPPSSLSSQLAGLDLGTESVSGTLSSLQQCNPRDGFDMFAQTRGNSLAEQRKTVTYEDPQAVGGLASALDNRKQSSEGTFLSSAQKRGRGGESDLEPIDSWLITQGMIPVAQPSVMDDIEVWLRTDLKGDDLEEGVTSEEFDKFLEERAKAAEMVPDLPSPPMEAPAPASNPSGRKKPERSEDALFAL

SEQ ID NO: 86782 - protein, 240 aa, Homo sapiens
  Payload ID: 17359
  Gene Symbol: TOM1L2
  Gene Name: target of myb1 like 2 membrane trafficking protein
  Uniprot ID: Q6ZVM7
  ENSP ID: ENSP00000463313
MQQRIVELISRVSNEEVTEELLHVNDDLNNVFLRYERFERYRSGRSVQNASNGVLNEVTEDNLIDLGPGSPAVVSPMVGNTAPPSSLSSQLAGLDLGTESVSGTLSSLQQCNPRDGFDMFAQTRGNSLAEQRKTVTYEDPQAVGGLASALDNRKQSSEGIPVAQPSVMDDIEVWLRTDLKGDDLEEGVTSEEFDKFLEERAKAAEMVPDLPSPPMEAPAPASNPSGRKKPERSEDALFAL

SEQ ID NO: 86783 - protein, 457 aa, Homo sapiens
  Payload ID: 17359
  Gene Symbol: TOM1L2
  Gene Name: target of myb1 like 2 membrane trafficking protein
  Uniprot ID: Q6ZVM7
  ENSP ID: ENSP00000464297
MEFLLGNPFSTPVGQCLEKATDGSLQSEDWTLNMEICDIINETEEGPKDAIRALKKRLNGNRNYREVMLALTAWADAFRSSPDLTGVVHIYEELKRKGVEFPMADLDALSPIHTPQRSVPEVDPAATMPRSQSQQRTSAGSYSSPPPAPYSAPQAPALSVTGPITANSEQIARLRSELDVVRGNTKVMSEMLTEMVPGQEDSSDLELLQELNRTCRAMQQRIVELISRVSNEEVTEELLHVNDDLNNVFLRYERFERYRSGRSVQNASNGVLNEVTEDNLIDLGPGSPAVVSPMVGNTAPPSSLSSQLAGLDLGTESVSGTLSSLQQCNPRDGFDMFAQTRGNSLAEQRKTVTYEDPQAVGGLASALDNRKQSSEGIPVAQPSVMDDIEVWLRTDLKGDDLEEGVTSEEFDKFLEERAKAAEMVPDLPSPPMEAPAPASNPSGRKKPERSEDALFAL

SEQ ID NO: 86784 - protein, 39 aa, Homo sapiens
  Payload ID: 17359
  Gene Symbol: TOM1L2
  Gene Name: target of myb1 like 2 membrane trafficking protein
  ENSP ID: ENSP00000465677
DMFAQTRGNSLAEQRKTHHPAWPLIHRRSLEAGGCSHAG

SEQ ID NO: 86785 - protein, 83 aa, Homo sapiens
  Payload ID: 17359
  Gene Symbol: TOM1L2
  Gene Name: target of myb1 like 2 membrane trafficking protein
  ENSP ID: ENSP00000466863
MEICDIINETEEGPKDAIRALKKRLNGNRNYREVMLALTVLETCVKNCGHRFHILVANRDFIDSVLVKIISPKNNPPTIVQDK

SEQ ID NO: 86786 - protein, 209 aa, Homo sapiens
  Payload ID: 17360
  Gene Symbol: TOM1
  Gene Name: target of myb1 membrane trafficking protein
  ENSP ID: ENSP00000371465
MDFLLGNPFSSPVGQRIEKATDGSLQSEDWALNMEICDIINETEEGPKDALRAVKKRIVGNKNFHEVMLALTVLETCVKNCGHRFHVLVASQDFVESVLVRTILPKNNPPTIVHDKVLNLIQSWADAFRSSPDLTGVVTIYEDLRRKGLEFPMTDLDMLSPIHTPRGPCSTQRHNQDRILWALTPASKRTLASMLPLCPPRPYSPVTRP

SEQ ID NO: 86787 - protein, 133 aa, Homo sapiens
  Payload ID: 17360
  Gene Symbol: TOM1
  Gene Name: target of myb1 membrane trafficking protein
  ENSP ID: ENSP00000379085
MDFLLGNPFSSPVGQRIEKATDGSLQSEDWALNMEICDIINETEEGPKDALRAVKKRIVGNKNFHEVMLALTVLETCVKNCGHRFHVLVASQDFVESVLVRTILPKNNPPTIVHDKVLNLIQLARSDRCGHHL

SEQ ID NO: 86788 - protein, 69 aa, Homo sapiens
  Payload ID: 17360
  Gene Symbol: TOM1
  Gene Name: target of myb1 membrane trafficking protein
  ENSP ID: ENSP00000385906
MDFLLGNPFSSPVGQRIEKATDGSLQSEDWALNMEICDIINETEEGDSAAGGPGATGCESLLSNGLGRF

SEQ ID NO: 86789 - protein, 151 aa, Homo sapiens
  Payload ID: 17360
  Gene Symbol: TOM1
  Gene Name: target of myb1 membrane trafficking protein
  ENSP ID: ENSP00000389789
MEICDIINETEEGPKDALRAVKKRIVGNKNFHEVMLALTVLETCVKNCGHRFHVLVASQDFVESVLVRTILPKNNPPTIVHDKVLNLIQSWADAFRSSPDLTGVVTIYEDLRRKGLEFPMTDLDMLSPIHTPQRTVFNSETQSGQDSVGTD

SEQ ID NO: 86790 - protein, 97 aa, Homo sapiens
  Payload ID: 17360
  Gene Symbol: TOM1
  Gene Name: target of myb1 membrane trafficking protein
  ENSP ID: ENSP00000390429
MDFLLGNPFSSPVGQRIEKATDGSLQSEDWALNMEICDIINETEEGCSTAPLGPPGLRNLCQELRAPLPRAGGQPGLRGECAGEDHPAQEQPTHHRA

SEQ ID NO: 86791 - protein, 334 aa, Homo sapiens
  Payload ID: 17360
  Gene Symbol: TOM1
  Gene Name: target of myb1 membrane trafficking protein
  ENSP ID: ENSP00000393714
MDFLLGNPFSSPVGQRIEKATDGSLQSEDWALNMEICDIINETEEGPKDALRAVKKRIVGNKNFHEVLETCVKNCGHRFHVLVASQDFVESVLVRTILPKNNPPTIVHDKVLNLIQSWADAFRSSPDLTGVVTIYEDLRRKGLEFPMTDLDMLSPIHTPQRTVFNSETQSGQDSVGTDSSQQEDSGQHAAPLPAPPILSGDTPIAPTPEQIGKLRSELEMVSGNVRVMSEMLTELVPTQAEPADLELLQELNRTCRAMQQRVLELIPQIANEQLTEELLIVNDNLNNVFLRHERFERFRTGQTTKAPSEAEPAADLIDMGPDPAATGNLSSQLA

SEQ ID NO: 86792 - protein, 492 aa, Homo sapiens
  Payload ID: 17360
  Gene Symbol: TOM1
  Gene Name: target of myb1 membrane trafficking protein
  Uniprot ID: O60784
  ENSP ID: ENSP00000394466
MDFLLGNPFSSPVGQRIEKATDGSLQSEDWALNMEICDIINETEEGPKDALRAVKKRIVGNKNFHEVMLALTVLETCVKNCGHRFHVLVASQDFVESVLVRTILPKNNPPTIVHDKVLNLIQSWADAFRSSPDLTGVVTIYEDLRRKGLEFPMTDLDMLSPIHTPQRTVFNSETQSGQDSVGTDSSQQEDSGQHAAPLPAPPILSGDTPIAPTPEQIGKLRSELEMVSGNVRVMSEMLTELVPTQAEPADLELLQELNRTCRAMQQRVLELIPQIANEQLTEELLIVNDNLNNVFLRHERFERFRTGQTTKAPSEAEPAADLIDMGPDPAATGNLSSQLAGMNLGSSSVRAGLQSLEASGRLEDEFDMFALTRGSSLADQRKEVKYEAPQATDGLAGALDARQQSTGAIPVTQACLMEDIEQWLSTDVGNDAEEPKGVTSEEFDKFLEERAKAADRLPNLSSPSAEGPPGPPSGPAPRKKTQEKDDDMLFAL

SEQ ID NO: 86793 - protein, 447 aa, Homo sapiens
  Payload ID: 17360
  Gene Symbol: TOM1
  Gene Name: target of myb1 membrane trafficking protein
  Uniprot ID: O60784
  ENSP ID: ENSP00000394924
MDFLLGNPFSSPVGQRIEKATDGSLQSEDWALNMEICDIINETEEGPKDALRAVKKRIVGNKNFHEVMLALTVLETCVKNCGHRFHVLVASQDFVESVLVRTILPKNNPPTIVHDKVLNLIQTVFNSETQSGQDSVGTDSSQQEDSGQHAAPLPAPPILSGDTPIAPTPEQIGKLRSELEMVSGNVRVMSEMLTELVPTQAEPADLELLQELNRTCRAMQQRVLELIPQIANEQLTEELLIVNDNLNNVFLRHERFERFRTGQTTKAPSEAEPAADLIDMGPDPAATGNLSSQLAGMNLGSSSVRAGLQSLEASGRLEDEFDMFALTRGSSLADQRKEVKYEAPQATDGLAGALDARQQSTGAIPVTQACLMEDIEQWLSTDVGNDAEEPKGVTSEEFDKFLEERAKAADRLPNLSSPSAEGPPGPPSGPAPRKKTQEKDDDMLFAL

SEQ ID NO: 86794 - protein, 83 aa, Homo sapiens
  Payload ID: 17360
  Gene Symbol: TOM1
  Gene Name: target of myb1 membrane trafficking protein
  ENSP ID: ENSP00000394944
MDFLLGNPFSSPVGQRIEKATDGSLQSEDWALNMEICDIINETEEGPKDALRAVKKRIVGNKNFHEVMLALTVLDGTSRPSRS

SEQ ID NO: 86795 - protein, 25 aa, Homo sapiens
  Payload ID: 17360
  Gene Symbol: TOM1
  Gene Name: target of myb1 membrane trafficking protein
  ENSP ID: ENSP00000397492
MDFLLGNPFSSPVGQRIVPKMPSEQ

SEQ ID NO: 86796 - protein, 460 aa, Homo sapiens
  Payload ID: 17360
  Gene Symbol: TOM1
  Gene Name: target of myb1 membrane trafficking protein
  Uniprot ID: O60784
  ENSP ID: ENSP00000398876
MEICDIINETEEGPKDALRAVKKRIVGNKNFHEVMLALTVLETCVKNCGHRFHVLVASQDFVESVLVRTILPKNNPPTIVHDKVLNLIQSWADAFRSSPDLTGVVTIYEDLRRKGLEFPMTDLDMLSPIHTPQRTVFNSETQSGQDSVGTDSSQQEDSGQHAAPLPAPPILSGDTPIAPTPEQIGKLRSELEMVSGNVRVMSEMLTELVPTQAEPADLELLQELNRTCRAMQQRVLELIPQIANEQLTEELLIVNDNLNNVFLRHERFERFRTGQTTKAPSEAEPAADLIDMGPDPAATGNLSSQLAGMNLGSSSVRAGLQSLEASGRLEDEFDMFALTRGSSLADQRKEVKYEAPQATDGLAGALDARQQSTGAIPVTQACLMEDIEQWLSTDVGNDAEEPKGVTSEGKFDKFLEERAKAADRLPNLSSPSAEGPPGPPSGPAPRKKTQEKDDDMLFAL

SEQ ID NO: 86797 - protein, 493 aa, Homo sapiens
  Payload ID: 17360
  Gene Symbol: TOM1
  Gene Name: target of myb1 membrane trafficking protein
  Uniprot ID: O60784
  ENSP ID: ENSP00000413697
MDFLLGNPFSSPVGQRIEKATDGSLQSEDWALNMEICDIINETEEGPKDALRAVKKRIVGNKNFHEVMLALTVLETCVKNCGHRFHVLVASQDFVESVLVRTILPKNNPPTIVHDKVLNLIQSWADAFRSSPDLTGVVTIYEDLRRKGLEFPMTDLDMLSPIHTPQRTVFNSETQSGQDSVGTDSSQQEDSGQHAAPLPAPPILSGDTPIAPTPEQIGKLRSELEMVSGNVRVMSEMLTELVPTQAEPADLELLQELNRTCRAMQQRVLELIPQIANEQLTEELLIVNDNLNNVFLRHERFERFRTGQTTKAPSEAEPAADLIDMGPDPAATGNLSSQLAGMNLGSSSVRAGLQSLEASGRLEDEFDMFALTRGSSLADQRKEVKYEAPQATDGLAGALDARQQSTGAIPVTQACLMEDIEQWLSTDVGNDAEEPKGVTSEGKFDKFLEERAKAADRLPNLSSPSAEGPPGPPSGPAPRKKTQEKDDDMLFAL

SEQ ID NO: 86798 - protein, 134 aa, Homo sapiens
  Payload ID: 17360
  Gene Symbol: TOM1
  Gene Name: target of myb1 membrane trafficking protein
  ENSP ID: ENSP00000476698
MEICDIINETEEGPKDALRAVKKRIVGNKNFHEVMLALTVLETCVKNCGHRFHVLVASQDFVESVLVRTILPKNNPPTIVHDKVLNLIQSWADAFRSSPDLTGVVTIYEDLRRKGLEFPMTDLDMLSPIHTPQR

SEQ ID NO: 86799 - protein, 125 aa, Homo sapiens
  Payload ID: 17360
  Gene Symbol: TOM1
  Gene Name: target of myb1 membrane trafficking protein
  ENSP ID: ENSP00000477471
MEICDIINETEEGPKDALRAVKKRIVGNKNFHEVMLALTVLETCVKNCGHRFHVLVASQDFVESVLVRTILPKNNPPTIVHDKVLNLIQSWADAFRSSPDLTGVVTIYEDLRRKGLEFPMTDLDM

SEQ ID NO: 86800 - protein, 420 aa, Homo sapiens
  Payload ID: 17361
  Gene Symbol: TASP1
  Gene Name: taspase, threonine aspartase, 1
  Uniprot ID: Q9H6P5
  ENSP ID: ENSP00000338624
MTMEKGMSSGEGLPSRSSQVSAGKITAKELETKQSYKEKRGGFVLVHAGAGYHSESKAKEYKHVCKRACQKAIEKLQAGALATDAVTAALVELEDSPFTNAGMGSNLNLLGEIECDASIMDGKSLNFGAVGALSGIKNPVSVANRLLCEGQKGKLSAGRIPPCFLVGEGAYRWAVDHGIPSCPPNIMTTRFSLAAFKRNKRKLELAERVDTDFMQLKKRRQSSEKENDSGTLDTVGAVVVDHEGNVAAAVSSGGLALKHPGRVGQAALYGCGCWAENTGAHNPYSTAVSTSGCGEHLVRTILARECSHALQAEDAHQALLETMQNKFISSPFLASEDGVLGGVIVLRSCRCSAEPDSSQNKQTLLVEFLWSHTTESMCVGYMSAQDGKAKTHISRLPPGAVAGQSVAIEGGVCRLESPVN

SEQ ID NO: 86801 - protein, 110 aa, Homo sapiens
  Payload ID: 17361
  Gene Symbol: TASP1
  Gene Name: taspase, threonine aspartase, 1
  ENSP ID: ENSP00000387574
  MOD_RES (1)..(1): Any amino acid
XKITAKELETKQSYKEKRGGFVLVHAGAGYHSESKAKEYKHVCKRACQKAIEKLQAGALATDAVTAALVELELMWKGQFQVLCVLTNLFLDIIKNPTKTKFKTISNVKVY

SEQ ID NO: 86802 - protein, 305 aa, Homo sapiens
  Payload ID: 17361
  Gene Symbol: TASP1
  Gene Name: taspase, threonine aspartase, 1
  ENSP ID: ENSP00000400580
MTMEKGMSSGEGLPSRSSQVSAGKITAKELETKQSYKEKRGGFVLVHAGAGYHSESKAKEYKHVCKRACQKDSPFTNAGMGSNLNLLGEIECDASIMDGKSLNFGAVGALSGIKNPVSVANRLLCEGQKGKLSAGRIPPCFLVGEGAYRWAVDHGIPSCPPNIMTTRFSLAAFKRNKRKLELAERVDTDFMQLKKRRQSSEKENDSGTLDTVGAVVVDHEGNVAAAVSSGGLALKHPGRVGQAALYGCGCWAENTGAHNPYSTAVSTSGCGEHLVRTILARECSHALQAEDAHQALLETMQNKFI

SEQ ID NO: 86803 - protein, 587 aa, Homo sapiens
  Payload ID: 17362
  Gene Symbol: TAS1R1
  Gene Name: taste receptor, type 1, member 1
  Uniprot ID: Q7RTX1
  ENSP ID: ENSP00000312558
MLLCTARLVGLQLLISCCWAFACHSTESSPDFTLPGDYLLAGLFPLHSGCLQVRHRPEVTLCDRSCSFNEHGYHLFQAMRLGVEEINNSTALLPNITLGYQLYDVCSDSANVYATLRVLSLPGQHHIELQGDLLHYSPTVLAVIGPDSTNRAATTAALLSPFLVPMLLEQIHKVHFLLHKDTVAFNDNRDPLSSYNIIAWDWNGPKWTFTVLGSSTWSPVQLNINETKIQWHGKDNQVPKSVCSSDCLEGHQRVVTGFHHCCFECVPCGAGTFLNKSDLYRCQPCGKEEWAPEGSQTCFPRTVVFLALREHTSWVLLAANTLLLLLLLGTAGLFAWHLDTPVVRSAGGRLCFLMLGSLAAGSGSLYGFFGEPTRPACLLRQALFALGFTIFLSCLTVRSFQLIIIFKFSTKVPTFYHAWVQNHGAGLFVMISSAAQLLICLTWLVVWTPLPAREYQRFPHLVMLECTETNSLGFILAFLYNGLLSISAFACSYLGKDLPENYNEAKCVTFSLLFNFVSWIAFFTTASVYDGKYLPAANMMAGLSSLSSGFGGYFLPKCYVILCRPDLNSTEHFQASIQDYTRRCGST

SEQ ID NO: 86804 - protein, 304 aa, Homo sapiens
  Payload ID: 17362
  Gene Symbol: TAS1R1
  Gene Name: taste receptor, type 1, member 1
  ENSP ID: ENSP00000327705
MRLGVEEINNSTALLPNITLGYQLYDVCSDSANVYATLRVLSLPGQHHIELQGDLLHYSPTVLAVIGPDSTNRAATTAALLSPFLVPMISYAASSETLSVKRQYPSFLRTIPNDKYQVETMVLLLQKFGWTWISLVGSSDDYGQLGVQALENQATGQGICIAFKDIMPFSAQVGDERMQCLMRHLAQAGATVVVVFSSRQLARVFFESVVLTNLTGKVWVASEAWALSRHITGVPGIQRIGMVLGVAIQKRAVPGLKAFEEPMPGQTRRPLGLATRAPGAAAISSAENAKLSWHTRCPSSKPSP

SEQ ID NO: 86805 - protein, 841 aa, Homo sapiens
  Payload ID: 17362
  Gene Symbol: TAS1R1
  Gene Name: taste receptor, type 1, member 1
  Uniprot ID: Q7RTX1
  ENSP ID: ENSP00000331867
MLLCTARLVGLQLLISCCWAFACHSTESSPDFTLPGDYLLAGLFPLHSGCLQVRHRPEVTLCDRSCSFNEHGYHLFQAMRLGVEEINNSTALLPNITLGYQLYDVCSDSANVYATLRVLSLPGQHHIELQGDLLHYSPTVLAVIGPDSTNRAATTAALLSPFLVPMISYAASSETLSVKRQYPSFLRTIPNDKYQVETMVLLLQKFGWTWISLVGSSDDYGQLGVQALENQATGQGICIAFKDIMPFSAQVGDERMQCLMRHLAQAGATVVVVFSSRQLARVFFESVVLTNLTGKVWVASEAWALSRHITGVPGIQRIGMVLGVAIQKRAVPGLKAFEEAYARADKKAPRPCHKGSWCSSNQLCRECQAFMAHTMPKLKAFSMSSAYNAYRAVYAVAHGLHQLLGCASGACSRGRVYPWQLLEQIHKVHFLLHKDTVAFNDNRDPLSSYNIIAWDWNGPKWTFTVLGSSTWSPVQLNINETKIQWHGKDNQVPKSVCSSDCLEGHQRVVTGFHHCCFECVPCGAGTFLNKSDLYRCQPCGKEEWAPEGSQTCFPRTVVFLALREHTSWVLLAANTLLLLLLLGTAGLFAWHLDTPVVRSAGGRLCFLMLGSLAAGSGSLYGFFGEPTRPACLLRQALFALGFTIFLSCLTVRSFQLIIIFKFSTKVPTFYHAWVQNHGAGLFVMISSAAQLLICLTWLVVWTPLPAREYQRFPHLVMLECTETNSLGFILAFLYNGLLSISAFACSYLGKDLPENYNEAKCVTFSLLFNFVSWIAFFTTASVYDGKYLPAANMMAGLSSLSSGFGGYFLPKCYVILCRPDLNSTEHFQASIQDYTRRCGST

SEQ ID NO: 86806 - protein, 247 aa, Homo sapiens
  Payload ID: 17362
  Gene Symbol: TAS1R1
  Gene Name: taste receptor, type 1, member 1
  ENSP ID: ENSP00000408448
  MOD_RES (1)..(1): Any amino acid
XFQAMRLGVEEINNSTALLPNITLGYQLYDVCSDSANVYATLRVLSLPGQHHIELQGDLLHYSPTVLAVIGPDSTNRAATTAALLSPFLVPMLLEQIHKVHFLLHKDTVAFNDNRDPLSSYNIIAWDWNGPKWTFTVLGSSTWSPVQLNINETKIQWHGKDNQVPKSVCSSDCLEGHQRVVTGFHHCCFECVPCGAGTFLNKSATWVRTCQRTTTRPNVSPSACSSTSCPGSPSSPRPASTTASTCL

SEQ ID NO: 86807 - protein, 406 aa, Homo sapiens
  Payload ID: 17362
  Gene Symbol: TAS1R1
  Gene Name: taste receptor, type 1, member 1
  ENSP ID: ENSP00000414166
  MOD_RES (1)..(1): Any amino acid
XFQAMRLGVEEINNSTALLPNITLGYQLYDVCSDSANVYATLRVLSLPGQHHIELQGDLLHYSPTVLAVIGPDSTNRAATTAALLSPFLVPMISYAASSETLSVKRQYPSFLRTIPNDKYQVETMVLLLQKFGWTWISLVGSSDDYGQLGVQALENQATGQGICIAFKDIMPFSAQVGDERMQCLMRHLAQAGATVVVVFSSRQLARVFFESVVLTNLTGKVWVASEAWALSRHITGVPGIQRIGMVLGVAIQKRAVPGLKAFEEAYARADKKAPRPCHKGSWCSSNQLCRECQAFMAHTMPKLKAFSMSSAYNAYRAVYAVAHGLHQLLGCASGACSRGRVYPWQTSTDASLVGKKSGHLREARPASRALWCFWLCVSTPLGCCWQLTRCCCCCCLGLLACLPGT

SEQ ID NO: 86808 - protein, 839 aa, Homo sapiens
  Payload ID: 17363
  Gene Symbol: TAS1R2
  Gene Name: taste receptor, type 1, member 2
  Uniprot ID: Q8TE23
  ENSP ID: ENSP00000364520
MGPRAKTISSLFFLLWVLAEPAENSDFYLPGDYLLGGLFSLHANMKGIVHLNFLQVPMCKEYEVKVIGYNLMQAMRFAVEEINNDSSLLPGVLLGYEIVDVCYISNNVQPVLYFLAHEDNLLPIQEDYSNYISRVVAVIGPDNSESVMTVANFLSLFLLPQITYSAISDELRDKVRFPALLRTTPSADHHIEAMVQLMLHFRWNWIIVLVSSDTYGRDNGQLLGERVARRDICIAFQETLPTLQPNQNMTSEERQRLVTIVDKLQQSTARVVVVFSPDLTLYHFFNEVLRQNFTGAVWIASESWAIDPVLHNLTELRHLGTFLGITIQSVPIPGFSEFREWGPQAGPPPLSRTSQSYTCNQECDNCLNATLSFNTILRLSGERVVYSVYSAVYAVAHALHSLLGCDKSTCTKRVVYPWQLLEEIWKVNFTLLDHQIFFDPQGDVALHLEIVQWQWDRSQNPFQSVASYYPLQRQLKNIQDISWHTINNTIPMSMCSKRCQSGQKKKPVGIHVCCFECIDCLPGTFLNHTEDEYECQACPNNEWSYQSETSCFKRQLVFLEWHEAPTIAVALLAALGFLSTLAILVIFWRHFQTPIVRSAGGPMCFLMLTLLLVAYMVVPVYVGPPKVSTCLCRQALFPLCFTICISCIAVRSFQIVCAFKMASRFPRAYSYWVRYQGPYVSMAFITVLKMVIVVIGMLATGLSPTTRTDPDDPKITIVSCNPNYRNSLLFNTSLDLLLSVVGFSFAYMGKELPTNYNEAKFITLSMTFYFTSSVSLCTFMSAYSGVLVTIVDLLVTVLNLLAISLGYFGPKCYMILFYPERNTPAYFNSMIQGYTMRRD

SEQ ID NO: 86809 - protein, 852 aa, Homo sapiens
  Payload ID: 17364
  Gene Symbol: TAS1R3
  Gene Name: taste receptor, type 1, member 3
  Uniprot ID: Q7RTX0
  ENSP ID: ENSP00000344411
MLGPAVLGLSLWALLHPGTGAPLCLSQQLRMKGDYVLGGLFPLGEAEEAGLRSRTRPSSPVCTRFSSNGLLWALAMKMAVEEINNKSDLLPGLRLGYDLFDTCSEPVVAMKPSLMFLAKAGSRDIAAYCNYTQYQPRVLAVIGPHSSELAMVTGKFFSFFLMPQVSYGASMELLSARETFPSFFRTVPSDRVQLTAAAELLQEFGWNWVAALGSDDEYGRQGLSIFSALAAARGICIAHEGLVPLPRADDSRLGKVQDVLHQVNQSSVQVVLLFASVHAAHALFNYSISSRLSPKVWVASEAWLTSDLVMGLPGMAQMGTVLGFLQRGAQLHEFPQYVKTHLALATDPAFCSALGEREQGLEEDVVGQRCPQCDCITLQNVSAGLNHHQTFSVYAAVYSVAQALHNTLQCNASGCPAQDPVKPWQLLENMYNLTFHVGGLPLRFDSSGNVDMEYDLKLWVWQGSVPRLHDVGRFNGSLRTERLKIRWHTSDNQKPVSRCSRQCQEGQVRRVKGFHSCCYDCVDCEAGSYRQNPDDIACTFCGQDEWSPERSTRCFRRRSRFLAWGEPAVLLLLLLLSLALGLVLAALGLFVHHRDSPLVQASGGPLACFGLVCLGLVCLSVLLFPGQPSPARCLAQQPLSHLPLTGCLSTLFLQAAEIFVESELPLSWADRLSGCLRGPWAWLVVLLAMLVEVALCTWYLVAFPPEVVTDWHMLPTEALVHCRTRSWVSFGLAHATNATLAFLCFLGTFLVRSQPGCYNRARGLTFAMLAYFITWVSFVPLLANVQVVLRPAVQMGALLLCVLGILAAFHLPRCYLLMRQPGLNTPEFFLGGGPGDAQGQNDGNTGNQGKHE

SEQ ID NO: 86810 - protein, 299 aa, Homo sapiens
  Payload ID: 17365
  Gene Symbol: TAS2R1
  Gene Name: taste receptor, type 2, member 1
  Uniprot ID: Q9NYW7
  ENSP ID: ENSP00000371932
MLESHLIIYFLLAVIQFLLGIFTNGIIVVVNGIDLIKHRKMAPLDLLLSCLAVSRIFLQLFIFYVNVIVIFFIEFIMCSANCAILLFINELELWLATWLGVFYCAKVASVRHPLFIWLKMRISKLVPWMILGSLLYVSMICVFHSKYAGFMVPYFLRKFFSQNATIQKEDTLAIQIFSFVAEFSVPLLIFLFAVLLLIFSLGRHTRQMRNTVAGSRVPGRGAPISALLSILSFLILYFSHCMIKVFLSSLKFHIRRFIFLFFILVIGIYPSGHSLILILGNPKLKQNAKKFLLHSKCCQ

SEQ ID NO: 86811 - protein, 61 aa, Homo sapiens
  Payload ID: 17365
  Gene Symbol: TAS2R1
  Gene Name: taste receptor, type 2, member 1
  ENSP ID: ENSP00000475387
MAPLDLLLSCLAVSRIFLQLFIFYVNVIVIFFIEFIMCSANCAILLFINELELWLATWLGV

SEQ ID NO: 86812 - protein, 155 aa, Homo sapiens
  Payload ID: 17365
  Gene Symbol: TAS2R1
  Gene Name: taste receptor, type 2, member 1
  ENSP ID: ENSP00000476190
MAPLDLLLSCLAVSRIFLQLFIFYVNVIVIFFIEFIMCSANCAILLFINELELWLATWLGVFYCAKVASVRHPLFIWLKMRISKLVPWMILGSLLYVSMICVFHSKYAGFMVPYFLRKFFSQNATIQKEDTLAIQIFSFVAEFSVPLLIFLFAVL

SEQ ID NO: 86813 - protein, 307 aa, Homo sapiens
  Payload ID: 17366
  Gene Symbol: TAS2R10
  Gene Name: taste receptor, type 2, member 10
  Uniprot ID: Q9NYW0
  ENSP ID: ENSP00000240619
MLRVVEGIFIFVVVSESVFGVLGNGFIGLVNCIDCAKNKLSTIGFILTGLAISRIFLIWIIITDGFIQIFSPNIYASGNLIEYISYFWVIGNQSSMWFATSLSIFYFLKIANFSNYIFLWLKSRTNMVLPFMIVFLLISSLLNFAYIAKILNDYKTKNDTVWDLNMYKSEYFIKQILLNLGVIFFFTLSLITCIFLIISLWRHNRQMQSNVTGLRDSNTEAHVKAMKVLISFIILFILYFIGMAIEISCFTVRENKLLLMFGMTTTAIYPWGHSFILILGNSKLKQASLRVLQQLKCCEKRKNLRVT

SEQ ID NO: 86814 - protein, 307 aa, Homo sapiens; identical to SEQ ID NO: 86813
  Payload ID: 17366
  Gene Symbol: TAS2R10
  Gene Name: taste receptor, type 2, member 10
  Uniprot ID: Q9NYW0
  ENSP ID: ENSP00000461683

SEQ ID NO: 86815 - protein, 307 aa, Homo sapiens; identical to SEQ ID NO: 86813
  Payload ID: 17366
  Gene Symbol: TAS2R10
  Gene Name: taste receptor, type 2, member 10
  Uniprot ID: Q9NYW0
  ENSP ID: ENSP00000482990

SEQ ID NO: 86816 - protein, 303 aa, Homo sapiens
  Payload ID: 17367
  Gene Symbol: TAS2R13
  Gene Name: taste receptor, type 2, member 13
  Uniprot ID: Q9NYV9
  ENSP ID: ENSP00000375095
MESALPSIFTLVIIAEFIIGNLSNGFIVLINCIDWVSKRELSSVDKLLIILAISRIGLIWEILVSWFLALHYLAIFVSGTGLRIMIFSWIVSNHFNLWLATIFSIFYLLKIASFSSPAFLYLKWRVNKVILMILLGTLVFLFLNLIQINMHIKDWLDRYERNTTWNFSMSDFETFSVSVKFTMTMFSLTPFTVAFISFLLLIFSLQKHLQKMQLNYKGHRDPRTKVHTNALKIVISFLLFYASFFLCVLISWISELYQNTVIYMLCETIGVFSPSSHSFLLILGNAKLRQAFLLVAAKVWAKR

SEQ ID NO: 86817 - protein, 303 aa, Homo sapiens; identical to SEQ ID NO: 86816
  Payload ID: 17367
  Gene Symbol: TAS2R13
  Gene Name: taste receptor, type 2, member 13
  Uniprot ID: Q9NYV9
  ENSP ID: ENSP00000461365

SEQ ID NO: 86818 - protein, 303 aa, Homo sapiens; identical to SEQ ID NO: 86816
  Payload ID: 17367
  Gene Symbol: TAS2R13
  Gene Name: taste receptor, type 2, member 13
  Uniprot ID: Q9NYV9
  ENSP ID: ENSP00000478277

SEQ ID NO: 86819 - protein, 317 aa, Homo sapiens
  Payload ID: 17368
  Gene Symbol: TAS2R14
  Gene Name: taste receptor, type 2, member 14
  Uniprot ID: Q9NYV8
  ENSP ID: ENSP00000441949
MGGVIKSIFTFVLIVEFIIGNLGNSFIALVNCIDWVKGRKISSVDRILTALAISRISLVWLIFGSWCVSVFFPALFATEKMFRMLTNIWTVINHFSVWLATGLGTFYFLKIANFSNSIFLYLKWRVKKVVLVLLLVTSVFLFLNIALINIHINASINGYRRNKTCSSDSSNFTRFSSLIVLTSTVFIFIPFTLSLAMFLLLIFSMWKHRKKMQHTVKISGDASTKAHRGVKSVITFFLLYAIFSLSFFISVWTSERLEENLIILSQVMGMAYPSCHSCVLILGNKKLRQASLSVLLWLRYMFKDGEPSGHKEFRESS

SEQ ID NO: 86820 - protein, 317 aa, Homo sapiens; identical to SEQ ID NO: 86819
  Payload ID: 17368
  Gene Symbol: TAS2R14
  Gene Name: taste receptor, type 2, member 14
  Uniprot ID: Q9NYV8
  ENSP ID: ENSP00000458544

SEQ ID NO: 86821 - protein, 317 aa, Homo sapiens; identical to SEQ ID NO: 86819
  Payload ID: 17368
  Gene Symbol: TAS2R14
  Gene Name: taste receptor, type 2, member 14
  Uniprot ID: Q9NYV8
  ENSP ID: ENSP00000484251

SEQ ID NO: 86822 - protein, 291 aa, Homo sapiens
  Payload ID: 17369
  Gene Symbol: TAS2R16
  Gene Name: taste receptor, type 2, member 16
  Uniprot ID: Q9NYV7
  ENSP ID: ENSP00000249284
MIPIQLTVFFMIIYVLESLTIIVQSSLIVAVLGREWLQVRRLMPVDMILISLGISRFCLQWASMLNNFCSYFNLNYVLCNLTITWEFFNILTFWLNSLLTVFYCIKVSSFTHHIFLWLRWRILRLFPWILLGSLMITCVTIIPSAIGNYIQIQLLTMEHLPRNSTVTDKLENFHQYQFQAHTVALVIPFILFLASTIFLMASLTKQIQHHSTGHCNPSMKARFTALRSLAVLFIVFTSYFLTILITIIGTLFDKRCWLWVWEAFVYAFILMHSTSLMLSSPTLKRILKGKC

SEQ ID NO: 86823 - protein, 299 aa, Homo sapiens
  Payload ID: 17370
  Gene Symbol: TAS2R19
  Gene Name: taste receptor, type 2, member 19
  Uniprot ID: P59542
  ENSP ID: ENSP00000375091
MMCFLLIISSILVVFAFVLGNVANGFIALVNVIDWVNTRKISSAEQILTALVVSRIGLLWVMLFLWYATVFNSALYGLEVRIVASNAWAVTNHFSMWLAASLSIFCLLKIANFSNLISLHLKKRIKSVVLVILLGPLVFLICNLAVITMDERVWTKEYEGNVTWKIKLRNAIHLSSLTVTTLANLIPFTLSLICFLLLICSLCKHLKKMRLHSKGSQDPSTKVHIKALQTVTSFLMLFAIYFLCIITSTWNLRTQQSKLVLLLCQTVAIMYPSFHSFILIMGSRKLKQTFLSVLWQMTR

SEQ ID NO: 86824 - protein, 299 aa, Homo sapiens; identical to SEQ ID NO: 86823
  Payload ID: 17370
  Gene Symbol: TAS2R19
  Gene Name: taste receptor, type 2, member 19
  Uniprot ID: P59542
  ENSP ID: ENSP00000461533

SEQ ID NO: 86825 - protein, 319 aa, Homo sapiens
  Payload ID: 17370
  Gene Symbol: TAS2R19
  Gene Name: taste receptor, type 2, member 19
  ENSP ID: ENSP00000479470
MMCFLLIISSILVVFAFVLGNVANGFIALVNVIDWVNTRKISSAEQILTALVVSRIGLLWVMLFLWYATVFNSALYGLEVRIVASNAWAVTNHFSMWLAASLSIFCLLKIANFSNLISLHLKKRIKSVVLVILLGPLVFLICNLAVITMDERVWTKEYEGNVTWKIKLRNAMHLSNLTVAMLANLIPFTLTLISFLLLIYSLCKHLKKMQLHGKGSQDPSTKIHIKALQTVTSFLILLAIYFLCLIISFWNFKMRPKEIVLMLCQAFGIIYPSFHSFILIWGNKTLKQTFLSVLWQVTCWAKDRTSQLHRFTRGALCVF

SEQ ID NO: 86826 - protein, 299 aa, Homo sapiens
  Payload ID: 17370
  Gene Symbol: TAS2R19
  Gene Name: taste receptor, type 2, member 19
  ENSP ID: ENSP00000488110
MMCFLLIISSILVVFAFVLGNVANGFIALVNVIDWVNTRKISSAEQILTALVVSRIGLLWVMLFLWYATVFNSALYGLEVRIVASNAWAVTNHFSMWLAASLSIFCLLKIANFSNLISLHLKKRIKSVVLVILLGPLVFLICNLAVITMDERVWTKEYEGNVTWKIKLRNAIHLSSLTVTTLANLIPFTLSLICFLLLICSLCKHLKKMRLHSKGSQDPSTKVHIKALQTVTSFLMLFAIYFLCIITSTWNLRTQQSKLVLLLCQTVAIMYPSFHSFILIMGSRKLKQTFLSVLWQMTC

SEQ ID NO: 86827 - protein, 309 aa, Homo sapiens
  Payload ID: 17371
  Gene Symbol: TAS2R20
  Gene Name: taste receptor, type 2, member 20
  Uniprot ID: P59543
  ENSP ID: ENSP00000441624
MMSFLHIVFSILVVVAFILGNFANGFIALINFIAWVKRQKISSADQIIAALAVSRVGLLWVILLHWYSTVLNPTSSNLKVIIFISNAWAVTNHFSIWLATSLSIFYLLKIVNFSRLIFHHLKRKAKSVVLVIVLGSLFFLVCHLVMKHTYINVWTEECEGNVTWKIKLRNAMHLSNLTVAMLANLIPFTLTLISFLLLIYSLCKHLKKMQLHGKGSQDPSTKIHIKALQTVTSFLILLAIYFLCLIISFWNFKMRPKEIVLMLCQAFGIIYPSFHSFILIWGNKTLKQTFLSVLWQVTCWAKGQNQSTP

SEQ ID NO: 86828 - protein, 309 aa, Homo sapiens; identical to SEQ ID NO: 86827
  Payload ID: 17371
  Gene Symbol: TAS2R20
  Gene Name: taste receptor, type 2, member 20
  Uniprot ID: P59543
  ENSP ID: ENSP00000459353

SEQ ID NO: 86829 - protein, 309 aa, Homo sapiens
  Payload ID: 17371
  Gene Symbol: TAS2R20
  Gene Name: taste receptor, type 2, member 20
  ENSP ID: ENSP00000488383
MMSFLHIVFSILVVVAFILGNFANGFIALINFIAWVKRQKISSADQIIAALAVSRVGLLWVILLHWYSTVLNPTSSNLEVIIFISNAWAVTNHFSIWLATSLSIFYLLKIVNFSRLIFHHLKRKAKSVVLVIVLGSLFFLVCHLVMKHTYINVWTEECEGNVTWKIKLRNAMHLSNLTVAMLANLIPFTLTLISFLLLIYSLCKHLKKMQLHGKGSQDPSTKIHIKALQTVTSFLILLAIYFLCLIISFWNFKMRPKEIVLMLCQAFGIIYPSFHSFILIWGNKTLKQTFLSVLWQVTCWAKGQNQSTP

SEQ ID NO: 86830 - protein, 316 aa, Homo sapiens
  Payload ID: 17372
  Gene Symbol: TAS2R3
  Gene Name: taste receptor, type 2, member 3
  Uniprot ID: Q9NYW6
  ENSP ID: ENSP00000247879
MMGLTEGVFLILSGTQFTLGILVNCFIELVNGSSWFKTKRMSLSDFIITTLALLRIILLCIILTDSFLIEFSPNTHDSGIIMQIIDVSWTFTNHLSIWLATCLGVLYCLKIASFSHPTFLWLKWRVSRVMVWMLLGALLLSCGSTASLINEFKLYSVFRGIEATRNVTEHFRKKRSEYYLIHVLGTLWYLPPLIVSLASYSLLIFSLGRHTRQMLQNGTSSRDPTTEAHKRAIRIILSFFFLFLLYFLAFLIASFGNFLPKTKMAKMIGEVMTMFYPAGHSFILILGNSKLKQTFVVMLRCESGHLKPGSKGPIFS

SEQ ID NO: 86831 - protein, 319 aa, Homo sapiens
  Payload ID: 17373
  Gene Symbol: TAS2R30
  Gene Name: taste receptor, type 2, member 30
  Uniprot ID: P59541
  ENSP ID: ENSP00000444736
MITFLPIIFSILIVVIFVIGNFANGFIALVNSIEWVKRQKISFVDQILTALAVSRVGLLWVLLLHWYATQLNPAFYSVEVRITAYNVWAVTNHFSSWLATSLSMFYLLRIANFSNLIFLRIKRRVKSVVLVILLGPLLFLVCHLFVINMDETVWTKEYEGNVTWKIKLRSAMYHSNMTLTMLANFVPLTLTLISFLLLICSLCKHLKKMQLHGKGSQDPSTKVHIKALQTVTSFLLLCAIYFLSMIISVCNFGRLEKQPVFMFCQAIIFSYPSTHPFILILGNKKLKQIFLSVLRHVRYWVKDRSLRLHRFTRGALCVF

SEQ ID NO: 86832 - protein, 319 aa, Homo sapiens; identical to SEQ ID NO: 86831
  Payload ID: 17373
  Gene Symbol: TAS2R30
  Gene Name: taste receptor, type 2, member 30
  Uniprot ID: P59541
  ENSP ID: ENSP00000458170

SEQ ID NO: 86833 - protein, 308 aa, Homo sapiens
  Payload ID: 17373
  Gene Symbol: TAS2R30
  Gene Name: taste receptor, type 2, member 30
  ENSP ID: ENSP00000478012
MITFLPIIFSILIVVIFVIGNFANGFIALVNSIEWVKRQKISFVDQILTALAVSRVGLLWVLLLHWYATQLNPAFYSVEVRITAYNVWAVTNHFSSWLATSLSMFYLLRIANFSNLIFLRIKRRVKSVVLVILLGPLLFLVCHLFVINMDETVWTKEYEGNVTWKIKLRSAMYHSNMTLTMLANFVPLTLTLISFLLLICSLCKHLKKMQLHGKGSQDPSTKVHIKALQTVTSFLMLFAIYFLCIITSTWNPRTQQSNLVFLLYQTLAIMYPSFHSFILIMRSRKLKQTSLSVLCQVTCWVKQKPSTP

SEQ ID NO: 86834 - protein, 308 aa, Homo sapiens
  Payload ID: 17373
  Gene Symbol: TAS2R30
  Gene Name: taste receptor, type 2, member 30
  ENSP ID: ENSP00000482280
MITFLPIIFSILIVVIFVIGNFANGFIALVNSIEWVKRQKISFVDQILTALAVSRVGLLWVLLLHWYATQLNPAFYSVEVRITAYNVWAVTNHFSSWLATSLSMFYLLRIANFSNLIFLRIKRRVKSVVLVILLGPLLFLVCHLFVINMDETVWTKEYEGNVTWKIKLRSAMYHSNMTLTMLANFVPLTLTLISFLLLICSLCKHLKKMQLHGKGSQDPSTKVHIKALQTVTSFLLLFAIYFLCIITSTWNPRTQQSNLVFLLYQTLAIMYPSFHSFILIMRSRKLKQTSLSVLCQVTCWVKQKPSTP

SEQ ID NO: 86835 - protein, 319 aa, Homo sapiens
  Payload ID: 17373
  Gene Symbol: TAS2R30
  Gene Name: taste receptor, type 2, member 30
  ENSP ID: ENSP00000487978
MITFLPIIFSILIVVIFVIGNFANGFIALVNSIEWVKRQKISFVDQILTALAVSRVGLLWVLLLHWYATQLNPAFYSVEVRITAYNVWAVTNHFSSWLATSLSMFYLLRIANFSNLIFLRIKRRVKSVVLVILLGPLLFLVCHLFVINMDETVWTKEYEGNVTWKIKLRSAMYHSNMTLTMLANFVPLTLTLISFLLLICSLCKHLKKMQLHGKGSQDPSTKVHIKALQTVTSFLLLCAIYFLSMIISVCNLGRLEKQPVFMFCQAIIFSYPSTHPFILILGNKKLKQIFLSVLRHVRYWVKDRSLRLHRFTRGALCVF

SEQ ID NO: 86836 - protein, 309 aa, Homo sapiens
  Payload ID: 17374
  Gene Symbol: TAS2R31
  Gene Name: taste receptor, type 2, member 31
  Uniprot ID: P59538
  ENSP ID: ENSP00000375093
MTTFIPIIFSSVVVVLFVIGNFANGFIALVNSIERVKRQKISFADQILTALAVSRVGLLWVLLLNWYSTVFNPAFYSVEVRTTAYNVWAVTGHFSNWLATSLSIFYLLKIANFSNLIFLHLKRRVKSVILVMLLGPLLFLACQLFVINMKEIVRTKEYEGNLTWKIKLRSAVYLSDATVTTLGNLVPFTLTLLCFLLLICSLCKHLKKMQLHGKGSQDPSTKVHIKALQTVIFFLLLCAVYFLSIMISVWSFGSLENKPVFMFCKAIRFSYPSIHPFILIWGNKKLKQTFLSVLRQVRYWVKGEKPSSP

SEQ ID NO: 86837 - protein, 309 aa, Homo sapiens; identical to SEQ ID NO: 86836
  Payload ID: 17374
  Gene Symbol: TAS2R31
  Gene Name: taste receptor, type 2, member 31
  Uniprot ID: P59538
  ENSP ID: ENSP00000459810

SEQ ID NO: 86838 - protein, 300 aa, Homo sapiens
  Payload ID: 17374
  Gene Symbol: TAS2R31
  Gene Name: taste receptor, type 2, member 31
  ENSP ID: ENSP00000480480
MITFLPIIFSILIVVLFVIGNFANGFIALVNSIERVKRQKISFADQILTALAVSRVGLLWVLLLNWYSTVFNPAFYSVEVRTTAYNVWAVTGHFSNWLATSLSIFYLLKIANFSNLIFLHLKRRVKSVILVMLLGPLLFLACQLFVINMKEIVRTKEYEGNLTWKIKLRSAVYLSDATVTTLGNLVPFTLTLLCFLLLICSLCKHLKKMQLHGKGSQDPSTKVHIKALQTVIFFLLLCAVYFLSIMISVWSFGSLENKPVFMFCKAIRFSYPSIHPFILIWGNKKLKQTFLSVLRQVRYW

SEQ ID NO: 86839 - protein, 309 aa, Homo sapiens
  Payload ID: 17374
  Gene Symbol: TAS2R31
  Gene Name: taste receptor, type 2, member 31
  ENSP ID: ENSP00000487885
MTTFIPIIFSSVVVVLFVIGNFANGFIALVNSIEWVKRQKISFADQILTALAVSRVGLLWVLLLNWYSTVFNPAFYSVEVRTTAYNVWAVTGHFSNWLATSLSIFYLLKIANFSNLIFLHLKRRVKSVILVMLLGPLLFLACQLFVINMKEIVRTKEYEGNMTWKIKLRSAVYLSDATVTTLGNLVPFTLTLLCFLLLICSLCKHLKKMQLHGKGSQDPSTKVHIKVLQTVIFFLLLCAIYFLSIMISVWSFGSLENKPVFMFCKAIRFSYPSIHPFILIWGNKKLKQTFLSVLRQVRYWVKGEKPSSP

SEQ ID NO: 86840 - protein, 333 aa, Homo sapiens
  Payload ID: 17375
  Gene Symbol: TAS2R38
  Gene Name: taste receptor, type 2, member 38
  Uniprot ID: P59533
  ENSP ID: ENSP00000448219
MLTLTRIRTVSYEVRSTFLFISVLEFAVGFLTNAFVFLVNFWDVVKRQALSNSDCVLLCLSISRLFLHGLLFLSAIQLTHFQKLSEPLNHSYQAIIMLWMIANQANLWLAACLSLLYCSKLIRFSHTFLICLASWVSRKISQMLLGIILCSCICTVLCVWCFFSRPHFTVTTVLFMNNNTRLNWQIKDLNLFYSFLFCYLWSVPPFLLFLVSSGMLTVSLGRHMRTMKVYTRNSRDPSLEAHIKALKSLVSFFCFFVISSCAAFISVPLLILWRDKIGVMVCVGIMAACPSGHAAILISGNAKLRRAVMTILLWAQSSLKVRADHKADSRTLC

SEQ ID NO: 86841 - protein, 338 aa, Homo sapiens
  Payload ID: 17376
  Gene Symbol: TAS2R39
  Gene Name: taste receptor, type 2, member 39
  Uniprot ID: P59534
  ENSP ID: ENSP00000405095
MLGRCFPPDTKEKQQLRMTKLCDPAESELSPFLITLILAVLLAEYLIGIIANGFIMAIHAAEWVQNKAVSTSGRILVFLSVSRIALQSLMMLEITISSTSLSFYSEDAVYYAFKISFIFLNFCSLWFAAWLSFFYFVKIANFSYPLFLKLRWRITGLIPWLLWLSVFISFSHSMFCINICTVYCNNSFPIHSSNSTKKTYLSEINVVGLAFFFNLGIVTPLIMFILTATLLILSLKRHTLHMGSNATGSNDPSMEAHMGAIKAISYFLILYIFNAVALFIYLSNMFDINSLWNNLCQIIMAAYPASHSILLIQDNPGLRRAWKRLQLRLHLYPKEWTL

SEQ ID NO: 86842 - protein, 299 aa, Homo sapiens
  Payload ID: 17377
  Gene Symbol: TAS2R4
  Gene Name: taste receptor, type 2, member 4
  Uniprot ID: Q9NYW5
  ENSP ID: ENSP00000247881
MLRLFYFSAIIASVILNFVGIIMNLFITVVNCKTWVKSHRISSSDRILFSLGITRFLMLGLFLVNTIYFVSSNTERSVYLSAFFVLCFMFLDSSSVWFVTLLNILYCVKITNFQHSVFLLLKRNISPKIPRLLLACVLISAFTTCLYITLSQASPFPELVTTRNNTSFNISEGILSLVVSLVLSSSLQFIINVTSASLLIHSLRRHIQKMQKNATGFWNPQTEAHVGAMKLMVYFLILYIPYSVATLVQYLPFYAGMDMGTKSICLIFATLYSPGHSVLIIITHPKLKTTAKKILCFKK

SEQ ID NO: 86843 - protein, 323 aa, Homo sapiens
  Payload ID: 17378
  Gene Symbol: TAS2R40
  Gene Name: taste receptor, type 2, member 40
  Uniprot ID: P59535
  ENSP ID: ENSP00000386210
MATVNTDATDKDISKFKVTFTLVVSGIECITGILGSGFITAIYGAEWARGKTLPTGDRIMLMLSFSRLLLQIWMMLENIFSLLFRIVYNQNSVYILFKVITVFLNHSNLWFAAWLKVFYCLRIANFNHPLFFLMKRKIIVLMPWLLRLSVLVSLSFSFPLSRDVFNVYVNSSIPIPSSNSTEKKYFSETNMVNLVFFYNMGIFVPLIMFILAATLLILSLKRHTLHMGSNATGSRDPSMKAHIGAIKATSYFLILYIFNAIALFLSTSNIFDTYSSWNILCKIIMAAYPAGHSVQLILGNPGLRRAWKRFQHQVPLYLKGQTL

SEQ ID NO: 86844 - protein, 307 aa, Homo sapiens
  Payload ID: 17379
  Gene Symbol: TAS2R41
  Gene Name: taste receptor, type 2, member 41
  Uniprot ID: P59536
  ENSP ID: ENSP00000386201
MQAALTAFFVLLFSLLSLLGIAANGFIVLVLGREWLRYGRLLPLDMILISLGASRFCLQLVGTVHNFYYSAQKVEYSGGLGRQFFHLHWHFLNSATFWFCSWLSVLFCVKIANITHSTFLWLKWRFPGWVPWLLLGSVLISFIITLLFFWVNYPVYQEFLIRKFSGNMTYKWNTRIETYYFPSLKLVIWSIPFSVFLVSIMLLINSLRRHTQRMQHNGHSLQDPSTQAHTRALKSLISFLILYALSFLSLIIDAAKFISMQNDFYWPWQIAVYLCISVHPFILIFSNLKLRSVFSQLLLLARGFWVA

SEQ ID NO: 86845 - protein, 314 aa, Homo sapiens
  Payload ID: 17380
  Gene Symbol: TAS2R42
  Gene Name: taste receptor, type 2, member 42
  Uniprot ID: Q7RTR8
  ENSP ID: ENSP00000334050
MATELDKIFLILAIAEFIISMLGNVFIGLVNCSEGIKNQKVFSADFILTCLAISTIGQLLVILFDSFLVGLASHLYTTYRLGKTVIMLWHMTNHLTTWLATCLSIFYFFKIAHFPHSLFLWLRWRMNGMIVMLLILSLFLLIFDSLVLEIFIDISLNIIDKSNLTLYLDESKTLYDKLSILKTLLSLTSFIPFSLFLTSLLFLFLSLVRHTRNLKLSSLGSRDSSTEAHRRAMKMVMSFLFLFIVHFFSLQVANWIFFMLWNNKCIKFVMLALNAFPSCHSFILILGNSKLQQTAVRLLWHLRNYTKTPNPLPL

SEQ ID NO: 86846 - protein, 314 aa, Homo sapiens; identical to SEQ ID NO: 86845
  Payload ID: 17380
  Gene Symbol: TAS2R42
  Gene Name: taste receptor, type 2, member 42
  ENSP ID: ENSP00000484611

SEQ ID NO: 86847 - protein, 309 aa, Homo sapiens
  Payload ID: 17381
  Gene Symbol: TAS2R43
  Gene Name: taste receptor, type 2, member 43
  Uniprot ID: P59537
  ENSP ID: ENSP00000431719
MITFLPIIFSSLVVVTFVIGNFANGFIALVNSIEWFKRQKISFADQILTALAVSRVGLLWVLLLNWYSTVLNPAFNSVEVRTTAYNIWAVINHFSNWLATTLSIFYLLKIANFSNFIFLHLKRRVKSVILVMLLGPLLFLACHLFVINMNEIVRTKEFEGNMTWKIKLKSAMYFSNMTVTMVANLVPFTLTLLSFMLLICSLCKHLKKMQLHGKGSQDPSTKVHIKALQTVISFLLLCAIYFLSIMISVWSFGSLENKPVFMFCKAIRFSYPSIHPFILIWGNKKLKQTFLSVFWQMRYWVKGEKTSSP

SEQ ID NO: 86848 - protein, 309 aa, Homo sapiens
  Payload ID: 17381
  Gene Symbol: TAS2R43
  Gene Name: taste receptor, type 2, member 43
  Uniprot ID: P59537
  ENSP ID: ENSP00000458723
MITFLPIIFSSLVVVTFVIGNFANGFIALVNSIESFKRQKISFADQILTALAVSRVGLLWVLLLNWYSTVLNPAFNSVEVRTTAYNIWAVINHFSNWLATTLSIFYLLKIANFSNFIFLHLKRRVKSVILVMLLGPLLFLACHLFVINMNEIVRTKEFEGNMTWKIKLKSAMYFSNMTVTMVANLVPFTLTLLSFMLLICSLCKHLKKMQLRGKGSQDPSTKVHIKALQTVISFLLLCAIYFLSIMISVWSFGSLENKPVFMFCKAIRFSYPSIHPFILIWGNKKLKQTFLSVFWQMRYWVKGEKTSSP

SEQ ID NO: 86849 - protein, 309 aa, Homo sapiens
  Payload ID: 17381
  Gene Symbol: TAS2R43
  Gene Name: taste receptor, type 2, member 43
  ENSP ID: ENSP00000478843
MITFLPIIFSILIVVIFVIGNFANGFIALVNSIEWVKRQKISFVDQILTALAVSRVGLLWVLLLHWYATQLNPAFYSVEVRITAYNVWAVTNHFSSWLATSLSMFYLLRIANFSNLIFLRIKRRVKSVVLVILLGPLLFLVCHLFVINMNQIVWTKEFEGNMTWKIKLKSAMYFSNMTVTMVANLVPFTLTLLSFMLLICSLCKHLKKMQLRGKGSQDPSTKVHIKALQTVISFLLLCAIYFLSIMISVWSFGSLENKPVFMFCKAIRFSYPSIHPFILIWGNKKLKQTFLSVFWQMRYWVKGEKTSSP

SEQ ID NO: 86850 - protein, 309 aa, Homo sapiens
  Payload ID: 17381
  Gene Symbol: TAS2R43
  Gene Name: taste receptor, type 2, member 43
  ENSP ID: ENSP00000484910
MITFLPIIFSILIVVIFVIGNFANGFIALVNSIEWFKRQKISFADQILTALAVSRVGLLWVLLLNWYSTVLNPAFNSVEVRTTAYNIWAVINHFSNWLATTLSIFYLLKIANFSNFIFLHLKRRVKSVILVMLLGPLLFLACHLFVINMNEIVRTKEFEGNMTWKIKLKSAMYFSNMTVTMVANLVPFTLTLLSFMLLICSLCKHLKKMQLHGKGSQDPSTKVHIKALQTVISFLLLCAIYFLSIMISVWSFGSLENKPVFMFCKAIRFSYPSIHPFILIWGNKKLKQTFLSVFWQMRYWVKGEKTSSP

SEQ ID NO: 86851 - protein, 299 aa, Homo sapiens
  Payload ID: 17381
  Gene Symbol: TAS2R43
  Gene Name: taste receptor, type 2, member 43
  ENSP ID: ENSP00000488357
MITFLPIIFSILVVVTFVIGNFANGFIALVNSTEWVKRQKISFADQIVTALAVSRVGLLWVLLLNWYSTVLNPAFYSVELRTTAYNIWAVTGHFSNWPATSLSIFYLLKIANFSNLIFLRLKRRVKSVILVVLLGPLLFLACHLFVVNMNQIVWTKEYEGNMTWKIKLRRAMYLSDTTVTMLANLVPFTVTLISFLLLVCSLCKHLKKMQLHGKGSQDPSTKVHIKVLQTVISFFLLRAIYFVSVIISVWSFKNLENKPVFMFCQAIGFSCSSAHPFILIWGNKKLKQTYLSVLWQMRY

SEQ ID NO: 86852 - protein, 309 aa, Homo sapiens
  Payload ID: 17382
  Gene Symbol: TAS2R46
  Gene Name: taste receptor, type 2, member 46
  Uniprot ID: P59540
  ENSP ID: ENSP00000436450
MITFLPIIFSILIVVTFVIGNFANGFIALVNSIEWFKRQKISFADQILTALAVSRVGLLWVLVLNWYATELNPAFNSIEVRITAYNVWAVINHFSNWLATSLSIFYLLKIANFSNLIFLHLKRRVKSVVLVILLGPLLFLVCHLFVINMNQIIWTKEYEGNMTWKIKLRSAMYLSNTTVTILANLVPFTLTLISFLLLICSLCKHLKKMQLHGKGSQDPSMKVHIKALQTVTSFLLLCAIYFLSIIMSVWSFESLENKPVFMFCEAIAFSYPSTHPFILIWGNKKLKQTFLSVLWHVRYWVKGEKPSSS

SEQ ID NO: 86853 - protein, 309 aa, Homo sapiens; identical to SEQ ID NO: 86852
  Payload ID: 17382
  Gene Symbol: TAS2R46
  Gene Name: taste receptor, type 2, member 46
  Uniprot ID: P59540
  ENSP ID: ENSP00000460229

SEQ ID NO: 86854 - protein, 310 aa, Homo sapiens
  Payload ID: 17382
  Gene Symbol: TAS2R46
  Gene Name: taste receptor, type 2, member 46
  ENSP ID: ENSP00000481422
MITFLPIIFSSLVVVTFVIGNFANGFIALVNSIESFKRQKISFADQILTALAVSRVGLLWVLLLNWYSTVLNPASFNSIEVRITAYNVWAVINHFSNWLATSLSIFYLLKIANFSNLIFLHLKRRVKSVVLVILLGPLLFLVCHLFVINMNQIIWTKEYEGNMTWKIKLRSAMYLSNTTVTILANLVPFTLTLISFLLLICSLCKHLKKMQLHGKGSQDPSMKVHIKALQTVTSFLLLCAIYFLSIIMSVWSFESLENKPVFMFCEAIAFSYPSTHPFILIWGNKKLKQTFLSVLWHVRYWVKGEKPSSS

SEQ ID NO: 86855 - protein, 319 aa, Homo sapiens
  Payload ID: 17382
  Gene Symbol: TAS2R46
  Gene Name: taste receptor, type 2, member 46
  ENSP ID: ENSP00000481837
MITFLPIIFSILIVVTFVIGNFANGFIALVNSIEWFKRQKISFADQILTALAVSRVGLLWVLVLNWYATELNPAFNSIEVRITAYNVWAVINHFSNWLATSLSIFYLLKIANFSNLIFLHLKRRVKSVVLVILLGPLLFLVCHLFVINMNQIIWTKEYEGNMTWKIKLRSAMYLSNTTVTILANLVPFTLTLISFLLLICSLCKHLKKMQLHGKGSQDPSMKVHIKAMQTVTSFLLLCAIYFLSIIISVWSFGSLENKPVFMFCKAIRFSYPSIHPFILIWGNKKLKQTFLSVLRQVRYWVKERSLHLHRFMRGALCVF

SEQ ID NO: 86856 - protein, 308 aa, Homo sapiens
  Payload ID: 17382
  Gene Symbol: TAS2R46
  Gene Name: taste receptor, type 2, member 46
  ENSP ID: ENSP00000482822
MITFLPIIFSILVVVTFVIGNFANGFIALVNSTEWVKRQKISFADQIVTALAVSRVGLLWVLLLNWYSTVLNPAFYSVELRTTAYNIWAVTGHFSNWPATSLSIFYLLKIANFSNLIFLRLKRRVKSVILVVLLGPLLFLACHLFVINMNQIIWTKEYEGNMTWKIKLRSAMYLSNTTVTILANLVPFTLTLISFLLLICSLCKHLKKMQLHGKGSQDPSMKVHIKAMQTVTSFLLLCAIYFLSIIMSVSFESLENKPVFMFCEAIAFSYPSTHPFILIWGNKKLKQTFLSVLWHVRYWVKGEKPSSS

SEQ ID NO: 86857 - protein, 249 aa, Homo sapiens
  Payload ID: 17382
  Gene Symbol: TAS2R46
  Gene Name: taste receptor, type 2, member 46
  ENSP ID: ENSP00000488678
MITFLPIIFSILIVVTFVIGNFANGFIALVNSIEWFKRQKISFADQILTALAVSRVGLLWVLVLNWYATELNPAFNSIEVRITAYNVWAVINHFSNWLATSLSIFYLLKIANFSNLIFLHLKRRVKSVVLVILLGPLLFLVCHLFVINMNQIIWTKEYEGNMTWKIKLRSAMYLSNTTVTILANLVPFTLTLISFLLLICSLCKHLKKMQLHGKGSQDPSMKVHIKAMQTVTSFLLLCAIYFLSIIMSV

SEQ ID NO: 86858 - protein, 299 aa, Homo sapiens
  Payload ID: 17383
  Gene Symbol: TAS2R5
  Gene Name: taste receptor, type 2, member 5
  Uniprot ID: Q9NYW4
  ENSP ID: ENSP00000247883
MLSAGLGLLMLVAVVEFLIGLIGNGSLVVWSFREWIRKFNWSSYNLIILGLAGCRFLLQWLIILDLSLFPLFQSSRWLRYLSIFWVLVSQASLWFATFLSVFYCKKITTFDRPAYLWLKQRAYNLSLWCLLGYFIINLLLTVQIGLTFYHPPQGNSSIRYPFESWQYLYAFQLNSGSYLPLVVFLVSSGMLIVSLYTHHKKMKVHSAGRRDVRAKAHITALKSLGCFLLLHLVYIMASPFSITSKTYPPDLTSVFIWETLMAAYPSLHSLILIMGIPRVKQTCQKILWKTVCARRCWGP

SEQ ID NO: 86859 - protein, 299 aa, Homo sapiens
  Payload ID: 17384
  Gene Symbol: TAS2R50
  Gene Name: taste receptor, type 2, member 50
  Uniprot ID: P59544
  ENSP ID: ENSP00000424040
MITFLYIFFSILIMVLFVLGNFANGFIALVNFIDWVKRKKISSADQILTALAVSRIGLLWALLLNWYLTVLNPAFYSVELRITSYNAWVVTNHFSMWLAANLSIFYLLKIANFSNLLFLHLKRRVRSVILVILLGTLIFLVCHLLVANMDESMWAEEYEGNMTGKMKLRNTVHLSYLTVTTLWSFIPFTLSLISFLMLICSLCKHLKKMQLHGEGSQDLSTKVHIKALQTLISFLLLCAIFFLFLIVSVWSPRRLRNDPVVMVSKAVGNIYLAFDSFILIWRTKKLKHTFLLILCQIRC

SEQ ID NO: 86860 - protein, 299 aa, Homo sapiens; identical to SEQ ID NO: 86859
  Payload ID: 17384
  Gene Symbol: TAS2R50
  Gene Name: taste receptor, type 2, member 50
  Uniprot ID: P59544
  ENSP ID: ENSP00000458551

SEQ ID NO: 86861 - protein, 299 aa, Homo sapiens; identical to SEQ ID NO: 86859
  Payload ID: 17384
  Gene Symbol: TAS2R50
  Gene Name: taste receptor, type 2, member 50
  Uniprot ID: P59544
  ENSP ID: ENSP00000479785

SEQ ID NO: 86862 - protein, 318 aa, Homo sapiens
  Payload ID: 17385
  Gene Symbol: TAS2R60
  Gene Name: taste receptor, type 2, member 60
  Uniprot ID: P59551
  ENSP ID: ENSP00000327724
MNGDHMVLGSSVTDKKAIILVTILLLLRLVAIAGNGFITAALGVEWVLRRMLLPCDKLLVSLGASRFCLQSVVMGKTIYVFLHPMAFPYNPVLQFLAFQWDFLNAATLWSSTWLSVFYCVKIATFTHPVFFWLKHKLSGWLPWMLFSSVGLSSFTTILFFIGNHRMYQNYLRNHLQPWNVTGDSIRSYCEKFYLFPLKMITWTMPTAVFFICMILLITSLGRHRKKALLTTSGFREPSVQAHIKALLALLSFAMLFISYFLSLVFSAAGIFPPLDFKFWVWESVIYLCAAVHPIILLFSNCRLRAVLKSRRSSRCGTP

SEQ ID NO: 86863 - protein, 318 aa, Homo sapiens
  Payload ID: 17386
  Gene Symbol: TAS2R7
  Gene Name: taste receptor, type 2, member 7
  Uniprot ID: Q9NYW3
  ENSP ID: ENSP00000240687
MADKVQTTLLFLAVGEFSVGILGNAFIGLVNCMDWVKKRKIASIDLILTSLAISRICLLCVILLDCFILVLYPDVYATGKEMRIIDFFWTLTNHLSIWFATCLSIYYFFKIGNFFHPLFLWMKWRIDRVISWILLGCVVLSVFISLPATENLNADFRFCVKAKRKTNLTWSCRVNKTQHASTKLFLNLATLLPFCVCLMSFFLLILSLRRHIRRMQLSATGCRDPSTEAHVRALKAVISFLLLFIAYYLSFLIATSSYFMPETELAVIFGESIALIYPSSHSFILILGNNKLRHASLKVIWKVMSILKGRKFQQHKQI

SEQ ID NO: 86864 - protein, 318 aa, Homo sapiens; identical to SEQ ID NO: 86863
  Payload ID: 17386
  Gene Symbol: TAS2R7
  Gene Name: taste receptor, type 2, member 7
  Uniprot ID: Q9NYW3
  ENSP ID: ENSP00000458498

SEQ ID NO: 86865 - protein, 318 aa, Homo sapiens; identical to SEQ ID NO: 86863
  Payload ID: 17386
  Gene Symbol: TAS2R7
  Gene Name: taste receptor, type 2, member 7
  Uniprot ID: Q9NYW3
  ENSP ID: ENSP00000484743

SEQ ID NO: 86866 - protein, 309 aa, Homo sapiens
  Payload ID: 17387
  Gene Symbol: TAS2R8
  Gene Name: taste receptor, type 2, member 8
  Uniprot ID: Q9NYW2
  ENSP ID: ENSP00000240615
MFSPADNIFIILITGEFILGILGNGYIALVNWIDWIKKKKISTVDYILTNLVIARICLISVMVVNGIVIVLNPDVYTKNKQQIVIFTFWTFANYLNMWITTCLNVFYFLKIASSSHPLFLWLKWKIDMVVHWILLGCFAISLLVSLIAAIVLSCDYRFHAIAKHKRNITEMFHVSKIPYFEPLTLFNLFAIVPFIVSLISFFLLVRSLWRHTKQIKLYATGSRDPSTEVHVRAIKTMTSFIFFFFLYYISSILMTFSYLMTKYKLAVEFGEIAAILYPLGHSLILIVLNNKLRQTFVRMLTCRKIACMI

SEQ ID NO: 86867 - protein, 309 aa, Homo sapiens; identical to SEQ ID NO: 86866
  Payload ID: 17387
  Gene Symbol: TAS2R8
  Gene Name: taste receptor, type 2, member 8
  Uniprot ID: Q9NYW2
  ENSP ID: ENSP00000461158

SEQ ID NO: 86868 - protein, 309 aa, Homo sapiens; identical to SEQ ID NO: 86866
  Payload ID: 17387
  Gene Symbol: TAS2R8
  Gene Name: taste receptor, type 2, member 8
  Uniprot ID: Q9NYW2
  ENSP ID: ENSP00000484163

SEQ ID NO: 86869 - protein, 312 aa, Homo sapiens
  Payload ID: 17388
  Gene Symbol: TAS2R9
  Gene Name: taste receptor, type 2, member 9
  Uniprot ID: Q9NYW1
  ENSP ID: ENSP00000240691
MPSAIEAIYIILIAGELTIGIWGNGFIVLVNCIDWLKRRDISLIDIILISLAISRICLLCVISLDGFFMLLFPGTYGNSVLVSIVNVVWTFANNSSLWFTSCLSIFYLLKIANISHPFFFWLKLKINKVMLAILLGSFLISLIISVPKNDDMWYHLFKVSHEENITWKFKVSKIPGTFKQLTLNLGVMVPFILCLISFFLLLFSLVRHTKQIRLHATGFRDPSTEAHMRAIKAVIIFLLLLIVYYPVFLVMTSSALIPQGKLVLMIGDIVTVIFPSSHSFILIMGNSKLREAFLKMLRFVKCFLRRRKPFVP

SEQ ID NO: 86870 - protein, 312 aa, Homo sapiens; identical to SEQ ID NO: 86869
  Payload ID: 17388
  Gene Symbol: TAS2R9
  Gene Name: taste receptor, type 2, member 9
  Uniprot ID: Q9NYW1
  ENSP ID: ENSP00000460247

SEQ ID NO: 86871 - protein, 312 aa, Homo sapiens; identical to SEQ ID NO: 86869
  Payload ID: 17388
  Gene Symbol: TAS2R9
  Gene Name: taste receptor, type 2, member 9
  Uniprot ID: Q9NYW1
  ENSP ID: ENSP00000480069

SEQ ID NO: 86872 - protein, 339 aa, Homo sapiens
  Payload ID: 17389
  Gene Symbol: TBP
  Gene Name: TATA box binding protein
  Uniprot ID: P20226
  ENSP ID: ENSP00000230354
MDQNNSLPPYAQGLASPQGAMTPGIPIFSPMMPYGTGLTPQPIQNTNSLSILEEQQRQQQQQQQQQQQQQQQQQQQQQQQQQQQQQQQQQQQQQQAVAAAAVQQSTSQQATQGTSGQAPQLFHSQTLTTAPLPGTTPLYPSPMTPMTPITPATPASESSGIVPQLQNIVSTVNLGCKLDLKTIALRARNAEYNPKRFAAVIMRIREPRTTALIFSSGKMVCTGAKSEEQSRLAARKYARVVQKLGFPAKFLDFKIQNMVGSCDVKFPIRLEGLVLTHQQFSSYEPELFPGLIYRMIKPRIVLLIFVSGKVVLTGAKVRAEIYEAFENIYPILKGFRKTT

SEQ ID NO: 86873 - protein, 339 aa, Homo sapiens; identical to SEQ ID NO: 86872
  Payload ID: 17389
  Gene Symbol: TBP
  Gene Name: TATA box binding protein
  Uniprot ID: P20226
  ENSP ID: ENSP00000375942

SEQ ID NO: 86874 - protein, 208 aa, Homo sapiens
  Payload ID: 17389
  Gene Symbol: TBP
  Gene Name: TATA box binding protein
  ENSP ID: ENSP00000400008
MDQNNSLPPYAQGLASPQGAMTPGIPIFSPMMPYGTGLTPQPIQNTNSLSILEEQQRQQQQQQQQQQQQQQQQQQQQQQQQQQQQQQQQQQQQQQAVAAAAVQQSTSQQATQGTSGQAPQLFHSQTLTTAPLPGTTPLYPSPMTPMTPITPATPASESSGIVPQLQNIVSTVNLGCKLDLKTIALRARNAEYNPKRFAAVIMRIREPR

SEQ ID NO: 86875 - protein, 101 aa, Homo sapiens
  Payload ID: 17389
  Gene Symbol: TBP
  Gene Name: TATA box binding protein
  ENSP ID: ENSP00000404905
  MOD_RES (1)..(1): Any amino acid
XEEQSRLAARKYARVVQKLGFPAKFLDFKIQNMVGSCDVKFPISYEPELFPGLIYRMIKPRIVLLIFVSGKVVLTGAKVRAEIYEAFENIYPILKGFRKTT

SEQ ID NO: 86876 - protein, 150 aa, Homo sapiens
  Payload ID: 17389
  Gene Symbol: TBP
  Gene Name: TATA box binding protein
  ENSP ID: ENSP00000416482
MDQNNSLPPYAQGLASPQGAMTPGIPIFSPMMPYGTGLTPQPIQNTNSLSILEEQQRQQQQQQQQQQQQQQQQQQQQQQQQQQQQQQQQQQQQQQAVAAAAVQQSTSQQATQGTSGQAPQLFHSQTLTTAPLPGTTPLYPSPMTPMTPIT

SEQ ID NO: 86877 - protein, 319 aa, Homo sapiens
  Payload ID: 17389
  Gene Symbol: TBP
  Gene Name: TATA box binding protein
  Uniprot ID: P20226
  ENSP ID: ENSP00000442132
MTPGIPIFSPMMPYGTGLTPQPIQNTNSLSILEEQQRQQQQQQQQQQQQQQQQQQQQQQQQQQQQQQQQQQQQQQAVAAAAVQQSTSQQATQGTSGQAPQLFHSQTLTTAPLPGTTPLYPSPMTPMTPITPATPASESSGIVPQLQNIVSTVNLGCKLDLKTIALRARNAEYNPKRFAAVIMRIREPRTTALIFSSGKMVCTGAKSEEQSRLAARKYARVVQKLGFPAKFLDFKIQNMVGSCDVKFPIRLEGLVLTHQQFSSYEPELFPGLIYRMIKPRIVLLIFVSGKVVLTGAKVRAEIYEAFENIYPILKGFRKTT

SEQ ID NO: 86878 - protein, 288 aa, Homo sapiens
  Payload ID: 17389
  Gene Symbol: TBP
  Gene Name: TATA box binding protein
  ENSP ID: ENSP00000484118
MDQNNSLPPYAQGLASPQGAMTPGIPIFSPMMPYGTGLTPQPIQNTNSLSILEEQQRQATQGTSGQAPQLFHSQTLTTAPLPGTTPLYPSPMTPMTPITPATPASESSGIVPQLQNIVSTVNLGCKLDLKTIALRARNAEYNPKRFAAVIMRIREPRTTALIFSSGKMVCTGAKSEEQSRLAARKYARVVQKLGFPAKFLDFKIQNMVGSCDVKFPIRLEGLVLTHQQFSSYEPELFPGLIYRMIKPRIVLLIFVSGKVVLTGAKVRAEIYEAFENIYPILKGFRKTT

SEQ ID NO: 86879 - protein, 450 aa, Homo sapiens
  Payload ID: 17390
  Gene Symbol: TAF1A
  Gene Name: TATA box binding protein (TBP)-associated factor, RNA polymerase I, A, 48kDa
  Uniprot ID: Q15573
  ENSP ID: ENSP00000327072
MSDFSEELKGPVTDDEEVETSVLSGAGMHFPWLQTYVETVAIGGKRRKDFAQTTSACLSFIQEALLKHQWQQAAEYMYSYFQTLEDSDSYKRQAAPEIIWKLGSEILFYHPKSNMESFNTFANRMKNIGVMNYLKISLQHALYLLHHGMLKDAKRNLSEAETWRHGENTSSREILINLIQAYKGLLQYYTWSEKKMELSKLDKDDYAYNAVAQDVFNHSWKTSANISALIKIPGVWDPFVKSYVEMLEFYGDRDGAQEVLTNYAYDEKFPSNPNAHIYLYNFLKRQKAPRSKLISVLKILYQIVPSHKLMLEFHTLLRKSEKEEHRKLGLEVLFGVLDFAGCTKNITAWKYLAKYLKNILMGNHLAWVQEEWNSRKNWWPGFHFSYFWAKSDWKEDTALACEKAFVAGLLLGKGCRYFRYILKQDHQILGKKIKRMKRSVKKYSIVNPRL

SEQ ID NO: 86880 - protein, 450 aa, Homo sapiens; identical to SEQ ID NO: 86879
  Payload ID: 17390
  Gene Symbol: TAF1A
  Gene Name: TATA box binding protein (TBP)-associated factor, RNA polymerase I, A, 48kDa
  Uniprot ID: Q15573
  ENSP ID: ENSP00000339976

SEQ ID NO: 86881 - protein, 336 aa, Homo sapiens
  Payload ID: 17390
  Gene Symbol: TAF1A
  Gene Name: TATA box binding protein (TBP)-associated factor, RNA polymerase I, A, 48kDa
  Uniprot ID: Q15573
  ENSP ID: ENSP00000355856
MESFNTFANRMKNIGVMNYLKISLQHALYLLHHGMLKDAKRNLSEAETWRHGENTSSREILINLIQAYKGLLQYYTWSEKKMELSKLDKDDYAYNAVAQDVFNHSWKTSANISALIKIPGVWDPFVKSYVEMLEFYGDRDGAQEVLTNYAYDEKFPSNPNAHIYLYNFLKRQKAPRSKLISVLKILYQIVPSHKLMLEFHTLLRKSEKEEHRKLGLEVLFGVLDFAGCTKNITAWKYLAKYLKNILMGNHLAWVQEEWNSRKNWWPGFHFSYFWAKSDWKEDTALACEKAFVAGLLLGKGCRYFRYILKQDHQILGKKIKRMKRSVKKYSIVNPRL

SEQ ID NO: 86882 - protein, 286 aa, Homo sapiens
  Payload ID: 17390
  Gene Symbol: TAF1A
  Gene Name: TATA box binding protein (TBP)-associated factor, RNA polymerase I, A, 48kDa
  ENSP ID: ENSP00000375755
MSDFSEELKGPVTDDEEVETSVLSGAGMHFPWLQTYVETVAIGGKRRKDFAQTTSACLSFIQEALLKHQWQQAAEYMYSYFQTLEDSDSYKRQAAPEISLQHALYLLHHGMLKDAKRNLSEAETWRHGENTSSREILINLIQAYKGLLQYYTWSEKKMELSKLDKDDYAYNAVAQDVFNHSWKTSANISALIKIPGVWDPFVKSYVEMLEFYGDRDGAQEVLTNYAYDEKFPSNPNAHIYLYNFLKRQKAPRSKLISVLKILYQIVPSHKLMLEFHTLLRKSEKEE

SEQ ID NO: 86883 - protein, 588 aa, Homo sapiens
  Payload ID: 17391
  Gene Symbol: TAF1B
  Gene Name: TATA box binding protein (TBP)-associated factor, RNA polymerase I, B, 63kDa
  Uniprot ID: Q53T94
  ENSP ID: ENSP00000263663
MDLEEAEEFKERCTQCAAVSWGLTDEGKYYCTSCHNVTERYQEVTNTDLIPNTQIKALNRGLKKKNNTEKGWDWYVCEGFQYILYQQAEALKNLGVGPELKNDVLHNFWKRYLQKSKQAYCKNPVYTTGRKPTVLEDNLSHSDWASEPELLSDVSCPPFLESGAESQSDIHTRKPFPVSKASQSETSVCSGSLDGVEYSQRKEKGIVKMTMPQTLAFCYLSLLWQREAITLSDLLRFVEEDHIPYINAFQHFPEQMKLYGRDRGIFGIESWPDYEDIYKKTVEVGTFLDLPRFPDITEDCYLHPNILCMKYLMEVNLPDEMHSLTCHVVKMTGMGEVDFLTFDPIAKMAKTVKYDVQAVAIIVVVLKLLFLLDDSFEWSLSNLAEKHNEKNKKDKPWFDFRKWYQIMKKAFDEKKQKWEEARAKYLWKSEKPLYYSFVDKPVAYKKREMVVNLQKQFSTLVESTATAGKKSPSSFQFNWTEEDTDRTCFHGHSLQGVLKEKGQSLLTKNSLYWLSTQKFCRCYCTHVTTYEESNYSLSYQFILNLFSFLLRIKTSLLHEEVSLVEKKLFEKKYSVKRKKSRSKKVRRH

SEQ ID NO: 86884 - protein, 57 aa, Homo sapiens
  Payload ID: 17391
  Gene Symbol: TAF1B
  Gene Name: TATA box binding protein (TBP)-associated factor, RNA polymerase I, B, 63kDa
  ENSP ID: ENSP00000402955
MDLEEAEEFKERCTQCAAVSWGLTDEGKYYCTSCHNVTEYLTDYKVFGSIISFPPHH

SEQ ID NO: 86885 - protein, 194 aa, Homo sapiens
  Payload ID: 17391
  Gene Symbol: TAF1B
  Gene Name: TATA box binding protein (TBP)-associated factor, RNA polymerase I, B, 63kDa
  ENSP ID: ENSP00000414184
MDLEEAEEFKERCTQCAAVSWGLTDEGKYYCTSCHNVTERYQEVTNTDLIPNTQIKALNRGLKKKNNTEKGWDWYVCEGFQYILYQQAEALKNLGVGPELKNDVLHNFWKRYLQKSKQAYCKNPVYTTGRKPTVLEDNLSHSDWASEPELLSDVSCPPFLESGAESQSDIHTRKPFPVSKASQSGLLKRTIFLT

SEQ ID NO: 86886 - protein, 216 aa, Homo sapiens
  Payload ID: 17391
  Gene Symbol: TAF1B
  Gene Name: TATA box binding protein (TBP)-associated factor, RNA polymerase I, B, 63kDa
  ENSP ID: ENSP00000475608
  MOD_RES (1)..(1): Any amino acid
XTLSDLLRFVEEDHIPYINAFQHFPEQMKLYGRDRGIFGIESWPDYEDIYKKTVEVGTFLDLPRFPDITEDCYLHPNILCMKYLMEVNLPDEMHSLTCHVVKMTGMGEVDFLTFDPIAKMAKTVKYDVQAVAIIVVVLKLLFLLDDSFEWSLSNLAEKHNEKNKKDKPWFDFRKWYQIMKKAFDEKKQKWEEARAKYVLLPGLDAPALLLCLLLYI

SEQ ID NO: 86887 - protein, 57 aa, Homo sapiens; identical to SEQ ID NO: 86884
  Payload ID: 17391
  Gene Symbol: TAF1B
  Gene Name: TATA box binding protein (TBP)-associated factor, RNA polymerase I, B, 63kDa
  ENSP ID: ENSP00000486572

SEQ ID NO: 86888 - protein, 775 aa, Homo sapiens
  Payload ID: 17392
  Gene Symbol: TAF1C
  Gene Name: TATA box binding protein (TBP)-associated factor, RNA polymerase I, C, 110kDa
  Uniprot ID: Q15572
  ENSP ID: ENSP00000345305
MLPPLIDPWDPGLTARDLLFRGGCRYRKRPRVVLDVTEQISRFLLDHGDVAFAPLGKLMLENFKLEGAGSRTKKKTVVSVKKLLQDLGGHQPWGCPWAYLSNRQRRFSILGGPILGTSVASHLAELLHEELVLRWEQLLLDEACTGGALAWVPGRTPQFGQLVYPAGGAQDRLHFQEVVLTPGDNPQFLGKPGRIQLQGPVRQVVTCTVQGETLLAVRSDYHCAVWKFGKQWQPTLLQAMQVEKGATGISLSPHLPGELAICSRSGAVCLWSPEDGLRQIYRDPETLVFRDSSSWRWADFTAHPRVLTVGDRTGVKMLDTQGPPGCGLLLFRLGAEASCQKGERVLLTQYLGHSSPKCLPPTLHLVCTQFSLYLVDERLPLVPMLKWNHGLPSPLLLARLLPPPRPSCVQPLLLGGQGGQLQLLHLAEGASVPRLAGPPQSLPSRIDSLPAFPLLEPKIQWRLQERLKAPTIGLAAVVPPLPSAPTPGLVLFQLSAAGDVFYQQLRPQVDSSLRRDAGPPGDTQPDCHAPTASWTSQDTAGCSQWLKALLKVPLAPPVWTAPTFTHRQMLGSTELRREEEEGQRLGVLRKAMARGQLLLQRDLGSLPAAEPPPAPESGLEDKLSERLGEAWAGRGAAWWERQQGRTSEPGRQTRRPKRRTQLSSSFSLSGHVDPSEDTSSPHSPEWPPADALPLPPTTPPSQELTPDACAQGVPSEQRQMLRDYMAKLPPQRDTPGCATTPPHSQASSVRATRSQQHTPVLSSSQPLRKKPRMGF

SEQ ID NO: 86889 - protein, 537 aa, Homo sapiens
  Payload ID: 17392
  Gene Symbol: TAF1C
  Gene Name: TATA box binding protein (TBP)-associated factor, RNA polymerase I, C, 110kDa
  Uniprot ID: Q15572
  ENSP ID: ENSP00000437900
MQVEKGATGISLSPHLPGELAICSRSGAVCLWSPEDGLRQIYRDPETLVFRDSSSWRWADFTAHPRVLTVGDRTGVKMLDTQGPPGCGLLLFRLGAEASCQKGERVLLTQYLGHSSPKCLPPTLHLVCTQFSLYLVDERLPLVPMLKWNHGLPSPLLLARLLPPPRPSCVQPLLLGGQGGQLQLLHLAGEGASVPRLAGPPQSLPSRIDSLPAFPLLEPKIQWRLQERLKAPTIGLAAVVPPLPSAPTPGLVLFQLSAAGDVFYQQLRPQVDSSLRRDAGPPGDTQPDCHAPTASWTSQDTAGCSQWLKALLKVPLAPPVWTAPTFTHRQMLGSTELRREEEEGQRLGVLRKAMARGQLLLQRDLGSLPAAEPPPAPESGLEDKLSERLGEAWAGRGAAWWERQQGRTSEPGRQTRRPKRRTQLSSSFSLSGHVDPSEDTSSPHSPEWPPADALPLPPTTPPSQELTPDACAQGVPSEQRQMLRDYMAKLPPQRDTPGCATTPPHSQASSVRATRSQQHTPVLSSSQPLRKKPRMGF

SEQ ID NO: 86890 - protein, 52 aa, Homo sapiens
  Payload ID: 17392
  Gene Symbol: TAF1C
  Gene Name: TATA box binding protein (TBP)-associated factor, RNA polymerase I, C, 110kDa
  ENSP ID: ENSP00000454494
MDFPSSLRPALFLTGPLGLSDVPDLSFMCSWRDALTLPEAQPQNSEIPGTLA

SEQ ID NO: 86891 - protein, 146 aa, Homo sapiens
  Payload ID: 17392
  Gene Symbol: TAF1C
  Gene Name: TATA box binding protein (TBP)-associated factor, RNA polymerase I, C, 110kDa
  ENSP ID: ENSP00000454854
MDFPSSLRPALFLTGPLGLSDVPDLSFMCSWRDALTLPEAQPQNSENGALHVTKDLLWEPATPGPLPMLPPLIDPWDPGLTARDLLFRGGCRYRKRPRVVLDVTEQISRFLLDHGDVAFAPLGKLMLENFKLEGAGSRTKKKTVVS

SEQ ID NO: 86892 - protein, 537 aa, Homo sapiens; identical to SEQ ID NO: 86889
  Payload ID: 17392
  Gene Symbol: TAF1C
  Gene Name: TATA box binding protein (TBP)-associated factor, RNA polymerase I, C, 110kDa
  Uniprot ID: Q15572
  ENSP ID: ENSP00000455247

SEQ ID NO: 86893 - protein, 869 aa, Homo sapiens
  Payload ID: 17392
  Gene Symbol: TAF1C
  Gene Name: TATA box binding protein (TBP)-associated factor, RNA polymerase I, C, 110kDa
  Uniprot ID: Q15572
  ENSP ID: ENSP00000455265
MDFPSSLRPALFLTGPLGLSDVPDLSFMCSWRDALTLPEAQPQNSENGALHVTKDLLWEPATPGPLPMLPPLIDPWDPGLTARDLLFRGGCRYRKRPRVVLDVTEQISRFLLDHGDVAFAPLGKLMLENFKLEGAGSRTKKKTVVSVKKLLQDLGGHQPWGCPWAYLSNRQRRFSILGGPILGTSVASHLAELLHEELVLRWEQLLLDEACTGGALAWVPGRTPQFGQLVYPAGGAQDRLHFQEVVLTPGDNPQFLGKPGRIQLQGPVRQVVTCTVQGESKALIYTFLPHWLTCYLTPGPFHPSSALLAVRSDYHCAVWKFGKQWQPTLLQAMQVEKGATGISLSPHLPGELAICSRSGAVCLWSPEDGLRQIYRDPETLVFRDSSSWRWADFTAHPRVLTVGDRTGVKMLDTQGPPGCGLLLFRLGAEASCQKGERVLLTQYLGHSSPKCLPPTLHLVCTQFSLYLVDERLPLVPMLKWNHGLPSPLLLARLLPPPRPSCVQPLLLGGQGGQLQLLHLAGEGASVPRLAGPPQSLPSRIDSLPAFPLLEPKIQWRLQERLKAPTIGLAAVVPPLPSAPTPGLVLFQLSAAGDVFYQQLRPQVDSSLRRDAGPPGDTQPDCHAPTASWTSQDTAGCSQWLKALLKVPLAPPVWTAPTFTHRQMLGSTELRREEEEGQRLGVLRKAMARGQLLLQRDLGSLPAAEPPPAPESGLEDKLSERLGEAWAGRGAAWWERQQGRTSEPGRQTRRPKRRTQLSSSFSLSGHVDPSEDTSSPHSPEWPPADALPLPPTTPPSQELTPDACAQGVPSEQRQMLRDYMAKLPPQRDTPGCATTPPHSQASSVRATRSQQHTPVLSSSQPLRKKPRMGF

SEQ ID NO: 86894 - protein, 58 aa, Homo sapiens
  Payload ID: 17392
  Gene Symbol: TAF1C
  Gene Name: TATA box binding protein (TBP)-associated factor, RNA polymerase I, C, 110kDa
  ENSP ID: ENSP00000455787
MLENFKLEGAGVSLGLPQQPTAPLLYPRGPHPGHVGGEPLGRAAARGAGAAVGAAASG

SEQ ID NO: 86895 - protein, 843 aa, Homo sapiens
  Payload ID: 17392
  Gene Symbol: TAF1C
  Gene Name: TATA box binding protein (TBP)-associated factor, RNA polymerase I, C, 110kDa
  Uniprot ID: Q15572
  ENSP ID: ENSP00000455933
MDFPSSLRPALFLTGPLGLSDVPDLSFMCSWRDALTLPEAQPQNSENGALHVTKDLLWEPATPGPLPMLPPLIDPWDPGLTARDLLFRGGCRYRKRPRVVLDVTEQISRFLLDHGDVAFAPLGKLMLENFKLEGAGSRTKKKTVVSVKKLLQDLGGHQPWGCPWAYLSNRQRRFSILGGPILGTSVASHLAELLHEELVLRWEQLLLDEACTGGALAWVPGRTPQFGQLVYPAGGAQDRLHFQEVVLTPGDNPQFLGKPGRIQLQGPVRQVVTCTVQGETLLAVRSDYHCAVWKFGKQWQPTLLQAMQVEKGATGISLSPHLPGELAICSRSGAVCLWSPEDGLRQIYRDPETLVFRDSSSWRWADFTAHPRVLTVGDRTGVKMLDTQGPPGCGLLLFRLGAEASCQKGERVLLTQYLGHSSPKCLPPTLHLVCTQFSLYLVDERLPLVPMLKWNHGLPSPLLLARLLPPPRPSCVQPLLLGGQGGQLQLLHLAGEGASVPRLAGPPQSLPSRIDSLPAFPLLEPKIQWRLQERLKAPTIGLAAVVPPLPSAPTPGLVLFQLSAAGDVFYQQLRPQVDSSLRRDAGPPGDTQPDCHAPTASWTSQDTAGCSQWLKALLKVPLAPPVWTAPTFTHRQMLGSTELRREEEEGQRLGVLRKAMARGQLLLQRDLGSLPAAEPPPAPESGLEDKLSERLGEAWAGRGAAWWERQQGRTSEPGRQTRRPKRRTQLSSSFSLSGHVDPSEDTSSPHSPEWPPADALPLPPTTPPSQELTPDACAQGVPSEQRQMLRDYMAKLPPQRDTPGCATTPPHSQASSVRATRSQQHTPVLSSSQPLRKKPRMGF

SEQ ID NO: 86896 - protein, 93 aa, Homo sapiens
  Payload ID: 17392
  Gene Symbol: TAF1C
  Gene Name: TATA box binding protein (TBP)-associated factor, RNA polymerase I, C, 110kDa
  ENSP ID: ENSP00000456011
MLENFKLEGAGSRTKKKTVVSVKKLLQDLGGHQPWGCPWAYLSNRQRRFSILGGPILGTSVASHLAELLHEELVLRWEQLLLDEACTGGALAW

SEQ ID NO: 86897 - protein, 380 aa, Homo sapiens
  Payload ID: 17392
  Gene Symbol: TAF1C
  Gene Name: TATA box binding protein (TBP)-associated factor, RNA polymerase I, C, 110kDa
  ENSP ID: ENSP00000456101
  MOD_RES (1)..(1): Any amino acid
XSSSWRWADFTAHPRVLTVGDRTGVKMLDTQGPPGCGLLLFRLGAEASCQKGERVLLTQYLGHSSPKCLPPTLHLVCTQFSLYLVDERLPLVPMLKWNHGLPSPLLLARLLPPPRPSCVQPLLLGGQGGQLQLLHLAGLAAVVPPLPSAPTPGLVLFQLSAAGDVFYQQLRPQVDSSLRRDAGPPGDTQPDCHAPTASWTSQDTAGCSQWLKALLKVPLAPPVWTAPTFTHRQMLGSTELRREEEEGQRLGVLRKAMARGQLLLQRDLGSLPAAEPPPAPESGLEDKLSERLGEAWAGRGAAWWERQQGRTSEPGRQTRRPKRRTQLSSSFSLSGHVDPSEDTSSPHSPEWPPADALPLPPTTPPSQELTPDACAQGVPS

SEQ ID NO: 86898 - protein, 209 aa, Homo sapiens
  Payload ID: 17392
  Gene Symbol: TAF1C
  Gene Name: TATA box binding protein (TBP)-associated factor, RNA polymerase I, C, 110kDa
  ENSP ID: ENSP00000456133
MDFPSSLRPALFLTGPLGLSDVPDLSFMCSWRDALTLPEAQPQNSENGALHVTKDLLWEPATPGPLPMLPPLIDPWDPGLTARDLLFRGGCRYRKRPRVVLDVTEQISRFLLDHGDVAFAPLGKLMLENFKLEGAGSRTKKKTVVSVKKLLQDLGGHQPWGQVSLGLPQQPTAPLLYPRGPHPGHVGGEPLGRAAARGAGAAVGAAASG

SEQ ID NO: 86899 - protein, 70 aa, Homo sapiens
  Payload ID: 17392
  Gene Symbol: TAF1C
  Gene Name: TATA box binding protein (TBP)-associated factor, RNA polymerase I, C, 110kDa
  ENSP ID: ENSP00000457281
MLPPLIDPWDPGLTARDLLFRGGCRYRKRPRVVLDVTEQPVPLGSWRRSLCAPGEADAGEFQAGGSGEPH

SEQ ID NO: 86900 - protein, 136 aa, Homo sapiens
  Payload ID: 17392
  Gene Symbol: TAF1C
  Gene Name: TATA box binding protein (TBP)-associated factor, RNA polymerase I, C, 110kDa
  ENSP ID: ENSP00000457883
MDFPSSLRPALFLTGPLGLSDVPDLSFMCSWRDALTLPEAQPQNSENGALHVTKDLLWEPATPGPLPMLPPLIALSVTSFSDPWDPGLTARDLLFRGGCRYRKRPRVVLDVTEQISRFLLDHGDVAFAPLGKLMLE

SEQ ID NO: 86901 - protein, 278 aa, Homo sapiens
  Payload ID: 17393
  Gene Symbol: TAF1D
  Gene Name: TATA box binding protein (TBP)-associated factor, RNA polymerase I, D, 41kDa
  Uniprot ID: Q9H5J8
  ENSP ID: ENSP00000314971
MDKSGIDSLDHVTSDAVELANRSDNSSDSSLFKTQCIPYSPKGEKRNPIRKFVRTPESVHASDSSSDSSFEPIPLTIKAIFERFKNRKKRYKKKKKRRYQPTGRPRGRPEGRRNPIYSLIDKKKQFRSRGSGFPFLESENEKNAPWRKILTFEQAVARGFFNYIEKLKYEHHLKESLKQMNVGEDLENEDFDSRRYKFLDDDGSISPIEESTAEDEDATHLEDNECDIKLAGDSFIVSSEFPVRLSVYLEEEDITEEAALSKKRATKAKNTGQRGLKM

SEQ ID NO: 86902 - protein, 44 aa, Homo sapiens
  Payload ID: 17393
  Gene Symbol: TAF1D
  Gene Name: TATA box binding protein (TBP)-associated factor, RNA polymerase I, D, 41kDa
  ENSP ID: ENSP00000376944
EDATHLEDNECDIKLAGDSFIAFILRTWCLELKVLAYSTHLYHS

SEQ ID NO: 86903 - protein, 278 aa, Homo sapiens; identical to SEQ ID NO: 86901
  Payload ID: 17393
  Gene Symbol: TAF1D
  Gene Name: TATA box binding protein (TBP)-associated factor, RNA polymerase I, D, 41kDa
  Uniprot ID: Q9H5J8
  ENSP ID: ENSP00000410409

SEQ ID NO: 86904 - protein, 110 aa, Homo sapiens
  Payload ID: 17393
  Gene Symbol: TAF1D
  Gene Name: TATA box binding protein (TBP)-associated factor, RNA polymerase I, D, 41kDa
  ENSP ID: ENSP00000431570
  MOD_RES (1)..(1): Any amino acid
XFSSARLEEVGWLSGVGGLRSGGWCVQSSRTPGQSRVLGRGLGYKQQVRGWGHCEAVLVITLLIAAYLKLSVSLTHLKGRKETPFENLFVHLKVFTQVIHQVTHLLNQYH

SEQ ID NO: 86905 - protein, 8 aa, Homo sapiens
  Payload ID: 17393
  Gene Symbol: TAF1D
  Gene Name: TATA box binding protein (TBP)-associated factor, RNA polymerase I, D, 41kDa
  ENSP ID: ENSP00000432852
MDKSGIDS

SEQ ID NO: 86906 - protein, 215 aa, Homo sapiens
  Payload ID: 17393
  Gene Symbol: TAF1D
  Gene Name: TATA box binding protein (TBP)-associated factor, RNA polymerase I, D, 41kDa
  ENSP ID: ENSP00000433119
MDKSGIDSLDHVTSDAVELANRSDNSSDSSLFKTQCIPYSPKGEKRNPIRKFVRTPESVHASDSSSDSSFEPIPLTIKAIFERFKNRKKRYKKKKKRRYQPTGRPRGRPEGRRNPIYSLIDKKKQFRSRGSGFPFLESENEKNAPWRKILTFEQAVARGFFNYIEKLKYEHHLKESLKQMNVGEDLENEDFDSRRYKFLDDDGSISPIEESTLLS

SEQ ID NO: 86907 - protein, 278 aa, Homo sapiens; identical to SEQ ID NO: 86901
  Payload ID: 17393
  Gene Symbol: TAF1D
  Gene Name: TATA box binding protein (TBP)-associated factor, RNA polymerase I, D, 41kDa
  Uniprot ID: Q9H5J8
  ENSP ID: ENSP00000435087

SEQ ID NO: 86908 - protein, 36 aa, Homo sapiens
  Payload ID: 17393
  Gene Symbol: TAF1D
  Gene Name: TATA box binding protein (TBP)-associated factor, RNA polymerase I, D, 41kDa
  ENSP ID: ENSP00000435304
MDKSGIDSLDHVTSDAVELANRRGEKKPHSKICSYT

SEQ ID NO: 86909 - protein, 42 aa, Homo sapiens
  Payload ID: 17393
  Gene Symbol: TAF1D
  Gene Name: TATA box binding protein (TBP)-associated factor, RNA polymerase I, D, 41kDa
  ENSP ID: ENSP00000441633
VSSEFPVRLSVYLEEEDITEEAALSKKRATKAKNTGQRGLKM

SEQ ID NO: 86910 - protein, 26 aa, Homo sapiens
  Payload ID: 17393
  Gene Symbol: TAF1D
  Gene Name: TATA box binding protein (TBP)-associated factor, RNA polymerase I, D, 41kDa
  ENSP ID: ENSP00000446311
  MOD_RES (1)..(1): Any amino acid
XITEEAALSKKRATKAKNTGQRGLKM

SEQ ID NO: 86911 - protein, 375 aa, Homo sapiens
  Payload ID: 17394
  Gene Symbol: TBPL2
  Gene Name: TATA box binding protein like 2
  Uniprot ID: Q6SJ96
  ENSP ID: ENSP00000247219
MASAPWPERVPRLLAPRLPSYPPPPPTVGLRSMEQEETYLELYLDQCAAQDGLAPPRSPLFSPVVPYDMYILNASNPDTAFNSNPEVKETSGDFSSVDLSFLPDEVTQENKDQPVISKHETEENSESQSPQSRLPSPSEQDVGLGLNSSSLSNSHSQLHPGDTDSVQPSPEKPNSDSLSLASITPMTPMTPISECCGIVPQLQNIVSTVNLACKLDLKKIALHAKNAEYNPKRFAAVIMRIREPRTTALIFSSGKMVCTGAKSEEQSRLAARKYARVVQKLGFPARFLDFKIQNMVGSCDVRFPIRLEGLVLTHQQFSSYEPELFPGLIYRMVKPRIVLLIFVSGKVVLTGAKERSEIYEAFENIYPILKGFKKA

SEQ ID NO: 86912 - protein, 22 aa, Homo sapiens
  Payload ID: 17394
  Gene Symbol: TBPL2
  Gene Name: TATA box binding protein like 2
  ENSP ID: ENSP00000451597
MYILNASNPDTAFNSNPEVKET

SEQ ID NO: 86913 - protein, 1093 aa, Homo sapiens
  Payload ID: 17395
  Gene Symbol: TMF1
  Gene Name: TATA element modulatory factor 1
  Uniprot ID: P82094
  ENSP ID: ENSP00000381567
MSWFNASQLSSFAKQALSQAQKSIDRVLDIQEEEPSIWAETIPYGEPGISSPVSGGWDTSTWGLKSNTEPQSPPIASPKAITKPVRRTVVDESENFFSAFLSPTDVQTIQKSPVVSKPPAKSQRPEEEVKSSLHESLHIGQSRTPETTESQVKDSSLCVSGETLAAGTSSPKTEGKHEETVNKESDMKVPTVSLKVSESVIDVKTTMESISNTSTQSLTAETKDIALEPKEQKHEDRQSNTPSPPVSTFSSGTSTTSDIEVLDHESVISESSASSRQETTDSKSSLHLMQTSFQLLSASACPEYNRLDDFQKLTESCCSSDAFERIDSFSVQSLDSRSVSEINSDDELSGKGYALVPIIVNSSTPKSKTVESAEGKSEEVNETLVIPTEEAEMEESGRSATPVNCEQPDILVSSTPINEGQTVLDKVAEQCEPAESQPEALSEKEDVCKTVEFLNEKLEKREAQLLSLSKEKALLEEAFDNLKDEMFRVKEESSSISSLKDEFTQRIAEAEKKVQLACKERDAAKKEIKNIKEELATRLNSSETADLLKEKDEQIRGLMEEGEKLSKQQLHNSNIIKKLRAKDKENENMVAKLNKKVKELEEELQHLKQVLDGKEEVEKQHRENIKKLNSMVERQEKDLGRLQVDMDELEEKNRSIQAALDSAYKELTDLHKANAAKDSEAQEAALSREMKAKEELSAALEKAQEEARQQQETLAIQVGDLRLALQRTEQAAARKEDYLRHEIGELQQRLQEAENRNQELSQSVSSTTRPLLRQIENLQATLGSQTSSWEKLEKNLSDRLGESQTLLAAAVERERAATEELLANKIQMSSMESQNSLLRQENSRFQAQLESEKNRLCKLEDENNRYQVELENLKDEYVRTLEETRKEKTLLNSQLEMERMKVEQERKKAIFTQETIKEKERKPFSVSSTPTMSRSSSISGVDMAGLQTSFLSQDESHDHSFGPMPISANGSNLYDAVRMGAGSSIIENLQSQLKLREGEITHLQLEIGNLEKTRSIMAEELVKLTNQNDELEEKVKEIPKLRTQLRDLDQRYNTILQMYGEKAEEAEELRLDLEDVKNMYKTQIDELLRQSLS

SEQ ID NO: 86914 - protein, 775 aa, Homo sapiens
  Payload ID: 17395
  Gene Symbol: TMF1
  Gene Name: TATA element modulatory factor 1
  ENSP ID: ENSP00000419330
MSWFNASQLSSFAKQALSQAQKSIDRVLDIQEEEPSIWAETIPYGEPGISSPVSGGWDTSTWGLKSNTEPQSPPIASPKAITKPVRRTVVDESENFFSAFLSPTDVQTIQKSPVVSKPPAKSQRPEEEVKSSLHESLHIGQSRTPETTESQVKDSSLCVSGETLAAGTSSPKTEGKHEETVNKESDMKVPTVSLKVSESVIDVKTTMESISNTSTQSLTAETKDIALEPKEQKHEDRQSNTPSPPVSTFSSGTSTTSDIEVLDHESVISESSASSRQETTDSKSSLHLMQTSFQLLSASACPEYNRLDDFQKLTESCCSSDAFERIDSFSVQSLDSRSVSEINSDDELSGKGYALVPIIVNSSTPKSKTVESAEGKSEEVNETLVIPTEEAEMEESGRSATPVNCEQPDILVSSTPINEGQTVLDKVAEQCEPAESQPEALSEKEDVCKTVEFLNEKLEKREAQLLSLSKEKALLEEAFDNLKDEMFRVKEESSSISSLKDEFTQRIAEAEKKVQLACKERDAAKKEIKNIKEELATRLNSSETADLLKEKDEQIRGLMEEGEKLSKQQLHNSNIIKKLRAKDKENENMVAKLNKKVKELEEELQHLKQVLDGKEEVEKQHRENIKKLNSMVERQEKDLGRLQVDMDELEEKNRSIQAALDSAYKELTDLHKANAAKDSEAQEAALSREMKAKEELSAALEKAQEEARQQQETLAIQVGDLRLALQRTEQAAARKEDYLRHEIGELQQLRENVQLQKNSLLTKFRCLPWSHRILF

SEQ ID NO: 86915 - protein, 1092 aa, Homo sapiens
  Payload ID: 17395
  Gene Symbol: TMF1
  Gene Name: TATA element modulatory factor 1
  ENSP ID: ENSP00000438706
MSWFNASQLSSFAKQALSQAQKSIDRVLDIQEEEPSIWAETIPYGEPGISSPVSGGWDTSTWGLKSNTEPQSPPIASPKAITKPVRRTVVDESENFFSAFLSPTDVQTIQKSPVVSKPPAKSQRPEEEVKSSLHESLHIGQSRTPETTESQVKDSSLCVSGETLAAGTSSPKTEGKHEETVNKESDMKVPTVSLKVSESVIDVKTTMESISNTSTQSLTAETKDIALEPKEQKHEDRQSNTPSPPVSTFSSGTSTTSDIEVLDHESVISESSASSRQETTDSKSSLHLMQTSFQLLSASACPEYNRLDDFQKLTESCCSSDAFERIDSFSVQSLDSRSVSEINSDDELSGKGYALVPIIVNSSTPKSKTVESAEGKSEEVNETLVIPTEEAEMEESGRSATPVNCEQPDILVSSTPINEGQTVLDKVAEQCEPAESQPEALSEKEDVCKTVEFLNEKLEKREAQLLSLSKEKALLEEAFDNLKDEMFRVKEESSSISSLKDEFTQRIAEAEKKVQLACKERDAAKKEIKNIKEELATRLNSSETADLLKEKDEQIRGLMEEGEKLSKQQLHNSNIIKKLRAKDKENENMVAKLNKKVKELEEELQHLKQVLDGKEEVEKQHRENIKKLNSMVERQEKDLGRLQVDMDELEEKNRSIQAALDSAYKELTDLHKANAAKDSEAQEAALSREMKAKEELSAALEKAQEEARQQQETLAIQVGDLRLALQRTEQAAARKEDYLRHEIGELQQRLQEAENRNQELSQSVSSTTRPLLRQIENLQATLGSQTSSWEKLEKNLSDRLGESQTLLAAAVERERAATEELLANKIQMSSMESQNSLLRQENSRFQAQLESEKNRLCKLEDENNRYQVELENLKDEYVRTLEETRKEKTLLNSQLEMERMKVEQERKKAIFTQETIKEKERKPFSVSSTPTMSRSSSISGVDMAGLQTSFLSQDESHDHSFGPMPISANGSNLYDAVRMGRIKHIENLQSQLKLREGEITHLQLEIGNLEKTRSIMAEELVKLTNQNDELEEKVKEIPKLRTQLRDLDQRYNTILQMYGEKAEEAEELRLDLEDVKNMYKTQIDELLRQSLS

SEQ ID NO: 86916 - protein, 297 aa, Homo sapiens
  Payload ID: 17396
  Gene Symbol: TATDN1
  Gene Name: TatD DNase domain containing 1
  Uniprot ID: Q6P1N9
  ENSP ID: ENSP00000276692
MSRFKFIDIGINLTDPMFRGIYRGVQKHQDDLQDVIGRAVEIGVKKFMITGGNLQDSKDALHLAQTNGMFFSTVGCHPTRCGEFEKNNPDLYLKELLNLAENNKGKVVAIGECGLDFDRLQFCPKDTQLKYFEKQFELSEQTKLPMFLHCRNSHAEFLDIMKRNRDRCVGGVVHSFDGTKEAAAALIDLDLYIGFNGCSLKTEANLEVLKSIPSEKLMIETDAPWCGVKSTHAGSKYIRTAFPTKKKWESGHCLKDRNEPCHIIQILEIMSAVRDEDPLELANTLYNNTIKVFFPGI

SEQ ID NO: 86917 - protein, 93 aa, Homo sapiens
  Payload ID: 17396
  Gene Symbol: TATDN1
  Gene Name: TatD DNase domain containing 1
  ENSP ID: ENSP00000427807
MSRFKFIGMFFSTVGCHPTRCGEFEKNNPDLYLKELLNLAENNKGKVVAIGECGLDFDRLQFCPKDTQLKYFEKQFELSEQTKLPMFLHCRNS

SEQ ID NO: 86918 - protein, 110 aa, Homo sapiens
  Payload ID: 17396
  Gene Symbol: TATDN1
  Gene Name: TatD DNase domain containing 1
  ENSP ID: ENSP00000428109
MITGGNLQDSKDALHLAQTNGMFFSTVGCHPTRCGEFEKNNPDLYLKELLNLAENNKGKVVAIGECGLDFDRLQFCPKDTQLKYFEKQFELSEQTKLPMFLHCRNSHAEF

SEQ ID NO: 86919 - protein, 250 aa, Homo sapiens
  Payload ID: 17396
  Gene Symbol: TATDN1
  Gene Name: TatD DNase domain containing 1
  Uniprot ID: Q6P1N9
  ENSP ID: ENSP00000428336
MITGGNLQDSKDALHLAQTNGMFFSTVGCHPTRCGEFEKNNPDLYLKELLNLAENNKGKVVAIGECGLDFDRLQFCPKDTQLKYFEKQFELSEQTKLPMFLHCRNSHAEFLDIMKRNRDRCVGGVVHSFDGTKEAAAALIDLDLYIGFNGCSLKTEANLEVLKSIPSEKLMIETDAPWCGVKSTHAGSKYIRTAFPTKKKWESGHCLKDRNEPCHIIQILEIMSAVRDEDPLELANTLYNNTIKVFFPGI

SEQ ID NO: 86920 - protein, 40 aa, Homo sapiens
  Payload ID: 17396
  Gene Symbol: TATDN1
  Gene Name: TatD DNase domain containing 1
  ENSP ID: ENSP00000428580
MSRFKFIDIGINLTDPMFRGIYRGVQKHQVYDYRWKSTRQ

SEQ ID NO: 86921 - protein, 207 aa, Homo sapiens
  Payload ID: 17396
  Gene Symbol: TATDN1
  Gene Name: TatD DNase domain containing 1
  ENSP ID: ENSP00000428609
MSRFKFIDIGINLTDPMFRGIYRGVQKHQDDLQDVIGRAVEIGVKKFMITGGNLQDSKDALHLAQTNGMFFSTVGCHPTRCGEFEKNNPDLYLKELLNLAENNKGKVVAIGECGLDFDRLQFCPKDTQLKYFEKQFELSEQTKLPMFLHCRNSHAEFLDIMKRNRDRCVGGVVHSFDGTKEAAAALIDLDLYIGFNGCIMYTYTRHI

SEQ ID NO: 86922 - protein, 56 aa, Homo sapiens
  Payload ID: 17396
  Gene Symbol: TATDN1
  Gene Name: TatD DNase domain containing 1
  ENSP ID: ENSP00000429541
MSRFKFIDDLQDVIGRAVEIGVKKFMITGGNLQDSKDALHLAQTNGILIFLLPKKK

SEQ ID NO: 86923 - protein, 40 aa, Homo sapiens; identical to SEQ ID NO: 86920
  Payload ID: 17396
  Gene Symbol: TATDN1
  Gene Name: TatD DNase domain containing 1
  ENSP ID: ENSP00000429831

SEQ ID NO: 86924 - protein, 210 aa, Homo sapiens
  Payload ID: 17396
  Gene Symbol: TATDN1
  Gene Name: TatD DNase domain containing 1
  ENSP ID: ENSP00000430201
MFRGIYRGVQKHQGMFFSTVGCHPTRCGEFEKNNPDLYLKELLNLAENNKGKVVAIGECGLDFDRLQFCPKDTQLKYFEKQFELSEQTKLPMFLHCRNSHAEFLDIMKRNRDRCVGGVVHSFDGTKEAAAALIDLDLYIGFNGCSLKTEANLEVLKSIPSEKLMIETDAPWCGVKSTHAGSKYIRTAFPTKKKWESGHCLKDRNEPCHIM

SEQ ID NO: 86925 - protein, 322 aa, Homo sapiens
  Payload ID: 17396
  Gene Symbol: TATDN1
  Gene Name: TatD DNase domain containing 1
  ENSP ID: ENSP00000430274
MSRFKFIDIGINLTDPMFRGIYRGVQKHQDDLQDVIGRAVEIGVKKFMITGGNLQDSKDALHLAQTNGMFFSTVGCHPTRCGEFEKNNPDLYLKELLNLAENNKGKVVAIGECGLDFDRLQFCPKDTQLKYFEKQFELSEQTKLPMFLHCRNSHAEFLDIMKRNRDRCVGGVVHSFDGTKEAAAALIDLDLYIGFNALCIHIHVISDYGRTVYSVTVIHLCSQRNRGSKKLGNSSLKTEANLEVLKSIPSEKLMIETDAPWCGVKSTHAGSKYIRTAFPTKKKWESGHCLKDRNEPCHIIQILEIMSAVRDEDPLELANTLY

SEQ ID NO: 86926 - protein, 202 aa, Homo sapiens
  Payload ID: 17396
  Gene Symbol: TATDN1
  Gene Name: TatD DNase domain containing 1
  ENSP ID: ENSP00000430481
  MOD_RES (1)..(1): Any amino acid
XSSLSVRGAFSTPLGLSDLSRASVTKVTGPRNCALRHYIGINLTDPMFRGIYRGVQKHQDDLQDVIGRAVEIGVKKFMITGGNLQDSKDALHLAQTNGMFFSTVGCHPTRCGEFEKNNPDLYLKELLNLAENNKGKVVAIGECGLDFDRLQFCPKDTQLKYFEKQFELSEQTKLPMFLHCRNSHAEFLDIMKRNRDRCVGGV

SEQ ID NO: 86927 - protein, 62 aa, Homo sapiens
  Payload ID: 17396
  Gene Symbol: TATDN1
  Gene Name: TatD DNase domain containing 1
  ENSP ID: ENSP00000430756
MFRGIYRGVQKHQDDLQDVIGRAVEIGVKKFMITGGNLQDSKDALHLAQTNGILIFLLPKKK

SEQ ID NO: 86928 - protein, 75 aa, Homo sapiens
  Payload ID: 17396
  Gene Symbol: TATDN1
  Gene Name: TatD DNase domain containing 1
  ENSP ID: ENSP00000431052
MSRFKFIDDLQDVIGRAVEIGVKKFMITGGNLQDSKDALHLAQTNDILKNSLNCQNKQNYQCFFIVETHMLNFWT

SEQ ID NO: 86929 - protein, 210 aa, Homo sapiens
  Payload ID: 17396
  Gene Symbol: TATDN1
  Gene Name: TatD DNase domain containing 1
  ENSP ID: ENSP00000476180
MSRFKFIDIGINLTDPMFRGIYRGVQKHQDDLQDVIGRAVEIGVKKFMITGGNLQDSKDALHLAQTNGMFFSTVGCHPTRCGEFEKNNPDLYLKELLNLAENNKGKVVAIGECGLDFDRLQFCPKDTQLKYFEKQFELSEQTKLPMFLHCRNSHAEFLDIMKRNRDRCVGGVVHSFDGTKEAAAALIDLDLYIGFNGWYVLRLLWFLTFI

SEQ ID NO: 86930 - protein, 243 aa, Homo sapiens
  Payload ID: 17396
  Gene Symbol: TATDN1
  Gene Name: TatD DNase domain containing 1
  ENSP ID: ENSP00000487380
MFRGIYRGVQKHQGMFFSTVGCHPTRCGEFEKNNPDLYLKELLNLAENNKGKVVAIGECGLDFDRLQFCPKDTQLKYFEKQFELSEQTKLPMFLHCRNSHAEFLDIMKRNRDRCVGGVVHSFDGTKEAAAALIDLDLYIGFNGCSLKTEANLEVLKSIPSEKLMIETDAPWCGVKSTHAGSKYIRTAFPTKKKWESGHCLKDRNEPCHIIQILEIMSAVRDEDPLELANTLYNNTIKVFFPGI

SEQ ID NO: 86931 - protein, 761 aa, Homo sapiens
  Payload ID: 17397
  Gene Symbol: TATDN2
  Gene Name: TatD DNase domain containing 2
  Uniprot ID: Q93075
  ENSP ID: ENSP00000287652
MASERGKVKHNWSSTSEGCPRKRSCLREPCDVAPSSRPAQRSASRSGGPSSPKRLKAQKEDDVACSRRLSWGSSRRRNNSSSSFSPHFLGPGVGGAASKGCLIRNTRGFLSSGGSPLRPANASLEEMASLEEEACSLKVDSKDSSHNSTNSEFAAEAEGQNDTIEEPNKVQKRKRDRLRDQGSTMIYLKAIQGILGKSMPKRKGEAATRAKPSAAEHPSHGEGPARSEGPAKTAEGAARSVTVTAAQKEKDATPEVSMEEDKTVPERSSFYDRRVVIDPQEKPSEEPLGDRRTVIDKCSPPLEFLDDSDSHLEIQKHKDREVVMEHPSSGSDWSDVEEISTVRFSQEEPVSLKPSAVPEPSSFTTDYVMYPPHLYSSPWCDYASYWTSSPKPSSYPSTGSSSNDAAQVGKSSRSRMSDYSPNSTGSVQNTSRDMEASEEGWSQNSRSFRFSRSSEEREVKEKRTFQEEMPPRPCGGHASSSLPKSHLEPSLEEGFIDTHCHLDMLYSKLSFQGTFTKFRKIYSSSFPKEFQGCISDFCDPRTLTDCLWEELLKEDLVWGAFGCHPHFARYYSESQERNLLQALRHPKAVAFGEMGLDYSYKCTTPVPEQHKVFERQLQLAVSLKKPLVIHCREADEDLLEIMKKFVPPDYKIHRHCFTGSYPVIEPLLKYFPNMSVGFTAVLTYSSAWEAREALRQIPLERIIVETDAPYFLPRQVPKSLCQYAHPGLALHTVREIARVKDQPLSLTLAALRENTSRLYSL

SEQ ID NO: 86932 - protein, 182 aa, Homo sapiens
  Payload ID: 17397
  Gene Symbol: TATDN2
  Gene Name: TatD DNase domain containing 2
  ENSP ID: ENSP00000389896
LQALRHPKAVAFGEMGLDYSYKCTTPVPEQHKVFERQLQLAVSLKKPLVIHCREADEDLLEIMKKFVPPDYKIHRHCFTGSYPVIEPLLKYFPNMSVGFTAVLTYSSAWEAREALRQIPLERIIVETDAPYFLPRQVPKSLCQYAHPGLALHTVREIARVKDQPLSLTLAALRENTSRLYSL

SEQ ID NO: 86933 - protein, 761 aa, Homo sapiens; identical to SEQ ID NO: 86931
  Payload ID: 17397
  Gene Symbol: TATDN2
  Gene Name: TatD DNase domain containing 2
  Uniprot ID: Q93075
  ENSP ID: ENSP00000408736

SEQ ID NO: 86934 - protein, 273 aa, Homo sapiens
  Payload ID: 17398
  Gene Symbol: TATDN3
  Gene Name: TatD DNase domain containing 3
  Uniprot ID: Q17R31
  ENSP ID: ENSP00000355940
MRAAGVGLVDCHCHLSAPDFDRDLDDVLEKAKKANVVALVAVAEHSGEFEKIMQLSERYNGFVLPCLGVHPVQGLPPEDQRSVTLKDLDVALPIIENYKDRLLAIGEVGLDFSPRFAGTGEQKEEQRQVLIRQIQLAKRLNLPVNVHSRSAGRPTINLLQEQGAEKVLLHAFDGRPSVAMEGVRAGYFFSIPPSIIRSGQQKLVKQLPLTSICLETDSPALGPEKQVRNEPWNISISAEYIAQVKGISVEEVIEVTTQNALKLFPKLRHLLQK

SEQ ID NO: 86935 - protein, 274 aa, Homo sapiens
  Payload ID: 17398
  Gene Symbol: TATDN3
  Gene Name: TatD DNase domain containing 3
  Uniprot ID: Q17R31
  ENSP ID: ENSP00000355941
MRAAGVGLVDCHCHLSAPDFDRDLDDVLEKAKKANVVALVAVAEHSGEFEKIMQLSERYNGFVLPCLGVHPVQGLPPEDQRSVTLKDLDVALPIIENYKDRLLAIGEVGLDFSPRFAGTGEQKEEQRQVLIRQIQLAKRLNLPVNVHSRSAGRPTINLLQEQGAEKVLLHAFDGRPSVAMEGVRAGYFFSIPPSIIRSGQKQKLVKQLPLTSICLETDSPALGPEKQVRNEPWNISISAEYIAQVKGISVEEVIEVTTQNALKLFPKLRHLLQK

SEQ ID NO: 86936 - protein, 281 aa, Homo sapiens
  Payload ID: 17398
  Gene Symbol: TATDN3
  Gene Name: TatD DNase domain containing 3
  Uniprot ID: Q17R31
  ENSP ID: ENSP00000431376
MRAAGVGLVDCHCHLSAPDFDRDLDDVLEKAKKANVVALVAVAEHSGEFEKIMQLSERYNGFVLPCLGVHPVQGLPPEDQRSVTLKDLDVALPIIENYKDRLLAIGEVGLDFSPRFAGTGEQKEEQRQVLIRQIQLAKRLNLPVNVHSRSAGRPTINLLQEQGAEKVLLHAFDGRPSVAMEGVRAGYFFSIPPSIIRSGQLLSLFSKKQKLVKQLPLTSICLETDSPALGPEKQVRNEPWNISISAEYIAQVKGISVEEVIEVTTQNALKLFPKLRHLLQK

SEQ ID NO: 86937 - protein, 144 aa, Homo sapiens
  Payload ID: 17398
  Gene Symbol: TATDN3
  Gene Name: TatD DNase domain containing 3
  ENSP ID: ENSP00000431379
  MOD_RES (1)..(1): Any amino acid
XRAAGVGLVDCHCHLSAPDFDRDLDDVLEKAKKANVVALVAVAEHSGEFEKIMQLSERYNGFVLPCLGVHPVQGLPPEDQRSVTLKDLDVALPIIENYKDRLLAIGEVGLDFSPRFAGTGEQKEEQRQVLIRQIQLAKRLNLPV

SEQ ID NO: 86938 - protein, 41 aa, Homo sapiens
  Payload ID: 17398
  Gene Symbol: TATDN3
  Gene Name: TatD DNase domain containing 3
  ENSP ID: ENSP00000432006
  MOD_RES (1)..(1): Any amino acid
XRPTINLLQEQEAETCETIAFNFYMLRNRFTCTRTRKTGTE

SEQ ID NO: 86939 - protein, 61 aa, Homo sapiens
  Payload ID: 17398
  Gene Symbol: TATDN3
  Gene Name: TatD DNase domain containing 3
  ENSP ID: ENSP00000432730
MRAAGVGLVDCHCHLSAPDFDRDLDDVLEKAKKANVVALVAVAEHSGEFEKIMQLSERIWM

SEQ ID NO: 86940 - protein, 60 aa, Homo sapiens
  Payload ID: 17398
  Gene Symbol: TATDN3
  Gene Name: TatD DNase domain containing 3
  ENSP ID: ENSP00000433143
  MOD_RES (1)..(1): Any amino acid
XAAGVGLVDCHCHLSAPDFDRDLDDVLEKAKKANVVALVAVAEHSGEFEKIMQLSERIWM

SEQ ID NO: 86941 - protein, 240 aa, Homo sapiens
  Payload ID: 17398
  Gene Symbol: TATDN3
  Gene Name: TatD DNase domain containing 3
  Uniprot ID: Q17R31
  ENSP ID: ENSP00000433755
MRAAGVGLVDCHCHLSAPDFDRDLDDVLEKAKKANVVALVAVAEHSGEFEKIMQLSERYNGFVLPCLGVHPVQGLPPEDQRSVTLKDLDVALPIIENYKDRLLAIGEVGLDFSPRFAGTGEQKEEQRQVLIRQIQLAKRLNLPVNVHSRSAGRPTINLLQEQGAEKVLLHAFDGRPSVAMEGVRAGYFFSIPPSIIRSGQLLSLFSKKQKLVKQLPLTSICLETDSPALGPEKQQNILPR

SEQ ID NO: 86942 - protein, 161 aa, Homo sapiens
  Payload ID: 17398
  Gene Symbol: TATDN3
  Gene Name: TatD DNase domain containing 3
  ENSP ID: ENSP00000434276
MREWYCRSEGWKAFQEGRSKQDLDDVLEKAKKANVVALVAVAEHSGEFEKIMQLSERYNGFVLPCLGVHPVQGLPPEDQRSVTLKDLDVALPIIENYKDRLLAIGEVGLDFSPRFAGTGEQKEEQRQVLIRQIQLAKRLNLPVNVHSRSAGRPTINLLQEQ

SEQ ID NO: 86943 - protein, 101 aa, Homo sapiens
  Payload ID: 17398
  Gene Symbol: TATDN3
  Gene Name: TatD DNase domain containing 3
  ENSP ID: ENSP00000434428
MRAAGVGLVDCHCHLSAPDFDRDLDDVLEKAKKANVVALVAVAEHSGEFEKIMQLSERYNGFVLPCLGVHPVQGLPPEDQRSVTLKVLRRYCCMHLMVGHL

SEQ ID NO: 86944 - protein, 253 aa, Homo sapiens
  Payload ID: 17398
  Gene Symbol: TATDN3
  Gene Name: TatD DNase domain containing 3
  Uniprot ID: Q17R31
  ENSP ID: ENSP00000434801
MRAAGVGLVDCHCHLSAPDFDRDLDDVLEKAKKANVVALVAVAEHSGEFEKIMQLSERYNGFVLPCLGVHPVQGLPPEDQRSVTLKVGLDFSPRFAGTGEQKEEQRQVLIRQIQLAKRLNLPVNVHSRSAGRPTINLLQEQGAEKVLLHAFDGRPSVAMEGVRAGYFFSIPPSIIRSGQKQKLVKQLPLTSICLETDSPALGPEKQVRNEPWNISISAEYIAQVKGISVEEVIEVTTQNALKLFPKLRHLLQK

SEQ ID NO: 86945 - protein, 191 aa, Homo sapiens
  Payload ID: 17398
  Gene Symbol: TATDN3
  Gene Name: TatD DNase domain containing 3
  ENSP ID: ENSP00000436364
MRAAGVGLVDCHCHLSAPDFDRDLDDVLEKAKKANVVALVAVAEHSGEFEKIMQLSERYNGFVLPCLGVHPVQGLPPEDQRSVTLKDLDVALPIIENYKDRLLAIGEVGLDFSPRFAGTGEQKEEQRQVLIRQIQLAKRLNLPVNVHSRSAGRPTINLLQEQAETCETIAFNFYMLRNRFTCTRTRKTGTE

SEQ ID NO: 86946 - protein, 31 aa, Homo sapiens
  Payload ID: 17398
  Gene Symbol: TATDN3
  Gene Name: TatD DNase domain containing 3
  ENSP ID: ENSP00000475492
  MOD_RES (1)..(1): Any amino acid
XCLGVHPVQGLPPEDQRSVTLKVTVIQNRNH

SEQ ID NO: 86947 - protein, 1321 aa, Homo sapiens
  Payload ID: 17399
  Gene Symbol: TTBK1
  Gene Name: tau tubulin kinase 1
  Uniprot ID: Q5TCY1
  ENSP ID: ENSP00000259750
MQCLAAALKDETNMSGGGEQADILPANYVVKDRWKVLKKIGGGGFGEIYEAMDLLTRENVALKVESAQQPKQVLKMEVAVLKKLQGKDHVCRFIGCGRNEKFNYVVMQLQGRNLADLRRSQPRGTFTLSTTLRLGKQILESIEAIHSVGFLHRDIKPSNFAMGRLPSTYRKCYMLDFGLARQYTNTTGDVRPPRNVAGFRGTVRYASVNAHKNREMGRHDDLWSLFYMLVEFAVGQLPWRKIKDKEQVGMIKEKYEHRMLLKHMPSEFHLFLDHIASLDYFTKPDYQLIMSVFENSMKERGIAENEAFDWEKAGTDALLSTSTSTPPQQNTRQTAAMFGVVNVTPVPGDLLRENTEDVLQGEHLSDQENAPPILPGRPSEGLGPSPHLVPHPGGPEAEVWEETDVNRNKLRINIGKSPCVEEEQSRGMGVPSSPVRAPPDSPTTPVRSLRYRRVNSPESERLSTADGRVELPERRSRMDLPGSPSRQACSSQPAQMLSVDTGHADRQASGRMDVSASVEQEALSNAFRSVPLAEEEDFDSKEWVIIDKETELKDFPPGAEPSTSGTTDEEPEELRPLPEEGEERRRLGAEPTVRPRGRSMQALAEEDLQHLPPQPLPPQLSQGDGRSETSQPPTPGSPSHSPLHSGPRPRRRESDPTGPQRQVFSVAPPFEVNGLPRAVPLSLPYQDFKRDLSDYRERARLLNRVRRVGFSHMLLTTPQVPLAPVQPQANGKEEEEEEEEDEEEEEEDEEEEEEEEEEEEEEEEEEEEEEEAAAAVALGEVLGPRSGSSSEGSERSTDRSQEGAPSTLLADDQKESRGRASMADGDLEPEEGSKTLVLVSPGDMKKSPVTAELAPDPDLGTLAALTPQHERPQPTGSQLDVSEPGTLSSVLKSEPKPPGPGAGLGAGTVTTGVGGVAVTSSPFTKVERTFVHIAEKTHLNVMSSGGQALRSEEFSAGGELGLELASDGGAVEEGARAPLENGLALSGLNGAEIEGSALSGAPRETPSEMATNSLPNGPALADGPAPVSPLEPSPEKVATISPRRHAMPGSRPRSRIPVLLSEEDTGSEPSGSLSAKERWSKRARPQQDLARLVMEKRQGRLLLRLASGASSSSSEEQRRASETLSGTGSEEDTPASEPAAALPRKSGRAAATRSRIPRPIGLRMPMPVAAQQPASRSHGAAPALDTAITSRLQLQTPPGSATAADLRPKQPPGRGLGPGRAQAGARPPAPRSPRLPASTSAARNASASPRSQSLSRRESPSPSHQARPGVPPPRGVPPARAQPDGTPSPGGSKKGPRGKLQAQRATTKGRAGGAEGRAGAR

SEQ ID NO: 86948 - protein, 668 aa, Homo sapiens
  Payload ID: 17399
  Gene Symbol: TTBK1
  Gene Name: tau tubulin kinase 1
  ENSP ID: ENSP00000307357
MDLLTRENVALKVESAQQPKQVLKMEVAVLKKLQGKDHVCRFIGCGRNEKFNYVVMQLQGRNLADLRRSQPRGTFTLSTTLRLGKQILESIEAIHSVGFLHRDIKPSNFAMGRLPSTYRKCYMLDFGLARQYTNTTGDVRPPRNVAGFRGTVRYASVNAHKNREMGRHDDLWSLFYMLVEFAVGQLPWRKIKDKEQVGMIKEKYEHRMLLKHMPSEFHLFLDHIASLDYFTKPDYQLIMSVFENSMKERGIAENEAFDWEKAGTDALLSTSTSTPPQQNTRQTAAMFGVVNVTPVPGDLLRENTEDVLQGEHLSDQENAPPILPGRPSEGLGPSPHLVPHPGGPEAEVWEETDVNRNKLRINIGKSPCVEEEQSRGMGVPSSPVRAPPDSPTTPVRSLRYRRVNSPESERLSTADGRVELPERRSRMDLPGSPSRQACSSQPAQMLSVDTGHADRQASGRMDVSASVEQEALSNAFRSVPLAEEEDFDSKEWVIIDKETELKDFPPGAEPSTSGTTDEEPEELRPLPEEGEERRRLGAEPTVRPRGRSMQALAEEDLQHLPPQPLPPQLSQGDGRSETSQPPTPGSPSHSPLHSGPRPRRRESDPTGPQRQLEEDRLSGHSLPRYSPLRRLASSVFSSSTLETEHYPHPGGGGSSGSSGSLIQRSRSA

SEQ ID NO: 86949 - protein, 1244 aa, Homo sapiens
  Payload ID: 17400
  Gene Symbol: TTBK2
  Gene Name: tau tubulin kinase 2
  Uniprot ID: Q6IQ55
  ENSP ID: ENSP00000267890
MSGGGEQLDILSVGILVKERWKVLRKIGGGGFGEIYDALDMLTRENVALKVESAQQPKQVLKMEVAVLKKLQGKDHVCRFIGCGRNDRFNYVVMQLQGRNLADLRRSQSRGTFTISTTLRLGRQILESIESIHSVGFLHRDIKPSNFAMGRFPSTCRKCYMLDFGLARQFTNSCGDVRPPRAVAGFRGTVRYASINAHRNREMGRHDDLWSLFYMLVEFVVGQLPWRKIKDKEQVGSIKERYDHRLMLKHLPPEFSIFLDHISSLDYFTKPDYQLLTSVFDNSIKTFGVIESDPFDWEKTGNDGSLTTTTTSTTPQLHTRLTPAAIGIANATPIPGDLLRENTDEVFPDEQLSDGENGIPVGVSPDKLPGSLGHPRPQEKDVWEEMDANKNKIKLGICKAATEEENSHGQANGLLNAPSLGSPIRVRSEITQPDRDIPLVRKLRSIHSFELEKRLTLEPKPDTDKFLETCLEKMQKDTSAGKESILPALLHKPCVPAVSRTDHIWHYDEEYLPDASKPASANTPEQADGGGSNGFIAVNLSSCKQEIDSKEWVIVDKEQDLQDFRTNEAVGHKTTGSPSDEEPEVLQVLEASPQDEKLQLGPWAENDHLKKETSGVVLALSAEGPPTAASEQYTDRLELQPGAASQFIAATPTSLMEAQAEGPLTAITIPRPSVASTQSTSGSFHCGQQPEKKDLQPMEPTVELYSPRENFSGLVVTEGEPPSGGSRTDLGLQIDHIGHDMLPNIRESNKSQDLGPKELPDHNRLVVREFENLPGETEEKSILLESDNEDEKLSRGQHCIEISSLPGDLVIVEKDHSATTEPLDVTKTQTFSVVPNQDKNNEIMKLLTVGTSEISSRDIDPHVEGQIGQVAEMQKNKISKDDDIMSEDLPGHQGDLSTFLHQEGKREKITPRNGELFHCVSENEHGAPTRKDMVRSSFVTRHSRIPVLAQEIDSTLESSSPVSAKEKLLQKKAYQPDLVKLLVEKRQFKSFLGDLSSASDKLLEEKLATVPAPFCEEEVLTPFSRLTVDSHLSRSAEDSFLSPIISQSRKSKIPRPVSWVNTDQVNSSTSSQFFPRPPPGKPPTRPGVEARLRRYKVLGSSNSDSDLFSRLAQILQNGSQKPRSTTQCKSPGSPHNPKTPPKSPVVPRRSPSASPRSSSLPRTSSSSPSRAGRPHHDQRSSSPHLGRSKSPPSHSGSSSSRRSCQQEHCKPSKNGLKGSGSLHHHSASTKTPQGKSKPASKLSR

SEQ ID NO: 86950 - protein, 84 aa, Homo sapiens
  Payload ID: 17400
  Gene Symbol: TTBK2
  Gene Name: tau tubulin kinase 2
  ENSP ID: ENSP00000454605
MSGGGEQLDILSVGILVKERWKVGKTMFVDLLAVGGMIDSTMWSCSCRVGIWQIFAVASPEAHSPLVPLSGWVDRFWSLLKAFI

SEQ ID NO: 86951 - protein, 117 aa, Homo sapiens
  Payload ID: 17400
  Gene Symbol: TTBK2
  Gene Name: tau tubulin kinase 2
  ENSP ID: ENSP00000455574
MSGGGEQLDILSVGILVKERWKVGKCCTEGGISSTTKTSSENGSCCFEKAARVGIWQIFAVASPEAHSPLVPLSGWVDRFWSLLKAFILWDSCIETSNRRTSLWVAFLVHVGNVTCL

SEQ ID NO: 86952 - protein, 478 aa, Homo sapiens
  Payload ID: 17400
  Gene Symbol: TTBK2
  Gene Name: tau tubulin kinase 2
  Uniprot ID: Q6IQ55
  ENSP ID: ENSP00000455734
MSGGGEQLDILSVGILVKERWKVLRKIGGGGFGEIYDALDMLTRENVALKVESAQQPKQVLKMEVAVLKKLQGKDHVCRFIGCGRNDRFNYVVMQLQGRNLADLRRSQSRGTFTISTTLRLGRQILESIESIHSVGFLHRDIKPSNFAMGRFPSTCRKCYMLDFGLARQFTNSCGDVRPPRAVAGFRGTVRYASINAHRNREMGRHDDLWSLFYMLVEFVVGQLPWRKIKDKEQVGSIKERYDHRLMLKHLPPEFSIFLDHISSLDYFTKPDYQLLTSVFDNSIKTFGVIESDPFDWEKTGNDGSLTTTTTSTTPQLHTRLTPAAIGIANATPIPGDLLRENTDEVFPDEQLSDGENGIPVGVSPDKLPGSLGHPRPQEKDVWEEMDANKNKIKLGICKAATEEENSHGQANGLLNAPSLGSPIRVRSEITQPDRDIPLVRKLRSIHSFELEKRLTLEPKPDTDKFLETWYKIVYFSF

SEQ ID NO: 86953 - protein, 143 aa, Homo sapiens
  Payload ID: 17400
  Gene Symbol: TTBK2
  Gene Name: tau tubulin kinase 2
  ENSP ID: ENSP00000457385
MSGGGEQLDILSVGILVKERWKVLRKIGGGGFGEIYDALDMLTRENVALKVESAQQPKQVLKMEVAVLKKLQGKDHVCRFIGCGRNDRFNYVVMQLQGRNLADLRRSQSRGTFTISTTLRLGRQILESIESIHSVGFLHRDIK

SEQ ID NO: 86954 - protein, 443 aa, Homo sapiens
  Payload ID: 17400
  Gene Symbol: TTBK2
  Gene Name: tau tubulin kinase 2
  ENSP ID: ENSP00000457489
MSGGGEQLDILSVGILVKERWKVLRKIGGGGFGEIYDALDMLTRENVALKVESAQQPKQVLKMEVAVLKKLQGKDHVCRFIGCGRNDRFNYVVMQLQGRNLADLRRSQSRGTFTISTTLRLGRQILESIESIHSVGFLHRDIKPPRAVAGFRGTVRYASINAHRNREMGRHDDLWSLFYMLVEFVVGQLPWRKIKDKEQVGSIKERYDHRLMLKHLPPEFSIFLDHISSLDYFTKPDYQLLTSVFDNSIKTFGVIESDPFDWEKTGNDGSLTTTTTSTTPQLHTRLTPAAIGIANATPIPGDLLRENTDEVFPDEQLSDGENGIPVGVSPDKLPGSLGHPRPQEKDVWEEMDANKNKIKLGICKAATEEENSHGQANGLLNAPSLGSPIRVRSEITQPDRDIPLVRKLRSIHSFELEKRLTLEPKPDTDKFLETWYKIVYFSF

SEQ ID NO: 86955 - protein, 1649 aa, Homo sapiens
  Payload ID: 17400
  Gene Symbol: TTBK2
  Gene Name: tau tubulin kinase 2
  ENSP ID: ENSP00000479984
MESVEKDWGWGLWRNLRCLGHAHQGKCCTEGGISSTTKTSSENGSCCFEKAARKDHVCRFIGCGRNDRFNYVVMQLQGRNLADLRRSQSRGTFTISTTLRLGRQILESIESIHSVGFLHRDIKPSNFAMGRFPSTCRKCYMLDFGLARQFTNSCGDVRPPRAVAGFRGTVRYASINAHRNREMGRHDDLWSLFYMLVEFVVGQLPWRKIKDKEQVGSIKERYDHRLMLKHLPPEFSIFLDHISSLDYFTKPDYQMSIRVTRKSYKVSTSGPQAFNSLSYTSGPGACISSSSFSRMGSSSFRGGLGAGYGGASGGITTITVNQSLLSPLNLEVDPNIQAVRTQEEKQIKTLNNKFFSFIDKVRFLEQQNKMLETKWSLVQQQKMARSNMDNMFESYINNLKWQLETLGQEKLKLEAELGNMHGLVEDFRNKYEVEISKCTEMENEFVLIKEYVDEAYMNKMELESSLKELTAKISFLRQLYEEEIGSCSPRSRIHLWCCSWTTAASWTWTASSLRSRPEGFPGGCHADTEQRGELAIKDANAKLSELEAALQLASQDMARQLREYQELMNVKLALDIKIATYRKLLEGEESWLESGMQNMSIHMKTTSSYAGGQSLAYGGLTSPGLSYGLGSSFGSGMGSSSFSHTSSSRAVVMKKIETRDGKLVSESSNVLPNLRITATLLTSVFDNSIKTFGVIESDPFDWEKTGNDGSLTTTTTSTTPQLHTRLTPAAIGIANATPIPGDLLRENTDEVFPDEQLSDGENGIPVGVSPDKLPGSLGHPRPQEKDVWEEMDANKNKIKLGICKAATEEENSHGQANGLLNAPSLGSPIRVRSEITQPDRDIPLVRKLRSIHSFELEKRLTLEPKPDTDKFLETCLEKMQKDTSAGKESILPALLHKPCVPAVSRTDHIWHYDEEYLPDASKPASANTPEQADGGGSNGFIAVNLSSCKQEIDSKEWVIVDKEQDLQDFRTNEAVGHKTTGSPSDEEPEVLQVLEASPQDEKLQLGPWAENDHLKKETSGVVLALSAEGPPTAASEQYTDRLELQPGAASQFIAATPTSLMEAQAEGPLTAITIPRPSVASTQSTSGSFHCGQQPEKKDLQPMEPTVELYSPRENFSGLVVTEGEPPSGGSRTDLGLQIDHIGHDMLPNIRESNKSQDLGPKELPDHNRLVVREFENLPGETEEKSILLESDNEDEKLSRGQHCIEISSLPGDLVIVEKDHSATTEPLDVTKTQTFSVVPNQDKNNEIMKLLTVGTSEISSRDIDPHVEGQIGQVAEMQKNKISKDDDIMSEDLPGHQGDLSTFLHQEGKREKITPRNGELFHCVSENEHGAPTRKDMVRSSFVTRHSRIPVLAQEIDSTLESSSPVSAKEKLLQKKAYQPDLVKLLVEKRQFKSFLGDLSSASDKLLEEKLATVPAPFCEEEVLTPFSRLTVDSHLSRSAEDSFLSPIISQSRKSKIPRPVSWVNTDQVNSSTSSQFFPRPPPGKPPTRPGVEARLRRYKVLGSSNSDSDLFSRLAQILQNGSQKPRSTTQCKSPGSPHNPKTPPKSPVVPRRSPSASPRSSSLPRTSSSSPSRAGRPHHDQRSSSPHLGRSKSPPSHSGSSSSRRSCQQEHCKPSKNGLKGSGSLHHHSASTKTPQGKSKPASKLSR

SEQ ID NO: 86956 - protein, 747 aa, Homo sapiens
  Payload ID: 17401
  Gene Symbol: TAX1BP1
  Gene Name: Tax1 (human T-cell leukemia virus type I) binding protein 1
  Uniprot ID: Q86VP1
  ENSP ID: ENSP00000265393
MTSFQEVPLQTSNFAHVIFQNVAKSYLPNAHLECHYTLTPYIHPHPKDWVGIFKVGWSTARDYYTFLWSPMPEHYVEGSTVNCVLAFQGYYLPNDDGEFYQFCYVTHKGEIRGASTPFQFRASSPVEELLTMEDEGNSDMLVVTTKAGLLELKIEKTMKEKEELLKLIAVLEKETAQLREQVGRMERELNHEKERCDQLQAEQKGLTEVTQSLKMENEEFKKRFSDATSKAHQLEEDIVSVTHKAIEKETELDSLKDKLKKAQHEREQLECQLKTEKDEKELYKVHLKNTEIENTKLMSEVQTLKNLDGNKESVITHFKEEIGRLQLCLAEKENLQRTFLLTTSSKEDTCFLKEQLRKAEEQVQATRQEVVFLAKELSDAVNVRDRTMADLHTARLENEKVKKQLADAVAELKLNAMKKDQDKTDTLEHELRREVEDLKLRLQMAADHYKEKFKECQRLQKQINKLSDQSANNNNVFTKKTGNQQKVNDASVNTDPATSASTVDVKPSPSAAEADFDIVTKGQVCEMTKEIADKTEKYNKCKQLLQDEKAKCNKYADELAKMELKWKEQVKIAENVKLELAEVQDNYKELKRSLENPAERKMEDGADGAFYPDEIQRPPVRVPSWGLEDNVVCSQPARNFSRPDGLEDSEDSKEDENVPTAPDPPSQHLRGHGTGFCFDSSFDVHKKCPLCELMFPPNYDQSKFEEHVESHWKVCPMCSEQFPPDYDQQVFERHVQTHFDQNVLNFD

SEQ ID NO: 86957 - protein, 789 aa, Homo sapiens
  Payload ID: 17401
  Gene Symbol: TAX1BP1
  Gene Name: Tax1 (human T-cell leukemia virus type I) binding protein 1
  Uniprot ID: Q86VP1
  ENSP ID: ENSP00000379612
MTSFQEVPLQTSNFAHVIFQNVAKSYLPNAHLECHYTLTPYIHPHPKDWVGIFKVGWSTARDYYTFLWSPMPEHYVEGSTVNCVLAFQGYYLPNDDGEFYQFCYVTHKGEIRGASTPFQFRASSPVEELLTMEDEGNSDMLVVTTKAGLLELKIEKTMKEKEELLKLIAVLEKETAQLREQVGRMERELNHEKERCDQLQAEQKGLTEVTQSLKMENEEFKKRFSDATSKAHQLEEDIVSVTHKAIEKETELDSLKDKLKKAQHEREQLECQLKTEKDEKELYKVHLKNTEIENTKLMSEVQTLKNLDGNKESVITHFKEEIGRLQLCLAEKENLQRTFLLTTSSKEDTCFLKEQLRKAEEQVQATRQEVVFLAKELSDAVNVRDRTMADLHTARLENEKVKKQLADAVAELKLNAMKKDQDKTDTLEHELRREVEDLKLRLQMAADHYKEKFKECQRLQKQINKLSDQSANNNNVFTKKTGNQQKVNDASVNTDPATSASTVDVKPSPSAAEADFDIVTKGQVCEMTKEIADKTEKYNKCKQLLQDEKAKCNKYADELAKMELKWKEQVKIAENVKLELAEVQDNYKELKRSLENPAERKMEGQNSQSPQCFKTCSEQNGYVLTLSNAQPVLQYGNPYASQETRDGADGAFYPDEIQRPPVRVPSWGLEDNVVCSQPARNFSRPDGLEDSEDSKEDENVPTAPDPPSQHLRGHGTGFCFDSSFDVHKKCPLCELMFPPNYDQSKFEEHVESHWKVCPMCSEQFPPDYDQQVFERHVQTHFDQNVLNFD

SEQ ID NO: 86958 - protein, 813 aa, Homo sapiens
  Payload ID: 17401
  Gene Symbol: TAX1BP1
  Gene Name: Tax1 (human T-cell leukemia virus type I) binding protein 1
  ENSP ID: ENSP00000386515
MTSFQEVPLQTSNFAHVIFQNVAKSYLPNAHLECHYTLTPYIHPHPKDWVGIFKVGWSTARDYYTFLWSPMPEHYVEGSTVNCVLAFQGYYLPNDDGEFYQFCYVTHKGEIRGASTPFQFRASSPVEELLTMEDEGNSDMLVVTTKAGLLELKIEKTMKEKEELLKLIAVLEKETAQLREQVGRMERELNHEKERCDQLQAEQKGLTEVTQSLKMENEEFKKRFSDATSKAHQLEEDIVSVTHKAIEKETELDSLKDKLKKAQHEREQLECQLKTEKDEKELYKVHLKNTEIENTKLMSEVQTLKNLDGNKESVITHFKEEIGRLQLCLAEKENLQRTFLLTTSSKEDTCFLKEQLRKAEEQVQATRQEVVFLAKELSDAVNVRDRTMADLHTARLENEKVKKQLADAVAELKLNAMKKDQDKTDTLEHELRREVEDLKLRLQMAADHYKEKFKECQRLQKQINKLSDQSANNNNVFTKKTGNQQKVNDASVNTDPATSASTVDVKPSPSAAEADFDIVTKGQVCEMTKEIADKTEKYNKCKQLLQDEKAKCNKYADELAKMELKWKEQVKIAENVKLELAEVQDNYKLQLAEKDKEISGLISHLENLSREKELKRSLENPAERKMEGQNSQSPQCFKTCSEQNGYVLTLSNAQPVLQYGNPYASQETRDGADGAFYPDEIQRPPVRVPSWGLEDNVVCSQPARNFSRPDGLEDSEDSKEDENVPTAPDPPSQHLRGHGTGFCFDSSFDVHKKCPLCELMFPPNYDQSKFEEHVESHWKVCPMCSEQFPPDYDQQVFERHVQTHFDQNVLNFD

SEQ ID NO: 86959 - protein, 91 aa, Homo sapiens
  Payload ID: 17401
  Gene Symbol: TAX1BP1
  Gene Name: Tax1 (human T-cell leukemia virus type I) binding protein 1
  ENSP ID: ENSP00000391215
MTSFQEVPLQTSNFAHVIFQNVAKSYLPNAHLECHYTLTPYIHPHPKDWVGIFKVGWSTARDYYTFLWSPMPEHYVEGSTVNCVLAFQVEN

SEQ ID NO: 86960 - protein, 590 aa, Homo sapiens
  Payload ID: 17401
  Gene Symbol: TAX1BP1
  Gene Name: Tax1 (human T-cell leukemia virus type I) binding protein 1
  Uniprot ID: Q86VP1
  ENSP ID: ENSP00000391907
MKEKEELLKLIAVLEKETAQLREQVGRMERELNHEKERCDQLQAEQKGLTEVTQSLKMENEEFKKRFSDATSKAHQLEEDIVSVTHKAIEKETELDSLKDKLKKAQHEREQLECQLKTEKDEKELYKVHLKNTEIENTKLMSEVQTLKNLDGNKESVITHFKEEIGRLQLCLAEKENLQRTFLLTTSSKEDTCFLKEQLRKAEEQVQATRQEVVFLAKELSDAVNVRDRTMADLHTARLENEKVKKQLADAVAELKLNAMKKDQDKTDTLEHELRREVEDLKLRLQMAADHYKEKFKECQRLQKQINKLSDQSANNNNVFTKKTGNQQKVNDASVNTDPATSASTVDVKPSPSAAEADFDIVTKGQVCEMTKEIADKTEKYNKCKQLLQDEKAKCNKYADELAKMELKWKEQVKIAENVKLELAEVQDNYKELKRSLENPAERKMEDGADGAFYPDEIQRPPVRVPSWGLEDNVVCSQPARNFSRPDGLEDSEDSKEDENVPTAPDPPSQHLRGHGTGFCFDSSFDVHKKCPLCELMFPPNYDQSKFEEHVESHWKVCPMCSEQFPPDYDQQVFERHVQTHFDQNVLNFD

SEQ ID NO: 86961 - protein, 98 aa, Homo sapiens
  Payload ID: 17401
  Gene Symbol: TAX1BP1
  Gene Name: Tax1 (human T-cell leukemia virus type I) binding protein 1
  ENSP ID: ENSP00000395290
MTSFQEVPLQTSNFAHVIFQNVAKSYLPNAHLECHYTLTPYIHPHPKDWVGIFKVGWSTARDYYTFLWSPMPEHYVEGSTVNCVLAFQGYYLPNDDGE

SEQ ID NO: 86962 - protein, 138 aa, Homo sapiens
  Payload ID: 17401
  Gene Symbol: TAX1BP1
  Gene Name: Tax1 (human T-cell leukemia virus type I) binding protein 1
  ENSP ID: ENSP00000411490
MTSFQEVPLQTSNFAHVIFQNVAKSYLPNAHLECHYTLTPYIHPHPKDWVGIFKVGWSTARDYYTFLWSPMPEHYVEGSTVNCVLAFQGYYLPNDDGEFYQFCYVTHKGEIRGASTPFQFRASSPVEELLTMEDEGNS

SEQ ID NO: 86963 - protein, 326 aa, Homo sapiens
  Payload ID: 17401
  Gene Symbol: TAX1BP1
  Gene Name: Tax1 (human T-cell leukemia virus type I) binding protein 1
  ENSP ID: ENSP00000412575
ADHYKEKFKECQRLQKQINKLSDQSANNNNVFTKKTGNQQKVNDASVNTDPATSASTVDVKPSPSAAEADFDIVTKGQVCEMTKEIADKTEKYNKCKQLLQDEKAKCNKYADELAKMELKWKEQVKIAENVKLELAEVQDNYKLQLAEKDKEISGLISHLENLSREKELKRSLENPAERKMEDGADGAFYPDEIQRPPVRVPSWGLEDNVVCSQPARNFSRPDGLEDSEDSKEDENVPTAPDPPSQHLRGHGTGFCFDSSFDVHKKCPLCELMFPPNYDQSKFEEHVESHWKVCPMCSEQFPPDYDQQVFERHVQTHFDQNVLNFD

SEQ ID NO: 86964 - protein, 747 aa, Homo sapiens; identical to SEQ ID NO: 86956
  Payload ID: 17401
  Gene Symbol: TAX1BP1
  Gene Name: Tax1 (human T-cell leukemia virus type I) binding protein 1
  Uniprot ID: Q86VP1
  ENSP ID: ENSP00000444811

SEQ ID NO: 86965 - protein, 142 aa, Homo sapiens
  Payload ID: 17401
  Gene Symbol: TAX1BP1
  Gene Name: Tax1 (human T-cell leukemia virus type I) binding protein 1
  ENSP ID: ENSP00000477282
GFCFDSSFDVHKKCPLCELMFPPNYDQSKFEEHVESHWKVCPMCSEQFPPDYDQQVFERNWAGKRLLFPSIHAHGAEDGFGADGTLCGPGLIAVRLLIVHLLLVILAACRTREVQGLSGALISPQVHPATSRTGDVAVAEQR

SEQ ID NO: 86966 - protein, 124 aa, Homo sapiens
  Payload ID: 17402
  Gene Symbol: TAX1BP3
  Gene Name: Tax1 (human T-cell leukemia virus type I) binding protein 3
  Uniprot ID: O14907
  ENSP ID: ENSP00000225525
MSYIPGQPVTAVVQRVEIHKLRQGENLILGFSIGGGIDQDPSQNPFSEDKTDKGIYVTRVSEGGPAEIAGLQIGDKIMQVNGWDMTMVTHDQARKRLTKRSEEVVRLLVTRQSLQKAVQQSMLS

SEQ ID NO: 86967 - protein, 98 aa, Homo sapiens
  Payload ID: 17402
  Gene Symbol: TAX1BP3
  Gene Name: Tax1 (human T-cell leukemia virus type I) binding protein 3
  ENSP ID: ENSP00000484776
MSYIPGQPVTAVVQRVEIHKLRQGENLILGFSIGGGIDQDPSQNPFSEDKTDKVNGWDMTMVTHDQARKRLTKRSEEVVRLLVTRQSLQKAVQQSMLS

SEQ ID NO: 86968 - protein, 546 aa, Homo sapiens
  Payload ID: 17403
  Gene Symbol: TXLNA
  Gene Name: taxilin alpha
  Uniprot ID: P40222
  ENSP ID: ENSP00000362711
MKNQDKKNGAAKQSNPKSSPGQPEAGPEGAQERPSQAAPAVEAEGPGSSQAPRKPEGAQARTAQSGALRDVSEELSRQLEDILSTYCVDNNQGGPGEDGAQGEPAEPEDAEKSRTYVARNGEPEPTPVVNGEKEPSKGDPNTEEIRQSDEVGDRDHRRPQEKKKAKGLGKEITLLMQTLNTLSTPEEKLAALCKKYAELLEEHRNSQKQMKLLQKKQSQLVQEKDHLRGEHSKAVLARSKLESLCRELQRHNRSLKEEGVQRAREEEEKRKEVTSHFQVTLNDIQLQMEQHNERNSKLRQENMELAERLKKLIEQYELREEHIDKVFKHKDLQQQLVDAKLQQAQEMLKEAEERHQREKDFLLKEAVESQRMCELMKQQETHLKQQLALYTEKFEEFQNTLSKSSEVFTTFKQEMEKMTKKIKKLEKETTMYRSRWESSNKALLEMAEEKTVRDKELEGLQVKIQRLEKLCRALQTERNDLNKRVQDLSAGGQGSLTDSGPERRPEGPGAQAPSSPRVTEAPCYPGAPSTEASGQTGPQEPTSARA

SEQ ID NO: 86969 - protein, 546 aa, Homo sapiens; identical to SEQ ID NO: 86968
  Payload ID: 17403
  Gene Symbol: TXLNA
  Gene Name: taxilin alpha
  Uniprot ID: P40222
  ENSP ID: ENSP00000362712

SEQ ID NO: 86970 - protein, 684 aa, Homo sapiens
  Payload ID: 17404
  Gene Symbol: TXLNB
  Gene Name: taxilin beta
  Uniprot ID: Q8N3L3
  ENSP ID: ENSP00000351206
MEANHSEQLSAERQSTPPGDSSSLPSHNGLEKEDGQDSPTPVQPPEKEASVHPDISEELNRQLEDIINTYGSAASTAGKEGSARASEQPENAESPDNEDGDCEETTEEAGREPVASGEPPTVKEPVSNKEQKLEKKILKGLGKEANLLMQNLNKLQTPEEKFDFLFKKYAELLDEHRTEQKKLKLLQKKQVQIQKEKDQLQGEHSRAILARSKLESLCRELQRHNKTLKEEALQRAREEEEKRKEITSHFQSTLTDIQGQIEQQSERNMKLCQENTELAEKLKSIIDQYELREEHLDKIFKHRELQQKLVDAKLEQAQEMMKEAEERHKREKEYLLNQAAEWKLQAKVLKEQETVLQAQLTLYSGRFEEFQSTLTKSNEVFATFKQEMDKTTKKMKKLEKDTATWKARFENCNKALLDMIEEKALRAKEYECFVMKIGRLENLCRALQEERNELHKKIRDAEISEKDDQSQHNSDEEPESNVSVDQEIDAEEVNSVQTAVKNLATAFMIIHHPESTPHQSKETQPEIGSSQESADAALKEPEQPPLIPSRDSESPLPPLTPQAEAEGGSDAEPPSKASNSPAGLGAETQCEGLPVGAQADQASWKPEAEASGQAPQAPTEASLQKMEADVPAPACAAEEHVAAMVPACEPSRQPPRAAAEELPVGASAGPQPRNVADTNLEGVD

SEQ ID NO: 86971 - protein, 133 aa, Homo sapiens
  Payload ID: 17404
  Gene Symbol: TXLNB
  Gene Name: taxilin beta
  ENSP ID: ENSP00000356624
  MOD_RES (1)..(1): Any amino acid
XYELREEHLDKIFKHRELQQKLVDAKLEQAQEMMKEAEERHKREKEYLLNQAAEWKLQAKVLKEQETVLQAQVRPGGRGMGVLSSLSPDKKAGAKGGQQKSSYVAGDGGMGIGNEEQLHIYSYFQVKIKAQYY

SEQ ID NO: 86972 - protein, 528 aa, Homo sapiens
  Payload ID: 17405
  Gene Symbol: TXLNG
  Gene Name: taxilin gamma
  Uniprot ID: Q9NUQ3
  ENSP ID: ENSP00000369465
MATRVEEAARGRGGGAEEATEAGRGGRRRSPRQKFEIGTMEEAGICGLGVKADMLCNSQSNDILQHQGSNCGGTSNKHSLEEDEGSDFITENRNLVSPAYCTQESREEIPGGEARTDPPDGQQDSECNRNKEKTLGKEVLLLMQALNTLSTPEEKLAALCKKYADLLEESRSVQKQMKILQKKQAQIVKEKVHLQSEHSKAILARSKLESLCRELQRHNKTLKEENMQQAREEEERRKEATAHFQITLNEIQAQLEQHDIHNAKLRQENIELGEKLKKLIEQYALREEHIDKVFKHKELQQQLVDAKLQQTTQLIKEADEKHQREREFLLKEATESRHKYEQMKQQEVQLKQQLSLYMDKFEEFQTTMAKSNELFTTFRQEMEKMTKKIKKLEKETIIWRTKWENNNKALLQMAEEKTVRDKEYKALQIKLERLEKLCRALQTERNELNEKVEVLKEQVSIKAAIKAANRDLATPVMQPCTALDSHKELNTSSKRALGAHLEAEPKSQRSAVQKPPSTGSAPAIESVD

SEQ ID NO: 86973 - protein, 396 aa, Homo sapiens
  Payload ID: 17405
  Gene Symbol: TXLNG
  Gene Name: taxilin gamma
  Uniprot ID: Q9NUQ3
  ENSP ID: ENSP00000381222
MATRVEEAARGRGGGAEEATEAGRGGRRRSPRQKLEESRSVQKQMKILQKKQAQIVKEKVHLQSEHSKAILARSKLESLCRELQRHNKTLKEENMQQAREEEERRKEATAHFQITLNEIQAQLEQHDIHNAKLRQENIELGEKLKKLIEQYALREEHIDKVFKHKELQQQLVDAKLQQTTQLIKEADEKHQREREFLLKEATESRHKYEQMKQQEVQLKQQLSLYMDKFEEFQTTMAKSNELFTTFRQEMEKMTKKIKKLEKETIIWRTKWENNNKALLQMAEEKTVRDKEYKALQIKLERLEKLCRALQTERNELNEKVEVLKEQVSIKAAIKAANRDLATPVMQPCTALDSHKELNTSSKRALGAHLEAEPKSQRSAVQKPPSTGSAPAIESVD

SEQ ID NO: 86974 - protein, 456 aa, Homo sapiens
  Payload ID: 17406
  Gene Symbol: TLDC1
  Gene Name: TBC/LysM-associated domain containing 1
  Uniprot ID: Q6P9B6
  ENSP ID: ENSP00000343635
MGNSRSRVGRSFCSQFLPEEQAEIDQLFDALSSDKNSPNVSSKSFSLKALQNHVGEALPPEMVTRLYDGMRRVDLTGKAKGPSENVSQEQFTASMSHLLKGNSEEKSLMIMKMISATEGPVKAREVQKFTEDLVGSVVHVLSHRQELRGWTGKEAPGPNPRVQVLAAQLLSDMKLQDGKRLLGPQWLDYDCDRAVIEDWVFRVPHVAIFLSVVICKGFLILCSSLDLTTLVPERQVDQGRGFESILDVLSVMYINAQLPREQRHRWCLLFSSELHGHSFSQLCGHITHRGPCVAVLEDHDKHVFGGFASCSWEVKPQFQGDNRCFLFSICPSMAVYTHTGYNDHYMYLNHGQQTIPNGLGMGGQHNYFGLWVDVDFGKGHSRAKPTCTTYNSPQLSAQENFQFDKMEVWAVGDPSEEQLAKGNKSILDADPEAQALLEISGHSRHSEGLREVPDDE

SEQ ID NO: 86975 - protein, 193 aa, Homo sapiens
  Payload ID: 17406
  Gene Symbol: TLDC1
  Gene Name: TBC/LysM-associated domain containing 1
  ENSP ID: ENSP00000454265
MGNSRSRVGRSFCSQFLPEEQAEIDQLFDALSSDKNSPNVSSKSFSLKALQNHVGEALPPEMVTRLYDGMRRVDLTGKAKGPSENVSQEQFTASMSHLLKGNSEEKSLMIMKMISATEGPVKAREVQKFTEDLVGSVVHVLSHRQELRGWTGKEAPGPNPRVQVLAAQLLSDMKLQGKDFWGPSGWTMTVTEL

SEQ ID NO: 86976 - protein, 57 aa, Homo sapiens
  Payload ID: 17406
  Gene Symbol: TLDC1
  Gene Name: TBC/LysM-associated domain containing 1
  ENSP ID: ENSP00000455332
MGNSRSRVGRSFCSQFLPEEQAEIDQLFDALSSDKNSPNVSSKSFSLKALQKGTWSR

SEQ ID NO: 86977 - protein, 45 aa, Homo sapiens
  Payload ID: 17406
  Gene Symbol: TLDC1
  Gene Name: TBC/LysM-associated domain containing 1
  ENSP ID: ENSP00000455557
MGNSRSRVGRSFCSQFLPEEQAEIDQLFDALSSDKNSPNVSSKSF

SEQ ID NO: 86978 - protein, 83 aa, Homo sapiens
  Payload ID: 17406
  Gene Symbol: TLDC1
  Gene Name: TBC/LysM-associated domain containing 1
  ENSP ID: ENSP00000457115
MGNSRSRVGRSFCSQFLPEEQAEIDQLFDALSSDKNSPNVSSKSFSLKALQNHVGEALPPEMVTRLYDGMRRVDLTGKAKGPS

SEQ ID NO: 86979 - protein, 148 aa, Homo sapiens
  Payload ID: 17406
  Gene Symbol: TLDC1
  Gene Name: TBC/LysM-associated domain containing 1
  ENSP ID: ENSP00000457557
MGNSRSRVGRSFCSQFLPEEQAEIDQLFDALSSDKNSPNVSSKSFSLKALQNHVGEALPPEMVTRLYDGMRRVDLTGKAKGPSENVSQEQFTASMSHLLKGNSEEKSLMIMKMISATEGPVKAREVQKFTEDLVGSVVHVLSHRQELR

SEQ ID NO: 86980 - protein, 215 aa, Homo sapiens
  Payload ID: 17407
  Gene Symbol: TLDC2
  Gene Name: TBC/LysM-associated domain containing 2
  Uniprot ID: A0PJX2
  ENSP ID: ENSP00000217320
MRGLRWRYTRLPSQVEDTLSGEEGNEEEEEEEAAPDPAAAPEDPTVPQLTEASQVLSASEIRQLSFHFPPRVTGHPWSLVFCTSRDGFSLQSLYRRMEGCSGPVLLVLRDQDGQIFGAFSSSAIRLSKGFYGTGETFLFSFSPQLKVFKWTGSNSFFVKGDLDSLMMGSGSGRFGLWLDGDLFRGGSSPCPTFNNEVLARQEQFCIQELEAWLLS

SEQ ID NO: 86981 - protein, 27 aa, Homo sapiens
  Payload ID: 17407
  Gene Symbol: TLDC2
  Gene Name: TBC/LysM-associated domain containing 2
  ENSP ID: ENSP00000394804
VFKWTGSNSFFVKGDLDSLMMGSGRIL

SEQ ID NO: 86982 - protein, 215 aa, Homo sapiens; identical to SEQ ID NO: 86980
  Payload ID: 17407
  Gene Symbol: TLDC2
  Gene Name: TBC/LysM-associated domain containing 2
  Uniprot ID: A0PJX2
  ENSP ID: ENSP00000473323

SEQ ID NO: 86983 - protein, 1168 aa, Homo sapiens
  Payload ID: 17408
  Gene Symbol: TBC1D1
  Gene Name: TBC1 (tre-2/USP6, BUB2, cdc16) domain family, member 1
  Uniprot ID: Q86TI0
  ENSP ID: ENSP00000261439
MEPITFTARKHLLSNEVSVDFGLQLVGSLPVHSLTTMPMLPWVVAEVRRLSRQSTRKEPVTKQVRLCVSPSGLRCEPEPGRSQQWDPLIYSSIFECKPQRVHKLIHNSHDPSYFACLIKEDAVHRQSICYVFKADDQTKVPEIISSIRQAGKIARQEELHCPSEFDDTFSKKFEVLFCGRVTVAHKKAPPALIDECIEKFNHVSGSRGSESPRPNPPHAAPTGSQEPVRRPMRKSFSQPGLRSLAFRKELQDGGLRSSGFFSSFEESDIENHLISGHNIVQPTDIEENRTMLFTIGQSEVYLISPDTKKIALEKNFKEISFCSQGIRHVDHFGFICRESSGGGGFHFVCYVFQCTNEALVDEIMMTLKQAFTVAAVQQTAKAPAQLCEGCPLQSLHKLCERIEGMNSSKTKLELQKHLTTLTNQEQATIFEEVQKLRPRNEQRENELIISFLRCLYEEKQKEHIHIGEMKQTSQMAAENIGSELPPSATRFRLDMLKNKAKRSLTESLESILSRGNKARGLQEHSISVDLDSSLSSTLSNTSKEPSVCEKEALPISESSFKLLGSSEDLSSDSESHLPEEPAPLSPQQAFRRRANTLSHFPIECQEPPQPARGSPGVSQRKLMRYHSVSTETPHERKDFESKANHLGDSGGTPVKTRRHSWRQQIFLRVATPQKACDSSSRYEDYSELGELPPRSPLEPVCEDGPFGPPPEEKKRTSRELRELWQKAILQQILLLRMEKENQKLQASENDLLNKRLKLDYEEITPCLKEVTTVWEKMLSTPGRSKIKFDMEKMHSAVGQGVPRHHRGEIWKFLAEQFHLKHQFPSKQQPKDVPYKELLKQLTSQQHAILIDLGRTFPTHPYFSAQLGAGQLSLYNILKAYSLLDQEVGYCQGLSFVAGILLLHMSEEEAFKMLKFLMFDMGLRKQYRPDMIILQIQMYQLSRLLHDYHRDLYNHLEEHEIGPSLYAAPWFLTMFASQFPLGFVARVFDMIFLQGTEVIFKVALSLLGSHKPLILQHENLETIVDFIKSTLPNLGLVQMEKTINQVFEMDIAKQLQAYEVEYHVLQEELIDSSPLSDNQRMDKLEKTNSSLRKQNLDLLEQLQVANGRIQSLEATIEKLLSSESKLKQAMLTLELERSALLQTVEELRRRSAEPSDREPECTQPEPTGD

SEQ ID NO: 86984 - protein, 144 aa, Homo sapiens
  Payload ID: 17408
  Gene Symbol: TBC1D1
  Gene Name: TBC1 (tre-2/USP6, BUB2, cdc16) domain family, member 1
  ENSP ID: ENSP00000383994
MEPITFTARKHLLSNEVSVDFGLQLVGSLPVHSLTTMPMLPWVVAEVRRLSRQSTRKEPVTKQVRLCVSPSGLRCEPEPGRSQQWDPLIYSSIFECKPQRVHKLIHNSHDPSYFACLIKEDAVHRQSICYVFKADDQTKCSSSL

SEQ ID NO: 86985 - protein, 599 aa, Homo sapiens
  Payload ID: 17408
  Gene Symbol: TBC1D1
  Gene Name: TBC1 (tre-2/USP6, BUB2, cdc16) domain family, member 1
  ENSP ID: ENSP00000396877
MSPLFSWVAKVPEIISSIRQAGKIARQEELHCPSEFDDTFSKKFEVLFCGRVTVAHKKAPPALIDECIEKFNHVSGSRGSESPRPNPPHAAPTGSQEPVRRPMRKSFSQPGLRSLAFRKELQDGGLRSSGFFSSFEESDIENHLISGHNIVQPTDIEENRTMLFTIGQSEVYLISPDTKKIALEKNFKEISFCSQGIRHVDHFGFICRESSGGGGFHFVCYVFQCTNEALVDEIMMTLKQAFTVAAVQQTAKAPAQLCEGCPLQSLHKLCERIEGMNSSKTKLELQKHLTTLTNQEQATIFEEVQKLRPRNEQRENELIISFLRCLYEEKQKEHIHIGEMKQTSQMAAENIGSELPPSATRFRLDMLKNKAKRSLTESLESILSRGNKARGLQEHSISVDLDSSLSSTLSNTSKEPSVCEKEALPISESSFKLLGSSEDLSSDSESHLPEEPAPLSPQQAFRRRANTLSHFPIECQEPPQPARGSPGVSQRKLMRYHSVSTETPHERKDFESKANHLGDSGGTPVKTRRHSWRQQIFLRVATPQKACDSSSRYEDYSELGELPPRSPLEPVCEDGPFGPPPEEKKRTSRELRELWQKAI

SEQ ID NO: 86986 - protein, 252 aa, Homo sapiens
  Payload ID: 17408
  Gene Symbol: TBC1D1
  Gene Name: TBC1 (tre-2/USP6, BUB2, cdc16) domain family, member 1
  ENSP ID: ENSP00000397640
  MOD_RES (1)..(1): Any amino acid
XSILSRGNKARGLQEHSISVDLDSSLSSTLSNTSKEPSVCEKEALPISESSFKLLGSSEDLSSDSESHLPEEPAPLSPQQAFRRRANTLSHFPIECQEPPQPARGSPGVSQRKLMRYHSVSTETPHERNVDPSPVGESKHRPGQSSAPAPPPRLNPSASSPNFFKYLKHNSSGEQSGNAVPKRDFESKANHLGDSGGTPVKTRRHSWRQQIFLRVATPQKACDSSSRYEDYSELGELPPRSPLEPVCEDGPF

SEQ ID NO: 86987 - protein, 226 aa, Homo sapiens
  Payload ID: 17408
  Gene Symbol: TBC1D1
  Gene Name: TBC1 (tre-2/USP6, BUB2, cdc16) domain family, member 1
  ENSP ID: ENSP00000410167
SLSSTLSNTSKEPSVCEKEALPISESSFKLLGSSEDLSSDSESHLPEEPAPLSPQQAFRRRANTLSHFPIECQEPPQPARGSPGVSQRKLMRYHSVSTETPHERKDFESKANHLGDSGGTPVKTRRHSWRQQIFLRVATPQKACDSSSRYEEPHCGSPSLACTEDYSELGELPPRSPLEPVCEDGPFGPPPEEKKRTSRELRELWQKAILQQILLLRMEKENQKLQ

SEQ ID NO: 86988 - protein, 856 aa, Homo sapiens
  Payload ID: 17408
  Gene Symbol: TBC1D1
  Gene Name: TBC1 (tre-2/USP6, BUB2, cdc16) domain family, member 1
  ENSP ID: ENSP00000421641
  MOD_RES (1)..(1): Any amino acid
XCTNEALVDEIMMTLKQAFTVAAVQQTAKAPAQLCEGCPLQSLHKLCERIEGMNSSKTKLELQKHLTTLTNQEQATIFEEVQKLRPRNEQRENELIISFLRCLYEEKQKEHIHIGEMKQTSQMAAENIGSELPPSATRFRLDMLKNKAKRSLTESLESILSRGNKARGLQEHSISVDLDSSLSSTLSNTSKEPSVCEKEALPISESSFKLLGSSEDLSSDSESHLPEEPAPLSPQQAFRRRANTLSHFPIECQEPPQPARGSPGVSQRKLMRYHSVSTETPHERNISYRNALRKKLHSSSSVPNFLKFLAPVDENNTSDFMNTKRDFESKANHLGDSGGTPVKTRRHSWRQQIFLRVATPQKACDSSSRYEDYSELGELPPRSPLEPVCEDGPFGPPPEEKKRTSRELRELWQKAILQQILLLRMEKENQKLQASENDLLNKRLKLDYEEITPCLKEVTTVWEKMLSTPGRSKIKFDMEKMHSAVGQGVPRHHRGEIWKFLAEQFHLKHQFPSKQQPKDVPYKELLKQLTSQQHAILIDLGRTFPTHPYFSAQLGAGQLSLYNILKAYSLLDQEVGYCQGLSFVAGILLLHMSEEEAFKMLKFLMFDMGLRKQYRPDMIILQIQMYQLSRLLHDYHRDLYNHLEEHEIGPSLYAAPWFLTMFASQFPLGFVARVFDMIFLQGTEVIFKVALSLLGSHKPLILQHENLETIVDFIKSTLPNLGLVQMEKTINQVFEMDIAKQLQAYEVEYHVLQEELIDSSPLSDNQRMDKLEKTNSSLRKQNLDLLEQLQVANGRIQSLEATIEKLLSSESKLKQAMLTLELERSALLQTVEELRRRSAEPSDREPECTQPEPTGD

SEQ ID NO: 86989 - protein, 1159 aa, Homo sapiens
  Payload ID: 17408
  Gene Symbol: TBC1D1
  Gene Name: TBC1 (tre-2/USP6, BUB2, cdc16) domain family, member 1
  Uniprot ID: Q86TI0
  ENSP ID: ENSP00000423651
MEPITFTARKHLLSNEVSVDFGLQLVGSLPVHSLTTMPMLPWVVAEVRRLSRQSTRKEPVTKQVRLCVSPSGLRCEPEPGRSQQWDPLIYSSIFECKPQRVHKLIHNSHDPSYFACLIKEDAVHRQSICYVFKADDQTKVPEIISSIRQAGKIARQEELHCPSEFDDTFSKKFEVLFCGRVTVAHKKAPPALIDECIEKFNHVSGSRGSESPRPNPPHAAPTGSQEPVRRPMRKSFSQPGLRSLAFRKELQDGGLRSSGFFSSFEESDIENHLISGHNIVQPTDIEENRTMLFTIGQSEVYLISPDTKKIALEKNFKEISFCSQGIRHVDHFGFICRESSGGGGFHFVCYVFQCTNEALVDEIMMTLKQAFTVAAVQQTAKAPAQLCEGCPLQSLHKLCERIEGMNSSKTKLELQKHLTTLTNQEQATIFEEVQKLRPRNEQRENELIISFLRCLYEEKQKEHIHIGEMKQTSQMAAENIGSELPPSATRFRLDMLKNKAKRSLTESLESILSRGNKARGLQEHSISVDLDSSLSSTLSNTSKEPSVCEKEALPISESSFKLLGSSEDLSSDSESHLPEEPAPLSPQQAFRRRANTLSHFPIECQEPPQPARGSPGVSQRKLMRYHSVSTETPHERNVDPSPVGESKHRPGQSSAPAPPPRLNPSASSPNFFKYLKHNSSGEQSGNAVPKSISYRNALRKKLHSSSSVPNFLKFLAPVDENNTSDFMNTKRDFESKANHLGDSGGTPVKTRRHSWRQQIFLRVATPQKACDSSSRYEDYSELGELPPRSPLEPVCEDGPFGPPPEEKKRTSRELRELWQKAILQQILLLRMEKENQKLQASENDLLNKRLKLDYEEITPCLKEVTTVWEKMLSTPGRSKIKFDMEKMHSAVGQGVPRHHRGEIWKFLAEQFHLKHQFPSKQQPKDVPYKELLKQLTSQQHAILIDLGRTFPTHPYFSAQLGAGQLSLYNILKAYSLLDQEVGYCQGLSFVAGILLLHMSEEEAFKMLKFLMFDMGLRKQYRPDMIILQMEKTINQVFEMDIAKQLQAYEVEYHVLQEELIDSSPLSDNQRMDKLEKTNSSLRKQNLDLLEQLQVANGRIQSLEATIEKLLSSESKLKQAMLTLELERSALLQTVEELRRRSAEPSDREPECTQPEPTGD

SEQ ID NO: 86990 - protein, 177 aa, Homo sapiens
  Payload ID: 17408
  Gene Symbol: TBC1D1
  Gene Name: TBC1 (tre-2/USP6, BUB2, cdc16) domain family, member 1
  ENSP ID: ENSP00000425655
  MOD_RES (1)..(1): Any amino acid
XMNSSKTKLELQKHLTTLTNQEQATIFEEVQKLRPRNEQRENELIISFLRCLYEEKQKEHIHIGEMKQEPSVCEKEALPISESSFKLLGSSEDLSSDSESHLPEEPAPLSPQQAFRRRANTLSHFPIECQEPPQPARGSPGVSQRKLMRYHSVSTETPHERKDFESKANHLGDSGGT

SEQ ID NO: 86991 - protein, 432 aa, Homo sapiens
  Payload ID: 17408
  Gene Symbol: TBC1D1
  Gene Name: TBC1 (tre-2/USP6, BUB2, cdc16) domain family, member 1
  ENSP ID: ENSP00000478039
MEKENQKLQASENDLLNKRLKLDYEEITPCLKEVTTVWEKMLSTPGRSKIKFDMEKMHSAVGQGVPRHHRGEIWKFLAEQFHLKHQFPSKQQPKDVPYKELLKQLTSQQHAILIDLGRTFPTHPYFSAQLGAGQLSLYNILKAYSLLDQEVGYCQGLSFVAGILLLHMSEEEAFKMLKFLMFDMGLRKQYRPDMIILQIQMYQLSRLLHDYHRDLYNHLEEHEIGPSLYAAPWFLTMFASQFPLGFVARVFDMIFLQGTEVIFKVALSLLGSHKPLILQHENLETIVDFIKSTLPNLGLVQMEKTINQVFEMDIAKQLQAYEVEYHVLQEELIDSSPLSDNQRMDKLEKTNSSLRKQNLDLLEQLQVANGRIQSLEATIEKLLSSESKLKQAMLTLELERSALLQTVEELRRRSAEPSDREPECTQPEPTGD

SEQ ID NO: 86992 - protein, 893 aa, Homo sapiens
  Payload ID: 17409
  Gene Symbol: TBCK
  Gene Name: TBC1 domain containing kinase
  Uniprot ID: Q8TEA7
  ENSP ID: ENSP00000273980
MFPLKDAEMGAFTFFASALPHDVCGSNGLPLTPNSIKILGRFQILKTITHPRLCQYVDISRGKHERLVVVAEHCERSLEDLLRERKPVSCSTVLCIAFEVLQGLQYMNKHGIVHRALSPHNILLDRKGHIKLAKFGLYHMTAHGDDVDFPIGYPSYLAPEVIAQGIFKTTDHMPSKKPLPSGPKSDVWSLGIILFELCVGRKLFQSLDISERLKFLLTLDCVDDTLIVLAEEHGCLDIIKELPETVIDLLNKCLTFHPSKRPTPDQLMKDKVFSEVSPLYTPFTKPASLFSSSLRCADLTLPEDISQLCKDINNDYLAERSIEEVYYLWCLAGGDLEKELVNKEIIRSKPPICTLPNFLFEDGESFGQGRDRSSLLDDTTVTLSLCQLRNRLKDVGGEAFYPLLEDDQSNLPHSNSNNELSAAATLPLIIREKDTEYQLNRIILFDRLLKAYPYKKNQIWKEARVDIPPLMRGLTWAALLGVEGAIHAKYDAIDKDTPIPTDRQIEVDIPRCHQYDELLSSPEGHAKFRRVLKAWVVSHPDLVYWQGLDSLCAPFLYLNFNNEALAYACMSAFIPKYLYNFFLKDNSHVIQEYLTVFSQMIAFHDPELSNHLNEIGFIPDLYAIPWFLTMFTHVFPLHKIFHLWDTLLLGNSSFPFCIGVAILQQLRDRLLANGFNECILLFSDLPEIDIERCVRESINLFCWTPKSATYRQHAQPPKPSSDSSGGRSSAPYFSAECPDPPKTDLSRESIPLNDLKSEVSPRISAEDLIDLCELTVTGHFKTPSKKTKSSKPKLLVVDIRNSEDFIRGHISGSINIPFSAAFTAEGELTQGPYTAMLQNFKGKVIVIVGHVAKHTAEFAAHLVKMKYPRICILDGGINKIKPTGLLTIPSPQI

SEQ ID NO: 86993 - protein, 830 aa, Homo sapiens
  Payload ID: 17409
  Gene Symbol: TBCK
  Gene Name: TBC1 domain containing kinase
  Uniprot ID: Q8TEA7
  ENSP ID: ENSP00000355338
MFPLKDAEMGAFTFFASALPHDVCGSNGLPLTPNSIKILGRFQILKTITHPRLCQYVDISRGKHERLVVVAEHCERSLEDLLRERKPVRYPSYLAPEVIAQGIFKTTDHMPSKKPLPSGPKSDVWSLGIILFELCVGRKLFQSLDISERLKFLLTLDCVDDTLIVLAEEHGCLDIIKELPETVIDLLNKCLTFHPSKRPTPDQLMKDKVFSEVSPLYTPFTKPASLFSSSLRCADLTLPEDISQLCKDINNDYLAERSIEEVYYLWCLAGGDLEKELVNKEIIRSKPPICTLPNFLFEDGESFGQGRDRSSLLDDTTVTLSLCQLRNRLKDVGGEAFYPLLEDDQSNLPHSNSNNELSAAATLPLIIREKDTEYQLNRIILFDRLLKAYPYKKNQIWKEARVDIPPLMRGLTWAALLGVEGAIHAKYDAIDKDTPIPTDRQIEVDIPRCHQYDELLSSPEGHAKFRRVLKAWVVSHPDLVYWQGLDSLCAPFLYLNFNNEALAYACMSAFIPKYLYNFFLKDNSHVIQEYLTVFSQMIAFHDPELSNHLNEIGFIPDLYAIPWFLTMFTHVFPLHKIFHLWDTLLLGNSSFPFCIGVAILQQLRDRLLANGFNECILLFSDLPEIDIERCVRESINLFCWTPKSATYRQHAQPPKPSSDSSGGRSSAPYFSAECPDPPKTDLSRESIPLNDLKSEVSPRISAEDLIDLCELTVTGHFKTPSKKTKSSKPKLLVVDIRNSEDFIRGHISGSINIPFSAAFTAEGELTQGPYTAMLQNFKGKVIVIVGHVAKHTAEFAAHLVKMKYPRICILDGGINKIKPTGLLTIPSPQI

SEQ ID NO: 86994 - protein, 854 aa, Homo sapiens
  Payload ID: 17409
  Gene Symbol: TBCK
  Gene Name: TBC1 domain containing kinase
  Uniprot ID: Q8TEA7
  ENSP ID: ENSP00000378196
MFPLKDAEMGAFTFFASALPHDVCGSNGLPLTPNSIKILGRFQILKTITHPRLCQYVDISRGKHERLVVVAEHCERSLEDLLRERKPVSCSTVLCIAFEVLQGLQYMNKHGIVHRALSPHNILLDRKGHIKLAKFGLYHMTAHGDDVDFPIGYPSYLAPEGRKLFQSLDISERLKFLLTLDCVDDTLIVLAEEHGCLDIIKELPETVIDLLNKCLTFHPSKRPTPDQLMKDKVFSEVSPLYTPFTKPASLFSSSLRCADLTLPEDISQLCKDINNDYLAERSIEEVYYLWCLAGGDLEKELVNKEIIRSKPPICTLPNFLFEDGESFGQGRDRSSLLDDTTVTLSLCQLRNRLKDVGGEAFYPLLEDDQSNLPHSNSNNELSAAATLPLIIREKDTEYQLNRIILFDRLLKAYPYKKNQIWKEARVDIPPLMRGLTWAALLGVEGAIHAKYDAIDKDTPIPTDRQIEVDIPRCHQYDELLSSPEGHAKFRRVLKAWVVSHPDLVYWQGLDSLCAPFLYLNFNNEALAYACMSAFIPKYLYNFFLKDNSHVIQEYLTVFSQMIAFHDPELSNHLNEIGFIPDLYAIPWFLTMFTHVFPLHKIFHLWDTLLLGNSSFPFCIGVAILQQLRDRLLANGFNECILLFSDLPEIDIERCVRESINLFCWTPKSATYRQHAQPPKPSSDSSGGRSSAPYFSAECPDPPKTDLSRESIPLNDLKSEVSPRISAEDLIDLCELTVTGHFKTPSKKTKSSKPKLLVVDIRNSEDFIRGHISGSINIPFSAAFTAEGELTQGPYTAMLQNFKGKVIVIVGHVAKHTAEFAAHLVKMKYPRICILDGGINKIKPTGLLTIPSPQI

SEQ ID NO: 86995 - protein, 893 aa, Homo sapiens; identical to SEQ ID NO: 86992
  Payload ID: 17409
  Gene Symbol: TBCK
  Gene Name: TBC1 domain containing kinase
  Uniprot ID: Q8TEA7
  ENSP ID: ENSP00000378198

SEQ ID NO: 86996 - protein, 893 aa, Homo sapiens; identical to SEQ ID NO: 86992
  Payload ID: 17409
  Gene Symbol: TBCK
  Gene Name: TBC1 domain containing kinase
  Uniprot ID: Q8TEA7
  ENSP ID: ENSP00000405847

SEQ ID NO: 86997 - protein, 159 aa, Homo sapiens
  Payload ID: 17409
  Gene Symbol: TBCK
  Gene Name: TBC1 domain containing kinase
  ENSP ID: ENSP00000420985
MFPLKDAEMGAFTFFASALPHDVCGSNGLPLTPNSIKILGRFQILKTITHPRLCQYVDISRGKHERLVVVAEHCERSLEDLLRERKPVSCSTVLCIAFEVLQGLQYMNKHGIVHRALSPHNILLDRKGHIKLAKFGLYHMTAHGDDVDFPIGYPSYLAP

SEQ ID NO: 86998 - protein, 153 aa, Homo sapiens
  Payload ID: 17409
  Gene Symbol: TBCK
  Gene Name: TBC1 domain containing kinase
  ENSP ID: ENSP00000421182
MFPLKDAEMGAFTFFASALPHDVCGSNGLPLTPNSIKILGRFQILKTITHPRLCQYVDISRGKHERLVVVAEHCERSLEDLLRERKPVSCSTVLCIAFEVLQGLQYMNKHGIVHRALSPHNILLDRKGHIKLAKFGLYHMTAHGDDVDFPIGM

SEQ ID NO: 86999 - protein, 139 aa, Homo sapiens
  Payload ID: 17409
  Gene Symbol: TBCK
  Gene Name: TBC1 domain containing kinase
  ENSP ID: ENSP00000422160
  MOD_RES (1)..(1): Any amino acid
XTPDQLMKDKVFSEVSPLYTPFTKPASLFSSSLRCADLTLPEDISQLCKDINNDYLAERSIEEVYYLWCLAGGDLEKELVNKEIIRSKPPICTLPNFLFEDGESFGQGRDRSSLLDDTTVTLSLCQLRNEQTFCLQVGS

SEQ ID NO: 87000 - protein, 85 aa, Homo sapiens
  Payload ID: 17409
  Gene Symbol: TBCK
  Gene Name: TBC1 domain containing kinase
  ENSP ID: ENSP00000423092
  MOD_RES (1)..(1): Any amino acid
XYPSYLAPEVIAQGIFKTTDHMPSKKPLPSGPKSDVWSLGIILFELCVMRKVKLQVVLSSLPNLYNYLMVEESNLAHNHCSTHKC

SEQ ID NO: 87001 - protein, 68 aa, Homo sapiens
  Payload ID: 17409
  Gene Symbol: TBCK
  Gene Name: TBC1 domain containing kinase
  ENSP ID: ENSP00000423637
MFPLKDAEMGAFTFFASALPHDVCGSNGLPLTPNSIKILGRFQILKTITHPRLCQYVDISRGKHERLV

SEQ ID NO: 87002 - protein, 56 aa, Homo sapiens
  Payload ID: 17409
  Gene Symbol: TBCK
  Gene Name: TBC1 domain containing kinase
  ENSP ID: ENSP00000423834
MRGLTWAALLGVEGAIHAKYDAIDKDTPIPTDRQIEVDIPRCHQYDELLSSPEGHA

SEQ ID NO: 87003 - protein, 105 aa, Homo sapiens
  Payload ID: 17409
  Gene Symbol: TBCK
  Gene Name: TBC1 domain containing kinase
  ENSP ID: ENSP00000425197
MFPLKDAEMGAFTFFASALPHDVCGSNGLPLTPNSIKILGRFQILKTITHPRLCQYVDISRGKHERLVVVAEHCERSLEDLLRERKPVSCSTVLCIAFEVLQGLQ

SEQ ID NO: 87004 - protein, 24 aa, Homo sapiens
  Payload ID: 17409
  Gene Symbol: TBCK
  Gene Name: TBC1 domain containing kinase
  ENSP ID: ENSP00000426093
  MOD_RES (1)..(1): Any amino acid
XLFQSLDISERLKFLLTLGQPQIN

SEQ ID NO: 87005 - protein, 508 aa, Homo sapiens
  Payload ID: 17410
  Gene Symbol: TBC1D10A
  Gene Name: TBC1 domain family, member 10A
  Uniprot ID: Q9BXI6
  ENSP ID: ENSP00000215790
MAKSNGENGPRAPAAGESLSGTRESLAQGPDAATTDELSSLGSDSEANGFAERRIDKFGFIVGSQGAEGALEEVPLEVLRQRESKWLDMLNNWDKWMAKKHKKIRLRCQKGIPPSLRGRAWQYLSGGKVKLQQNPGKFDELDMSPGDPKWLDVIERDLHRQFPFHEMFVSRGGHGQQDLFRVLKAYTLYRPEEGYCQAQAPIAAVLLMHMPAEQAFWCLVQICEKYLPGYYSEKLEAIQLDGEILFSLLQKVSPVAHKHLSRQKIDPLLYMTEWFMCAFSRTLPWSSVLRVWDMFFCEGVKIIFRVGLVLLKHALGSPEKVKACQGQYETIERLRSLSPKIMQEAFLVQEVVELPVTERQIEREHLIQLRRWQETRGELQCRSPPRLHGAKAILDAEPGPRPALQPSPSIRLPLDAPLPGSKAKPKPPKQAQKEQRKQMKGRGQLEKPPAPNQAMVVAAAGDACPPQHVPPKDSAPKDSAPQDLAPQVSAHHRSQESLTSQESEDTYL

SEQ ID NO: 87006 - protein, 154 aa, Homo sapiens
  Payload ID: 17410
  Gene Symbol: TBC1D10A
  Gene Name: TBC1 domain family, member 10A
  ENSP ID: ENSP00000377484
MLNNWDKWMAKKHKKIRLRCQKGIPPSLRGRAWQYLSGGKVKLQQNPGKFDELDMSPGDPKWLDVIERDLHRQFPFHEMFVSRGGHGQQDLFRVLKAYTLYRPEEGYCQAQAPIAAVLLMHMPAEQAFWCLVQICEKYLPGYYSEKLEAIQLDG

SEQ ID NO: 87007 - protein, 515 aa, Homo sapiens
  Payload ID: 17410
  Gene Symbol: TBC1D10A
  Gene Name: TBC1 domain family, member 10A
  Uniprot ID: Q9BXI6
  ENSP ID: ENSP00000384996
MAKSNGENGPRAPAAGESLSGTRESLAQGPDAATTDELSSLGSDSEANGFAERRIDKFGFIVGSQGAEGAPCPLLHRLEEVPLEVLRQRESKWLDMLNNWDKWMAKKHKKIRLRCQKGIPPSLRGRAWQYLSGGKVKLQQNPGKFDELDMSPGDPKWLDVIERDLHRQFPFHEMFVSRGGHGQQDLFRVLKAYTLYRPEEGYCQAQAPIAAVLLMHMPAEQAFWCLVQICEKYLPGYYSEKLEAIQLDGEILFSLLQKVSPVAHKHLSRQKIDPLLYMTEWFMCAFSRTLPWSSVLRVWDMFFCEGVKIIFRVGLVLLKHALGSPEKVKACQGQYETIERLRSLSPKIMQEAFLVQEVVELPVTERQIEREHLIQLRRWQETRGELQCRSPPRLHGAKAILDAEPGPRPALQPSPSIRLPLDAPLPGSKAKPKPPKQAQKEQRKQMKGRGQLEKPPAPNQAMVVAAAGDACPPQHVPPKDSAPKDSAPQDLAPQVSAHHRSQESLTSQESEDTYL

SEQ ID NO: 87008 - protein, 420 aa, Homo sapiens
  Payload ID: 17410
  Gene Symbol: TBC1D10A
  Gene Name: TBC1 domain family, member 10A
  ENSP ID: ENSP00000385050
MLNNWDKWMAKKHKKIRLRCQKGIPPSLRGRAWQYLSGGKVKLQQNPGKFDELDMSPGDPKWLDVIERDLHRQFPFHEMFVSRGGHGQQDLFRVLKAYTLYRPEEGYCQAQAPIAAVLLMHMPAEQAFWCLVQICEKYLPGYYSEKLEAIQLDGEILFSLLQKVSPVAHKHLSRQKIDPLLYMTEWFMCAFSRTLPWSSVLRVWDMFFCEGVKIIFRVGLVLLKHALGSPEKVKACQGQYETIERLRSLSPKIMQEAFLVQEVVELPVTERQIEREHLIQLRRWQETRGELQCRSPPRLHGAKAILDAEPGPRPALQPSPSIRLPLDAPLPGSKAKPKPPKQAQKEQRKQMKGRGQLEKPPAPNQAMVVAAAGDACPPQHVPPKDSAPKDSAPQDLAPQVSAHHRSQESLTSQESEDTYL

SEQ ID NO: 87009 - protein, 95 aa, Homo sapiens
  Payload ID: 17410
  Gene Symbol: TBC1D10A
  Gene Name: TBC1 domain family, member 10A
  ENSP ID: ENSP00000389994
MAKSNGENGPRAPAAGESLSGTRESLAQGPDAATTDELSSLGSDSEANGFAERRIDKFGFIVGSQGAEGAFVCGAKRASRLLCGAVLGSTCQEAR

SEQ ID NO: 87010 - protein, 296 aa, Homo sapiens
  Payload ID: 17410
  Gene Symbol: TBC1D10A
  Gene Name: TBC1 domain family, member 10A
  ENSP ID: ENSP00000400620
MERLEEVPLEVLRQRESKWLDMLNNWDKWMAKKHKKIRLRCQKGIPPSLRGRAWQYLSGGKVKLQQNPGKFDELDMSPGDPKWLDVIERDLHRQFPFHEMFVSRGGHGQQDLFRVLKAYTLYRPEEGYCQAQAPIAAVLLMHMPAEQAFWCLVQICEKYLPGYYSEKLEAIQLDGEILFSLLQKVSPVAHKHLSRQKIDPLLYMTEWFMCAFSRTLPWSSVLRVWDMFFCEGVKIIFRVGLVLLKHALGSPEKVKACQGQYETIERLRSLSPKIMQEAFLVQEGQLGGTCVTSFYT

SEQ ID NO: 87011 - protein, 808 aa, Homo sapiens
  Payload ID: 17411
  Gene Symbol: TBC1D10B
  Gene Name: TBC1 domain family, member 10B
  Uniprot ID: Q4KMP7
  ENSP ID: ENSP00000386538
METGTAPLVAPPRRHGAPAAPSPPPRGSRAGPVVVVAPGPPVTTATSAPVTLVAPGEARPAWVPGSAETSAPAPAPAPAPAPAVTGSTVVVLTLEASPEAPKPQLPSGPESPEPAAVAGVETSRALAAGADSPKTEEARPSPAPGPGTPTGTPTRTPSRTAPGALTAKPPLAPKPGTTVASGVTARSASGQVTGGHGAAAATSASAGQAPEDPSGPGTGPSGTCEAPVAVVTVTPAPEPAENSQDLGSTSSLGPGISGPRGQAPDTLSYLDSVSLMSGTLESLADDVSSMGSDSEINGLALRKTDKYGFLGGSQYSGSLESSIPVDVARQRELKWLDMFSNWDKWLSRRFQKVKLRCRKGIPSSLRAKAWQYLSNSKELLEQNPGKFEELERAPGDPKWLDVIEKDLHRQFPFHEMFAARGGHGQQDLYRILKAYTIYRPDEGYCQAQAPVAAVLLMHMPAEQAFWCLVQICDKYLPGYYSAGLEAIQLDGEIFFALLRRASPLAHRHLRRQRIDPVLYMTEWFMCIFARTLPWASVLRVWDMFFCEGVKIIFRVALVLLRHTLGSVEKLRSCQGMYETMEQLRNLPQQCMQEDFLVHEVTNLPVTEALIERENAAQLKKWRETRGELQYRPSRRLHGSRAIHEERRRQQPPLGPSSSLLSLPGLKSRGSRAAGGAPSPPPPVRRASAGPAPGPVVTAEGLHPSLPSPTGNSTPLGSSKETRKQEKERQKQEKERQKQEKEREKERQKQEKEREKQEKEREKQEKERQKQEKKAQGRKLSLRRKADGPPGPHDGGDRPSAEARQDAYF

SEQ ID NO: 87012 - protein, 184 aa, Homo sapiens
  Payload ID: 17411
  Gene Symbol: TBC1D10B
  Gene Name: TBC1 domain family, member 10B
  ENSP ID: ENSP00000456663
VKLRCRKGIPSSLRAKAWQYLSNSKELLEQNPGKFEELERAPGDPKWLDVIEKDLHRQFPFHEMFAARGGHGQQDLYRILKAYTIYRPDEGYCQAQAPVAAVLLMHMPAEQAFWCLVQICDKYLPGYYSAGLALRSSSGWPWSCCATRWAQWRSCAPAKACMRPWSSCVTCPSSACRKTSWCMR

SEQ ID NO: 87013 - protein, 310 aa, Homo sapiens
  Payload ID: 17412
  Gene Symbol: TBC1D10C
  Gene Name: TBC1 domain family, member 10C
  Uniprot ID: Q8IV04
  ENSP ID: ENSP00000310193
MAQALGEDLVQPPELQDDSSSLGSDSELSGPGPYRQADRYGFIGGSSAEPGPGHPPADLIRQREMKWVEMTSHWEKTMSRRYKKVKMQCRKGIPSALRARCWPLLCGAHVCQKNSPGTYQELAEAPGDPQWMETIGRDLHRQFPLHEMFVSPQGHGRGSCRCSRPTPCIDRSRATARPRGPWLLCCSCTCPQRRPSGAWCRSVRSTSLGTTGPTWCQSTVPCGADTGAPGAGHCRAARGLPWPPGDTGSPSSHPPRAAAGGGLHVTGAQRGAVRAGPAAGDQGPAGPAARFRAGTPAPATGPPRRGPSHL

SEQ ID NO: 87014 - protein, 310 aa, Homo sapiens; identical to SEQ ID NO: 87013
  Payload ID: 17412
  Gene Symbol: TBC1D10C
  Gene Name: TBC1 domain family, member 10C
  Uniprot ID: Q8IV04
  ENSP ID: ENSP00000435543

SEQ ID NO: 87015 - protein, 219 aa, Homo sapiens
  Payload ID: 17412
  Gene Symbol: TBC1D10C
  Gene Name: TBC1 domain family, member 10C
  ENSP ID: ENSP00000435829
MAQALGEDLVQPPELQDDSSSLGSDSELSGPGPYRQADRYGFIGGSSAEPGPGHPPADLIRQREMKWVEMTSHWEKTMSRRYKKVKMQCRKGIPSALRARCWPLLCGAHVCQKNSPGTYQELAEAPGDPQWMETIGRDLHRQFPLHEMFVSPQGHGQQGLLQVLKAYTLYRPEQGYCQAQGPVAAVLLMHLPPEEAFWCLVQICEVYLPGYYGPHMVRG

SEQ ID NO: 87016 - protein, 446 aa, Homo sapiens
  Payload ID: 17412
  Gene Symbol: TBC1D10C
  Gene Name: TBC1 domain family, member 10C
  Uniprot ID: Q8IV04
  ENSP ID: ENSP00000443654
MAQALGEDLVQPPELQDDSSSLGSDSELSGPGPYRQADRYGFIGGSSAEPGPGHPPADLIRQREMKWVEMTSHWEKTMSRRYKKVKMQCRKGIPSALRARCWPLLCGAHVCQKNSPGTYQELAEAPGDPQWMETIGRDLHRQFPLHEMFVSPQGHGQQGLLQVLKAYTLYRPEQGYCQAQGPVAAVLLMHLPPEEAFWCLVQICEVYLPGYYGPHMEAVRLDAEVFMALLRRLLPHVHKHLQQVGVGPLLYLPEWFLCLFARSLPFPTVLRVWDAFLSEGARVLFRVGLTLVRLALGTAEQRGACPGLLETLGALRAIPPAQLQEEAFMSQVHSVVLSERDLQREIKAQLAQLPDSAPGPPPRPQVRLAGAQAIFEAQQLAGVRRGAKPEVPRIVVQPPEEPRPPRRKPQTRGKTFHGLLTRARGPPIEGPPRPQRGSTSFLDTRF

SEQ ID NO: 87017 - protein, 775 aa, Homo sapiens
  Payload ID: 17413
  Gene Symbol: TBC1D12
  Gene Name: TBC1 domain family, member 12
  Uniprot ID: O60347
  ENSP ID: ENSP00000225235
MVGPEDAGACSGRNPKLLPVPAPDPVGQDRKVIRATGGFGGGVGAVEPPEEADEEEEADEEEETPPRQLLQRYLAAAGEQLEPGLCYCPLPAGQAGAPPPSAAPRSDACLLGSGSKHRGAEVADGRAPRHEGMTNGDSGFLPGRDCRDLEEARGLARAGGRESRRRRPYGRLRLEGPGDEDADGAGSPSDWASPLEDPLRSCCLVAADAQEPEGAGSDSGDSPASSCSSSEDSEQRGVGAGGPEEGAPPATSAERTNGGAEPRLGFSDIHFNSRNTFQVSRGQSARDHLPPAGPPVPLPAAEQGPAGASARARRSGGFADFFTRNLFPKRTKELKSVVHSAPGWKLFGKVPPRENLQKTSKIIQQEYEARTGRTCKPPPQSSRRKNFEFEPLSTTALILEDRPSNLPAKSVEEALRHRQEYDEMVAEAKKREIKEAHKRKRIMKERFKQEENIASAMVIWINEILPNWEVMRSTRRVRELWWQGLPPSVRGKVWSLAVGNELNITPELYEIFLSRAKERWKSFSETSSENDTEGVSVADREASLELIKLDISRTFPSLYIFQKGGPYHDVLHSILGAYTCYRPDVGYVQGMSFIAAVLILNLEEADAFIAFANLLNKPCQLAFFRVDHSMMLKYFATFEVFFEENLSKLFLHFKSYSLTPDIYLIDWIFTLYSKSLPLDLACRVWDVFCRDGEEFLFRTGLGILRLYEDILLQMDFIHIAQFLTKLPEDITSEKLFSCIAAIQMQNSTKKWTQVFASVMKDIKEGDKNSSPALKS

SEQ ID NO: 87018 - protein, 275 aa, Homo sapiens
  Payload ID: 17414
  Gene Symbol: TBC1D13
  Gene Name: TBC1 domain family, member 13
  Uniprot ID: Q9NVG8
  ENSP ID: ENSP00000223865
MSSLHKSRIADFQDVLKEPSIALEKLRELSFSGIPCEGGLRCLCWKILLNYLPLERASWTSILAKQRELYAQFLREMIIQPGIAKANMGVSREDVTFEDHPLNPNPDSRWNTYFKDNEVLLQIDKDVRRLCPDISFFQRATDYPCLLILDPQNEFETLRKRVEQTTLKSQTVARNRSGVTNQEQNIKPQFFAFRWLTLLLSQEFLLPDVIRIWDSLFADDNRFDFLLLVCCAMLMLIREQLLEGDFTVNMRLLQDYPITDVCQILQKAKELQDSK

SEQ ID NO: 87019 - protein, 400 aa, Homo sapiens
  Payload ID: 17414
  Gene Symbol: TBC1D13
  Gene Name: TBC1 domain family, member 13
  Uniprot ID: Q9NVG8
  ENSP ID: ENSP00000361731
MSSLHKSRIADFQDVLKEPSIALEKLRELSFSGIPCEGGLRCLCWKILLNYLPLERASWTSILAKQRELYAQFLREMIIQPGIAKANMGVSREDVTFEDHPLNPNPDSRWNTYFKDNEVLLQIDKDVRRLCPDISFFQRATDYPCLLILDPQNEFETLRKRVEQTTLKSQTVARNRSGVTNMSSPHKNSVPSSLNEYEVLPNGCEAHWEVVERILFIYAKLNPGIAYVQGMNEIVGPLYYTFATDPNSEWKEHAEADTFFCFTNLMAEIRDNFIKSLDDSQCGITYKMEKVYSTLKDKDVELYLKLQEQNIKPQFFAFRWLTLLLSQEFLLPDVIRIWDSLFADDNRFDFLLLVCCAMLMLIREQLLEGDFTVNMRLLQDYPITDVCQILQKAKELQDSK

SEQ ID NO: 87020 - protein, 465 aa, Homo sapiens
  Payload ID: 17415
  Gene Symbol: TBC1D14
  Gene Name: TBC1 domain family, member 14
  ENSP ID: ENSP00000386343
MMAISPALLFMDRNLLARKQSARLDKHNDLGWKLFGKAPLRENAQKDSKRIQKEYEDKAGRPSKPPSPKQNVRKNLDFEPLSTTALILEDRPANLPAKPAEEAQKHRQQYEEMVVQAKKRELKEAQRRKKQLEERCRVEESIGNAVLTWNNEILPNWETMWCSRKVRDLWWQGIPPSVRGKVWSLAIGNELNITHELFDICLARAKERWRSLSTGGSEVENEDAGFSAADREASLELIKLDISRTFPNLCIFQQGGPYHDMLHSILGAYTCYRPDVGYVQGMSFIAAVLILNLDTADAFIAFSNLLNKPCQMAFFRVDHGLMLTYFAAFEVFFEENLPKLFAHFKKNNLTPDIYLIDWIFTLYSKSLPLDLACRIWDVFCRDGEEFLFRTALGILKLFEDILTKMDFIHMAQFLTRLPEDLPAEELFASIATIQMQSRNKKWAQVLTALQKDSREMEKGSPSLRH

SEQ ID NO: 87021 - protein, 693 aa, Homo sapiens
  Payload ID: 17415
  Gene Symbol: TBC1D14
  Gene Name: TBC1 domain family, member 14
  Uniprot ID: Q9P2M4
  ENSP ID: ENSP00000386921
MTDGKLSTSTNGVAFMGILDGRPGNPLQNLQHVNLKAPRLLSAPEYGPKLKLRALEDRHSLQSVDSGIPTLEIGNPEPVPCSAVHVRRKQSDSDLIPERAFQSACALPSCAPPAPSSTEREQSVRKSSTFPRTGYDSVKLYSPTSKALTRSDDVSVCSVSSLGTELSTTLSVSNEDILDLVVTSSSSAIVTLENDDDPQFTNVTLSSIKETRGLHQQDCVHEAEEGSKLKILGPFSNFFARNLLARKQSARLDKHNDLGWKLFGKAPLRENAQKDSKRIQKEYEDKAGRPSKPPSPKQNVRKNLDFEPLSTTALILEDRPANLPAKPAEEAQKHRQQYEEMVVQAKKRELKEAQRRKKQLEERCRVEESIGNAVLTWNNEILPNWETMWCSRKVRDLWWQGIPPSVRGKVWSLAIGNELNITHELFDICLARAKERWRSLSTGGSEVENEDAGFSAADREASLELIKLDISRTFPNLCIFQQGGPYHDMLHSILGAYTCYRPDVGYVQGMSFIAAVLILNLDTADAFIAFSNLLNKPCQMAFFRVDHGLMLTYFAAFEVFFEENLPKLFAHFKKNNLTPDIYLIDWIFTLYSKSLPLDLACRIWDVFCRDGEEFLFRTALGILKLFEDILTKMDFIHMAQFLTRLPEDLPAEELFASIATIQMQSRNKKWAQVLTALQKDSREMEKGSPSLRH

SEQ ID NO: 87022 - protein, 413 aa, Homo sapiens
  Payload ID: 17415
  Gene Symbol: TBC1D14
  Gene Name: TBC1 domain family, member 14
  Uniprot ID: Q9P2M4
  ENSP ID: ENSP00000388886
MEYEDKAGRPSKPPSPKQNVRKNLDFEPLSTTALILEDRPANLPAKPAEEAQKHRQQYEEMVVQAKKRELKEAQRRKKQLEERCRVEESIGNAVLTWNNEILPNWETMWCSRKVRDLWWQGIPPSVRGKVWSLAIGNELNITHELFDICLARAKERWRSLSTGGSEVENEDAGFSAADREASLELIKLDISRTFPNLCIFQQGGPYHDMLHSILGAYTCYRPDVGYVQGMSFIAAVLILNLDTADAFIAFSNLLNKPCQMAFFRVDHGLMLTYFAAFEVFFEENLPKLFAHFKKNNLTPDIYLIDWIFTLYSKSLPLDLACRIWDVFCRDGEEFLFRTALGILKLFEDILTKMDFIHMAQFLTRLPEDLPAEELFASIATIQMQSRNKKWAQVLTALQKDSREMEKGSPSLRH

SEQ ID NO: 87023 - protein, 200 aa, Homo sapiens
  Payload ID: 17415
  Gene Symbol: TBC1D14
  Gene Name: TBC1 domain family, member 14
  ENSP ID: ENSP00000389082
LPNWETMWCSRKVRDLWWQGIPPSVRGKVWSLAIGNELNITHELFDICLARAKERWRSLSTGGSEVENEDAGFSAADREASLELIKLDISRTFPNLCIFQQVLIFVDFRVGLQKSFQKRKERESTKLQQLWSWCLGGPYHDMLHSILGAYTCYRPDVGYVQGMSFIAAVLILNLDTADAFIAFSNLLNKPCQMAFFRVDH

SEQ ID NO: 87024 - protein, 693 aa, Homo sapiens; identical to SEQ ID NO: 87021
  Payload ID: 17415
  Gene Symbol: TBC1D14
  Gene Name: TBC1 domain family, member 14
  Uniprot ID: Q9P2M4
  ENSP ID: ENSP00000404041

SEQ ID NO: 87025 - protein, 353 aa, Homo sapiens
  Payload ID: 17415
  Gene Symbol: TBC1D14
  Gene Name: TBC1 domain family, member 14
  ENSP ID: ENSP00000405875
MVVQAKKRELKEAQRRKKQLEERCRVEESIGNAVLTWNNEILPNWETMWCSRKVRDLWWQGIPPSVRGKVWSLAIGNELNITHELFDICLARAKERWRSLSTGGSEVENEDAGFSAADREASLELIKLDISRTFPNLCIFQQGGPYHDMLHSILGAYTCYRPDVGYVQGMSFIAAVLILNLDTADAFIAFSNLLNKPCQMAFFRVDHGLMLTYFAAFEVFFEENLPKLFAHFKKNNLTPDIYLIDWIFTLYSKSLPLDLACRIWDVFCRDGEEFLFRTALGILKLFEDILTKMDFIHMAQFLTRLPEDLPAEELFASIATIQMQSRNKKWAQVLTALQKDSREMEKGSPSLRH

SEQ ID NO: 87026 - protein, 56 aa, Homo sapiens
  Payload ID: 17415
  Gene Symbol: TBC1D14
  Gene Name: TBC1 domain family, member 14
  ENSP ID: ENSP00000411760
MTDGKLSTSTNGVAFMGILDGRPGNPLQNLQHVNLKAPRLLSAPEYGPKLKLRALE

SEQ ID NO: 87027 - protein, 127 aa, Homo sapiens
  Payload ID: 17415
  Gene Symbol: TBC1D14
  Gene Name: TBC1 domain family, member 14
  ENSP ID: ENSP00000414951
MTDGKLSTSTNGVAFMGILDGRPGNPLQNLQHVNLKAPRLLSAPEYGPKLKLRALEDRHSLQSVDSGIPTLEIGNPEPVPCSAVHVRRKQSDSDLIPERAFQSACALPSCAPPAPSSTEREQSVRKS

SEQ ID NO: 87028 - protein, 682 aa, Homo sapiens
  Payload ID: 17416
  Gene Symbol: TBC1D15
  Gene Name: TBC1 domain family, member 15
  Uniprot ID: Q8TC07
  ENSP ID: ENSP00000318262
MCPGLYPYSSLLEYGRSMIIYEQEGVYIHSSCGKTNDQDGLISGILRVLEKDAEVIVDWRPLDDALDSSSILYARKDSSSVVEWTQAPKERGHRGSEHLNSYEAEWDMVNTVSFKRKPHTNGDAPSHRNGKSKWSFLFSLTDLKSIKQNKEGMGWSYLVFCLKDDVVLPALHFHQGDSKLLIESLEKYVVLCESPQDKRTLLVNCQNKSLSQSFENLLDEPAYGLIQKIKKDPYTATMIGFSKVTNYIFDSLRGSDPSTHQRPPSEMADFLSDAIPGLKINQQEEPGFEVITRIDLGERPVVQRREPVSLEEWTKNIDSEGRILNVDNMKQMIFRGGLSHALRKQAWKFLLGYFPWDSTKEERTQLQKQKTDEYFRMKLQWKSISQEQEKRNSRLRDYRSLIEKDVNRTDRTNKFYEGQDNPGLILLHDILMTYCMYDFDLGYVQGMSDLLSPLLYVMENEVDAFWCFASYMDQMHQNFEEQMQGMKTQLIQLSTLLRLLDSGFCSYLESQDSGYLYFCFRWLLIRFKREFSFLDILRLWEVMWTELPCTNFHLLLCCAILESEKQQIMEKHYGFNEILKHINELSMKIDVEDILCKAEAISLQMVKCKELPQAVCEILGLQGSEVTTPDSDVGEDENVVMTPCPTSAFQSNALPTLSASGARNDSPTQIPVSSDVCRLTPA

SEQ ID NO: 87029 - protein, 49 aa, Homo sapiens
  Payload ID: 17416
  Gene Symbol: TBC1D15
  Gene Name: TBC1 domain family, member 15
  ENSP ID: ENSP00000417308
MAAAGVVSGKATLSARYSRILTDDSLGDRWCYFLKSLICSSLSFSQDYI

SEQ ID NO: 87030 - protein, 278 aa, Homo sapiens
  Payload ID: 17416
  Gene Symbol: TBC1D15
  Gene Name: TBC1 domain family, member 15
  ENSP ID: ENSP00000418091
MVNTVSFKRKPHTNGDAPSHRNGKSKWSFLFSLTDLKSIKQNKEGMGWSYLVFCLKDDVVLPALHFHQGDSKLLIESLEKYVVLCESPQDKRTLLVNCQNKSLSQSFENLLDEPAYGLIQKIKKDPYTATMIGFSKVTNYIFDSLRGSDPSTHQRPPSEMADFLSDAIPGLKINQQEEPGFEVITRIDLGERPVVQRREPVSLEEWTKNIDSEGRILNVDNMKQMIFRGGLSHALRKQAWKFLLGYFPWDSTKEERTQLQKQKTDEYFRMKLQWKSIS

SEQ ID NO: 87031 - protein, 124 aa, Homo sapiens
  Payload ID: 17416
  Gene Symbol: TBC1D15
  Gene Name: TBC1 domain family, member 15
  ENSP ID: ENSP00000418467
MAAAGVVSGKIIYEQEGVYIHSSCGKTNDQDGLISGILRVLEKDAEVIVDWRPLDDALDSSSILYARKDSSSVVEWTQAPKERGHRGSEHLNSYEAEWDMVNTVSFKRKPHTNGDLHRIKEHFL

SEQ ID NO: 87032 - protein, 85 aa, Homo sapiens
  Payload ID: 17416
  Gene Symbol: TBC1D15
  Gene Name: TBC1 domain family, member 15
  ENSP ID: ENSP00000419365
MAAAGVVSGKIIYEQEGVYIHSSCGKTNDQDGLISGILRVLEKDAEVIVDWRPLDDALDSSSILYARKMLQVIEMGKANGHSCSV

SEQ ID NO: 87033 - protein, 72 aa, Homo sapiens
  Payload ID: 17416
  Gene Symbol: TBC1D15
  Gene Name: TBC1 domain family, member 15
  ENSP ID: ENSP00000420190
MAAAGVVSGKIIYEQEGVYIHSSCGKTNDQDGLISGILRVLEKDAEVIVDWRPLDDALDSSSILYARKISTG

SEQ ID NO: 87034 - protein, 674 aa, Homo sapiens
  Payload ID: 17416
  Gene Symbol: TBC1D15
  Gene Name: TBC1 domain family, member 15
  Uniprot ID: Q8TC07
  ENSP ID: ENSP00000420678
MAAAGVVSGKIIYEQEGVYIHSSCGKTNDQDGLISGILRVLEKDAEVIVDWRPLDDALDSSSILYARKDSSSVVEWTQAPKERGHRGSEHLNSYEAEWDMVNTVSFKRKPHTNGDAPSHRNGKSKWSFLFSLTDLKSIKQNKEGMGWSYLVFCLKDDVVLPALHFHQGDSKLLIESLEKYVVLCESPQDKRTLLVNCQNKSLSQSFENLLDEPAYGLIQKIKKDPYTATMIGFSKVTNYIFDSLRGSDPSTHQRPPSEMADFLSDAIPGLKINQQEEPGFEVITRIDLGERPVVQRREPVSLEEWTKNIDSEGRILNVDNMKQMIFRGGLSHALRKQAWKFLLGYFPWDSTKEERTQLQKQKTDEYFRMKLQWKSISQEQEKRNSRLRDYRSLIEKDVNRTDRTNKFYEGQDNPGLILLHDILMTYCMYDFDLGYVQGMSDLLSPLLYVMENEVDAFWCFASYMDQMHQNFEEQMQGMKTQLIQLSTLLRLLDSGFCSYLESQDSGYLYFCFRWLLIRFKREFSFLDILRLWEVMWTELPCTNFHLLLCCAILESEKQQIMEKHYGFNEILKHINELSMKIDVEDILCKAEAISLQMVKCKELPQAVCEILGLQGSEVTTPDSDVGEDENVVMTPCPTSAFQSNALPTLSASGARNDSPTQIPVSSDVCRLTPA

SEQ ID NO: 87035 - protein, 691 aa, Homo sapiens
  Payload ID: 17416
  Gene Symbol: TBC1D15
  Gene Name: TBC1 domain family, member 15
  Uniprot ID: Q8TC07
  ENSP ID: ENSP00000448182
MAAAGVVSGKIIYEQEGVYIHSSCGKTNDQDGLISGILRVLEKDAEVIVDWRPLDDALDSSSILYARKDSSSVVEWTQAPKERGHRGSEHLNSYEAEWDMVNTVSFKRKPHTNGDAPSHRNGKSKWSFLFSLTDLKSIKQNKEGMGWSYLVFCLKDDVVLPALHFHQGDSKLLIESLEKYVVLCESPQDKRTLLVNCQNKSLSQSFENLLDEPAYGLIQAGLLDRRKLLWAIHHWKKIKKDPYTATMIGFSKVTNYIFDSLRGSDPSTHQRPPSEMADFLSDAIPGLKINQQEEPGFEVITRIDLGERPVVQRREPVSLEEWTKNIDSEGRILNVDNMKQMIFRGGLSHALRKQAWKFLLGYFPWDSTKEERTQLQKQKTDEYFRMKLQWKSISQEQEKRNSRLRDYRSLIEKDVNRTDRTNKFYEGQDNPGLILLHDILMTYCMYDFDLGYVQGMSDLLSPLLYVMENEVDAFWCFASYMDQMHQNFEEQMQGMKTQLIQLSTLLRLLDSGFCSYLESQDSGYLYFCFRWLLIRFKREFSFLDILRLWEVMWTELPCTNFHLLLCCAILESEKQQIMEKHYGFNEILKHINELSMKIDVEDILCKAEAISLQMVKCKELPQAVCEILGLQGSEVTTPDSDVGEDENVVMTPCPTSAFQSNALPTLSASGARNDSPTQIPVSSDVCRLTPA

SEQ ID NO: 87036 - protein, 120 aa, Homo sapiens
  Payload ID: 17416
  Gene Symbol: TBC1D15
  Gene Name: TBC1 domain family, member 15
  ENSP ID: ENSP00000449643
MVNTVSFKRKPHTNGDAPSHRNGKSKWSFLFSLTDLKSIKQNKEGMGWSYLVFCLKDDVVLPALHFHQGDSKLLIESLEKYVVLCESPQDKRTLLVNCQNKSLSQSFENLLDEPAYGLIQ

SEQ ID NO: 87037 - protein, 767 aa, Homo sapiens
  Payload ID: 17417
  Gene Symbol: TBC1D16
  Gene Name: TBC1 domain family, member 16
  Uniprot ID: Q8TBP0
  ENSP ID: ENSP00000309794
MSLGRLLRRASSKASDLLTLTPGGSGSGSPSVLDGEIIYSKNNVCVHPPEGLQGLGEHHPGYLCLYMEKDEMLGATLILAWVPNSRIQRQDEEALRYITPESSPVRKAPRPRGRRTRSSGASHQPSPTELRPTLTPKDEDILVVAQSVPDRMLASPAPEDEEKLAQGLGVDGAQPASQPACSPSGILSTVSPQDVTEEGREPRPEAGEEDGSLELSAEGVSRDSSFDSDSDTFSSPFCLSPISAALAESRGSVFLESDSSPPSSSDAGLRFPDSNGLLQTPRWDEPQRVCALEQICGVFRVDLGHMRSLRLFFSDEACTSGQLVVASRESQYKVFHFHHGGLDKLSDVFQQWKYCTEMQLKDQQVAPDKTCMQFSIRRPKLPSSETHPEESMYKRLGVSAWLNHLNELGQVEEEYKLRKAIFFGGIDVSIRGEVWPFLLRYYSHESTSEEREALRLQKRKEYSEIQQKRLSMTPEEHRAFWRNVQFTVDKDVVRTDRNNQFFRGEDNPNVESMRRILLNYAVYNPAVGYSQGMSDLVAPILAEVLDESDTFWCFVGLMQNTIFVSSPRDEDMEKQLLYLRELLRLTHVRFYQHLVSLGEDGLQMLFCHRWLLLCFKREFPEAEALRIWEACWAHYQTDYFHLFICVAIVAIYGDDVIEQQLATDQMLLHFGNLAMHMNGELVLRKARSLLYQFRLLPRIPCSLHDLCKLCGSGMWDSGSMPAVECTGHHPGSESCPYGGTVEMPSPKSLREGKKGPKTPQDGFGFRR

SEQ ID NO: 87038 - protein, 405 aa, Homo sapiens
  Payload ID: 17417
  Gene Symbol: TBC1D16
  Gene Name: TBC1 domain family, member 16
  Uniprot ID: Q8TBP0
  ENSP ID: ENSP00000341517
MKVAPDKTCMQFSIRRPKLPSSETHPEESMYKRLGVSAWLNHLNELGQVEEEYKLRKAIFFGGIDVSIRGEVWPFLLRYYSHESTSEEREALRLQKRKEYSEIQQKRLSMTPEEHRAFWRNVQFTVDKDVVRTDRNNQFFRGEDNPNVESMRRILLNYAVYNPAVGYSQGMSDLVAPILAEVLDESDTFWCFVGLMQNTIFVSSPRDEDMEKQLLYLRELLRLTHVRFYQHLVSLGEDGLQMLFCHRWLLLCFKREFPEAEALRIWEACWAHYQTDYFHLFICVAIVAIYGDDVIEQQLATDQMLLHFGNLAMHMNGELVLRKARSLLYQFRLLPRIPCSLHDLCKLCGSGMWDSGSMPAVECTGHHPGSESCPYGGTVEMPSPKSLREGKKGPKTPQDGFGFRR

SEQ ID NO: 87039 - protein, 188 aa, Homo sapiens
  Payload ID: 17417
  Gene Symbol: TBC1D16
  Gene Name: TBC1 domain family, member 16
  ENSP ID: ENSP00000458356
MQFSIRRPKLPSSETHPEESMYKRLGVSAWLNHLNELGQVEEEYKLRKAIFFGGIDVSIRGEVWPFLLRYYSHESTSEEREALRLQKRKEYSEIQQKRLSMTPEEHRAFWRNVQFTVDKDVVRTDRNNQFFRGEDNPNVESMRRILLNYAVYNPAVGYSQGMSDLVAPILAEVLDESDTFWCFVGLMQ

SEQ ID NO: 87040 - protein, 279 aa, Homo sapiens
  Payload ID: 17417
  Gene Symbol: TBC1D16
  Gene Name: TBC1 domain family, member 16
  ENSP ID: ENSP00000458377
MKQVAPDKTCMQFSIRRPKLPSSETHPEESMYKRLGVSAWLNHLNELGQVEEEYKLRKAIFFGGIDVSIRGEVWPFLLRYYSHESTSEEREALRLQKRKEYSEIQQKRLSMTPEEHRAFWRNVQFTVDKDVVRTDRNNQFFRGEDNPNVESMRRILLNYAVYNPAVGYSQGMSDLVAPILAEVLDESDTFWCFVGLMQNTIFVSSPRDEDMEKQLLYLRELLRLTHVRFYQHLVSLGEDGLQMLFCHRWLLLCFKREFPEAEALRIWEACWAHYQGADV

SEQ ID NO: 87041 - protein, 278 aa, Homo sapiens
  Payload ID: 17417
  Gene Symbol: TBC1D16
  Gene Name: TBC1 domain family, member 16
  Uniprot ID: Q8TBP0
  ENSP ID: ENSP00000458766
MKVAPDKTCMQFSIRRPKLPSSETHPEESMYKRLGVSAWLNHLNELGQVEEEYKLRKAIFFGGIDVSIRGEVWPFLLRYYSHESTSEEREALRLQKRKEYSEIQQKRLSMTPEEHRAFWRNVQFTVDKDVVRTDRNNQFFRGEDNPNVESMRRILLNYAVYNPAVGYSQGMSDLVAPILAEVLDESDTFWCFVGLMQNTIFVSSPRDEDMEKQLLYLRELLRLTHVRFYQHLVSLGEDGLQMLFCHRWLLLCFKREFPEAEALRIWEACWAHYQGADV

SEQ ID NO: 87042 - protein, 130 aa, Homo sapiens
  Payload ID: 17417
  Gene Symbol: TBC1D16
  Gene Name: TBC1 domain family, member 16
  ENSP ID: ENSP00000459342
MRSLRLFFSQGCPAADITNERPGLRRSRRVQKLGGFPDPEPHSSLSSKGSRGWADSTDGCLLSFPGGFSQSSTHTQRRSDEACTSGQLVVASRESQYKVFHFHHGGLDKLSDVFQQWKYCTEMQLKDQQV

SEQ ID NO: 87043 - protein, 190 aa, Homo sapiens
  Payload ID: 17417
  Gene Symbol: TBC1D16
  Gene Name: TBC1 domain family, member 16
  ENSP ID: ENSP00000461509
MQFSIRRPKLPSSETHPEESMYKRLGVSAWLNHLNELGQVEEEYKLRKVWPFLLRYYSHESTSEEREALRLQKRKEYSEIQQKRLSMTPEEHRAFWRNVQFTVDKDVVRTDRNNQFFRGEDNPNVESMRRILLNYAVYNPAVGYSQGMSDLVAPILAEVLDESDTFWCFVGLMQNTIFVSSPRDEDMEKQ

SEQ ID NO: 87044 - protein, 392 aa, Homo sapiens
  Payload ID: 17417
  Gene Symbol: TBC1D16
  Gene Name: TBC1 domain family, member 16
  Uniprot ID: Q8TBP0
  ENSP ID: ENSP00000461522
MKQVAPDKTCMQFSIRRPKLPSSETHPEESMYKRLGVSAWLNHLNELGQVEEEYKLRKVWPFLLRYYSHESTSEEREALRLQKRKEYSEIQQKRLSMTPEEHRAFWRNVQFTVDKDVVRTDRNNQFFRGEDNPNVESMRRILLNYAVYNPAVGYSQGMSDLVAPILAEVLDESDTFWCFVGLMQNTIFVSSPRDEDMEKQLLYLRELLRLTHVRFYQHLVSLGEDGLQMLFCHRWLLLCFKREFPEAEALRIWEACWAHYQTDYFHLFICVAIVAIYGDDVIEQQLATDQMLLHFGNLAMHMNGELVLRKARSLLYQFRLLPRIPCSLHDLCKLCGSGMWDSGSMPAVECTGHHPGSESCPYGGTVEMPSPKSLREGKKGPKTPQDGFGFRR

SEQ ID NO: 87045 - protein, 257 aa, Homo sapiens
  Payload ID: 17417
  Gene Symbol: TBC1D16
  Gene Name: TBC1 domain family, member 16
  ENSP ID: ENSP00000461531
  MOD_RES (1)..(1): Any amino acid
XSSTHTQRRSDEACTSGQLVVASRESQYKVFHFHHGGLDKLSDVFQQWKYCTEMQLKDQVAPDKTCMQFSIRRPKLPSSETHPEESMYKRLGVSAWLNHLNELGQVEEEYKLRKVWPFLLRYYSHESTSEEREALRLQKRKEYSEIQQKRLSMTPEEHRAFWRNVQFTVDKDVVRTDRNNQFFRGEDNPNVESMRRILLNYAVYNPAVGYSQGMSDLVAPILAEVLDESDTFWCFVGLMQNTIFVSSPRDEDMEKQL

SEQ ID NO: 87046 - protein, 648 aa, Homo sapiens
  Payload ID: 17418
  Gene Symbol: TBC1D17
  Gene Name: TBC1 domain family, member 17
  Uniprot ID: Q9HA65
  ENSP ID: ENSP00000221543
MEGAGYRVVFEKGGVYLHTSAKKYQDRDSLIAGVIRVVEKDNDVLLHWAPVEEAGDSTQILFSKKDSSGGDSCASEEEPTFDPGYEPDWAVISTVRPQLCHSEPTRGAEPSCPQGSWAFSVSLGELKSIRRSKPGLSWAYLVLVTQAGGSLPALHFHRGGTRALLRVLSRYLLLASSPQDSRLYLVFPHDSSALSNSFHHLQLFDQDSSNVVSRFLQDPYSTTFSSFSRVTNFFRGALQPQPEGAASDLPPPPDDEPEPGFEVISCVELGPRPTVERGPPVTEEEWARHVGPEGRLQQVPELKNRIFSGGLSPSLRREAWKFLLGYLSWEGTAEEHKAHIRKKTDEYFRMKLQWKSVSPEQERRNSLLHGYRSLIERDVSRTDRTNKFYEGPENPGLGLLNDILLTYCMYHFDLGYVQGMSDLLSPILYVIQNEVDAFWCFCGFMELVQGNFEESQETMKRQLGRLLLLLRVLDPLLCDFLDSQDSGSLCFCFRWLLIWFKREFPFPDVLRLWEVLWTGLPGPNLHLLVACAILDMERDTLMLSGFGSNEILKHINELTMKLSVEDVLTRAEALHRQLTACPELPHNVQEILGLAPPAEPHSPSPTASPLPLSPTRAPPTPPPSTDTAPQPDSSLEILPEEEDEGADS

SEQ ID NO: 87047 - protein, 615 aa, Homo sapiens
  Payload ID: 17418
  Gene Symbol: TBC1D17
  Gene Name: TBC1 domain family, member 17
  Uniprot ID: Q9HA65
  ENSP ID: ENSP00000446323
MEGAGYRDNDVLLHWAPVEEAGDSTQILFSKKDSSGGDSCASEEEPTFDPGYEPDWAVISTVRPQLCHSEPTRGAEPSCPQGSWAFSVSLGELKSIRRSKPGLSWAYLVLVTQAGGSLPALHFHRGGTRALLRVLSRYLLLASSPQDSRLYLVFPHDSSALSNSFHHLQLFDQDSSNVVSRFLQDPYSTTFSSFSRVTNFFRGALQPQPEGAASDLPPPPDDEPEPGFEVISCVELGPRPTVERGPPVTEEEWARHVGPEGRLQQVPELKNRIFSGGLSPSLRREAWKFLLGYLSWEGTAEEHKAHIRKKTDEYFRMKLQWKSVSPEQERRNSLLHGYRSLIERDVSRTDRTNKFYEGPENPGLGLLNDILLTYCMYHFDLGYVQGMSDLLSPILYVIQNEVDAFWCFCGFMELVQGNFEESQETMKRQLGRLLLLLRVLDPLLCDFLDSQDSGSLCFCFRWLLIWFKREFPFPDVLRLWEVLWTGLPGPNLHLLVACAILDMERDTLMLSGFGSNEILKHINELTMKLSVEDVLTRAEALHRQLTACPELPHNVQEILGLAPPAEPHSPSPTASPLPLSPTRAPPTPPPSTDTAPQPDSSLEILPEEEDEGADS

SEQ ID NO: 87048 - protein, 75 aa, Homo sapiens
  Payload ID: 17418
  Gene Symbol: TBC1D17
  Gene Name: TBC1 domain family, member 17
  ENSP ID: ENSP00000469010
MEGAGYRVVFEKGGVYLHTSAKKYQDRDSLIAGVIRVVEKDNDVLLHWAPVEEAGDSTQILFSKKGPEVSRHPQS

SEQ ID NO: 87049 - protein, 344 aa, Homo sapiens
  Payload ID: 17418
  Gene Symbol: TBC1D17
  Gene Name: TBC1 domain family, member 17
  ENSP ID: ENSP00000469747
TTFSSFSRVTNFFRGALQPQPEGAASDLPPPPDDEPEPGFEVISCVELGPRPTVERGPPVTEEEWARHVGPEGRLQQVPELKNRIFSGGLSPSLRREAWKFLLGYLSWEGTAEEHKAHIRKKTDEYFRMKLQWKSVSPEQERRNSLLHGYRSLIERDVSRTDRTNKFYEGPENPGLGLLNDILLTYCMYHFDLGYVQGMSDLLSPILYVIQNEVDAFWCFCGFMELVQGNFEESQETMKRQLGRLLLLLRVLDPLLCDFLDSQDSGSLCFCFRWLLIWFKREFPFPDVLRLWEVLWTGLPGPNLHLLVACAILDMERDTLMLSGFGSNEILKHEAQSGRSGGGG

SEQ ID NO: 87050 - protein, 480 aa, Homo sapiens
  Payload ID: 17418
  Gene Symbol: TBC1D17
  Gene Name: TBC1 domain family, member 17
  ENSP ID: ENSP00000472647
  MOD_RES (1)..(1): Any amino acid
XKYQDRDSLIAGVIRVVEKDNDVLLHWAPVEEAGDSTQILFSKKDSSGGDSCASEEEPTFDPGYEPDWAVISTVRPQLCHSEPTRGAEPSCPQGSWAFSVSLGELKSIRRSKPGLSWAYLVLVTQAGGSLPALHFHRGGTRALLRVLSRYLLLASSPQDSRLYLVFPHDSSALSNSFHHLQLFDQDSSNVVSRFLQDPYSTTFSSFSRVTNFFRGALQPQPEGAASDLPPPPDDEPEPGFEVISCVELGPRPTVERGPPVTEEEWARHVGPEGRLQQVPELKNRIFSGGLSPSLRREAWKFLLGYLSWEGTAEEHKAHIRKKTDEYFRMKLQWKSVSPEQERRNSLLHGYRSLIERDVSRTDRTNKFYEGPENPGLGLLNDILLTYCMYHFDLGYVQGMSDLLSPILYVIQNEVDAFWCFCGFMELVQGNFEESQETMKRQLGRLLLLLRVLDPLLCDFLGTVAHTCNPSTLGGQGGRIT

SEQ ID NO: 87051 - protein, 208 aa, Homo sapiens [sequence omitted]

SEQ ID NO: 87052 - protein, 526 aa, Homo sapiens
  Payload ID: 17419
  Gene Symbol: TBC1D19
  Gene Name: TBC1 domain family, member 19
  Uniprot ID: Q8N5T2
  ENSP ID: ENSP00000264866
MLQEESDLSLIIAQIVQKLKGSNLYSQLERQAWASLQRPEIKLESLKEDIKEFFKISGWEKKLQNAVYSELSVFPLPSHPAAPPEHLKEPLVYMRKAQGSWEKRILKSLNSMCTELSIPLARKRPVGEQKELLNKWNEMGTDEPDLSLFRPVYAPKDFLEVLINLRNPNYENGDSLSFRTHLGLIQVPLKVKDIPELKECFVELGLNIGQLGIDDSTQVPPELFENEHVRIGQKVLAEQDSAAAQQYIRQGSPTALRAELWALILNISSQPEDVLYYEQLKTNVIQHDLLVDSLIYKDVKLTASNDDYYFVFEDYLYQVLLCFSRDTSVLSHFAFNSASPPKSYIRGKLGLEEYAVFYPPNGVIPFHGFSMYVAPLCFLYHEPSKLYQIFREMYVRFFFRLHSISSHPSGIVSLCLLFETLLQTYLPQLFYHLREIGAQPLRISFKWMVRAFSGYLATDQLLLLWDRILGYNSLEILAVLAAAVFAFRAVNLMEVTSLAAAEAVLADLSTLKVMPLLQIFLFATVT

SEQ ID NO: 87053 - protein, 223 aa, Homo sapiens
  Payload ID: 17419
  Gene Symbol: TBC1D19
  Gene Name: TBC1 domain family, member 19
  ENSP ID: ENSP00000423097
MLQEESDLSLIIAQIVQKLKGSNLYSQLERQAWGSWEKRILKSLNSMCTELSIPLARKRPVGEQKELLNKWNEMGTDEPDLSLFRPVYAPKDFLEVLINLRNPNYENGDSLSFRTHLGLIQVPLKVKDIPELKECFVELGLNIGQLGIDDSTQVPPELFENEHVRIGQKVLAEQDSAAAQQYIRQGSPTALRAELWALILNISSQPEDVLYYEQLKTNVIQHD

SEQ ID NO: 87054 - protein, 68 aa, Homo sapiens
  Payload ID: 17419
  Gene Symbol: TBC1D19
  Gene Name: TBC1 domain family, member 19
  ENSP ID: ENSP00000423116
MTRTRARYDQASLQRPEIKLESLKEDIKEFFKISGWEKKLQNAVYSELSVFPLPSHPAAPPEHLKEPL

SEQ ID NO: 87055 - protein, 117 aa, Homo sapiens
  Payload ID: 17419
  Gene Symbol: TBC1D19
  Gene Name: TBC1 domain family, member 19
  ENSP ID: ENSP00000425176
MASLQRPEIKLESLKEDIKEFFKISGWEKKLQNAVYSELSVFPLPSHPAAPPEHLKEPLVYMRKAQGSWEKRILKSLNSMCTELSIPLARKRPVGEQKELLNKWNEMGTDEPDLSLF

SEQ ID NO: 87056 - protein, 461 aa, Homo sapiens
  Payload ID: 17419
  Gene Symbol: TBC1D19
  Gene Name: TBC1 domain family, member 19
  Uniprot ID: Q8N5T2
  ENSP ID: ENSP00000425569
MLQEESDLSLIIAQIVQKLKGSNLYSQLERQAWGSWEKRILKSLNSMCTELSIPLARKRPVGEQKELLNKWNEMGTDEPDLSLFRPVYAPKDFLEVLINLRNPNYENGDSLSFRTHLGLIQVPLKVKDIPELKECFVELGLNIGQLGIDDSTQVPPELFENEHVRIGQKVLAEQDSAAAQQYIRQGSPTALRAELWALILNISSQPEDVLYYEQLKTNVIQHDLLVDSLIYKDVKLTASNDDYYFVFEDYLYQVLLCFSRDTSVLSHFAFNSASPPKSYIRGKLGLEEYAVFYPPNGVIPFHGFSMYVAPLCFLYHEPSKLYQIFREMYVRFFFRLHSISSHPSGIVSLCLLFETLLQTYLPQLFYHLREIGAQPLRISFKWMVRAFSGYLATDQLLLLWDRILGYNSLEILAVLAAAVFAFRAVNLMEVTSLAAAEAVLADLSTLKVMPLLQIFLFATVT

SEQ ID NO: 87057 - protein, 267 aa, Homo sapiens
  Payload ID: 17419
  Gene Symbol: TBC1D19
  Gene Name: TBC1 domain family, member 19
  ENSP ID: ENSP00000427033
MKASLQRPEIKLESLKEDIKEFFKISGWEKKLQNAVYSELSVFPLPSHPAAPPEHLKEPLVYMRKAQGSWEKRILKSLNSMCTELSIPLARKRPVGEQKELLNKWNEMGTDEPDLSLFRPVYAPKDFLEVLINLRNPNYENGDSLSFRTHLGLIQVPLKVKDIPELKECFVELGLNIGQLGIDDSTQVPPELFENEHVRIGQKVLAEQDSAAAQQYIRQGSPTALRAELWALILNISSQPEDVLYYEQLKTNVIQHDLLVDSLIYKD

SEQ ID NO: 87058 - protein, 710 aa, Homo sapiens
  Payload ID: 17420
  Gene Symbol: TBC1D2
  Gene Name: TBC1 domain family, member 2
  Uniprot ID: Q9BYX2
  ENSP ID: ENSP00000341567
MHNIRGNKQAQGTGHEPPGEDSPQSGEPQREEQPLASDASTPGREPEDSPKPAPKPSLTISFAQKAKRQNNTFPFFSEGITRNRTAQEKVAALEQQVLMLTKELKSQKELVKILHKALEAAQQEKRASSAYLAAAEDKDRLELVRHKVRQIAELGRRVEALEQERESLAHTASLREQQVQELQQHVQLLMDKNHAKQQVICKLSEKVTQDFTHPPDQSPLRPDAANRDFLSQQGKIEHLKDDMEAYRTQNCFLNSEIHQVTKIWRKVAEKEKALLTKCAYLQARNCQVESKYLAGLRRLQEALGDEASECSELLRQLVQEALQWEAGEASSDSIELSPISKYDEYGFLTVPDYEVEDLKLLAKIQALESRSHHLLGLEAVDRPLRERWAALGDLVPSAELKQLLRAGVPREHRPRVWRWLVHLRVQHLHTPGCYQELLSRGQAREHPAARQIELDLNRTFPNNKHFTCPTSSFPDKLRRVLLAFSWQNPTIGYCQGLNRLAAIALLVLEEEESAFWCLVAIVETIMPADYYCNTLTASQVDQRVLQDLLSEKLPRLMAHLGQHHVDLSLVTFNWFLVVFADSLISNILLRVWDAFLYEGTKVVFRYALAIFKYNEKEILRLQNGLEIYQYLRFFTKTISNSRKLMNIAFNDMNPFRMKQLRQLRMVHRERLEAELRELEQLKAEYLERRASRRRAVSEGCASEDEVEGEA

SEQ ID NO: 87059 - protein, 468 aa, Homo sapiens
  Payload ID: 17420
  Gene Symbol: TBC1D2
  Gene Name: TBC1 domain family, member 2
  Uniprot ID: Q9BYX2
  ENSP ID: ENSP00000364203
MEAYRTQNCFLNSEIHQVTKIWRKVAEKEKALLTKCAYLQARNCQVESKYLAGLRRLQEALGDEASECSELLRQLVQEALQWEAGEASSDSIELSPISKYDEYGFLTVPDYEVEDLKLLAKIQALESRSHHLLGLEAVDRPLRERWAALGDLVPSAELKQLLRAGVPREHRPRVWRWLVHLRVQHLHTPGCYQELLSRGQAREHPAARQIELDLNRTFPNNKHFTCPTSSFPDKLRRVLLAFSWQNPTIGYCQGLNRLAAIALLVLEEEESAFWCLVAIVETIMPADYYCNTLTASQVDQRVLQDLLSEKLPRLMAHLGQHHVDLSLVTFNWFLVVFADSLISNILLRVWDAFLYEGTKVVFRYALAIFKYNEKEILRLQNGLEIYQYLRFFTKTISNSRKLMNIAFNDMNPFRMKQLRQLRMVHRERLEAELRELEQLKAEYLERRASRRRAVSEGCASEDEVEGEA

SEQ ID NO: 87060 - protein, 860 aa, Homo sapiens
  Payload ID: 17420
  Gene Symbol: TBC1D2
  Gene Name: TBC1 domain family, member 2
  Uniprot ID: Q9BYX2
  ENSP ID: ENSP00000364205
MEGAGENAPESSSSAPGSEESARDPQVPPPEEESGDCARSLEAVPKKLCGYLSKFGGKGPIRGWKSRWFFYDERKCQLYYSRTAQDANPLDSIDLSSAVFDCKADAEEGIFEIKTPSRVITLKAATKQAMLYWLQQLQMKRWEFHNSPPAPPATPDAALAGNGPVLHLELGQEEAELEEFLCPVKTPPGLVGVAAALQPFPALQNISLKHLGTEIQNTMHNIRGNKQAQGTGHEPPGEDSPQSGEPQREEQPLASDASTPGREPEDSPKPAPKPSLTISFAQKAKRQNNTFPFFSEGITRNRTAQEKVAALEQQVLMLTKELKSQKELVKILHKALEAAQQEKRASSAYLAAAEDKDRLELVRHKVRQIAELGRRVEALEQERESLAHTASLREQQVQELQQHVQLLMDKNHAKQQVICKLSEKVTQDFTHPPDQSPLRPDAANRDFLSQQGKIEHLKDDMEAYRTQNCFLNSEIHQVTKIWRKVAEKEKALLTKCAYLQARNCQVESKYLAGLRRLQEALGDEASECSELLRQLVQEALQWEAGEASSDSIELSPISKYDEYGFLTVPDYEVEDLKLLAKIQALESRSHHLLGLEAVDRPLRERWAALGDLVPSAELKQLLRAGVPREHRPRVWRWLVHLRVQHLHTPGCYQELLSRGQAREHPAARQIELDLNRTFPNNKHFTCPTSSFPDKLRRVLLAFSWQNPTIGYCQGLNRLAAIALLVLEEEESAFWCLVAIVETIMPADYYCNTLTASQVDQRVLQDLLSEKLPRLMAHLGQHHVDLSLVTFNWFLVVFADSLISNILLRVWDAFLYEGTKVVFRYALAIFKYNEKEILRLQNGLEIYQYLRFFTKTISNSR

SEQ ID NO: 87061 - protein, 917 aa, Homo sapiens
  Payload ID: 17420
  Gene Symbol: TBC1D2
  Gene Name: TBC1 domain family, member 2
  Uniprot ID: Q9BYX2
  ENSP ID: ENSP00000364207
MEGAGENAPESSSSAPGSEESARDPQVPPPEEESGDCARSLEAVPKKLCGYLSKFGGKGPIRGWKSRWFFYDERKCQLYYSRTAQDANPLDSIDLSSAVFDCKADAEEGIFEIKTPSRVITLKAATKQAMLYWLQQLQMKRWEFHNSPPAPPATPDAALAGNGPVLHLELGQEEAELEEFLCPVKTPPGLVGVAAALQPFPALQNISLKHLGTEIQNTMHNIRGNKQAQGTGHEPPGEDSPQSGEPQREEQPLASDASTPGREPEDSPKPAPKPSLTISFAQKAKRQNNTFPFFSEGITRNRTAQEKVAALEQQVLMLTKELKSQKELVKILHKALEAAQQEKRASSAYLAAAEDKDRLELVRHKVRQIAELGRRVEALEQERESLAHTASLREQQVQELQQHVQLLMDKNHAKQQVICKLSEKVTQDFTHPPDQSPLRPDAANRDFLSQQGKIEHLKDDMEAYRTQNCFLNSEIHQVTKIWRKVAEKEKALLTKCAYLQARNCQVESKYLAGLRRLQEALGDEASECSELLRQLVQEALQWEAGEASSDSIELSPISKYDEYGFLTVPDYEVEDLKLLAKIQALESRSHHLLGLEAVDRPLRERWAALGDLVPSAELKQLLRAGVPREHRPRVWRWLVHLRVQHLHTPGCYQELLSRGQAREHPAARQIELDLNRTFPNNKHFTCPTSSFPDKLRRVLLAFSWQNPTIGYCQGLNRLAAIALLVLEEEESAFWCLVAIVETIMPADYYCNTLTASQVDQRVLQDLLSEKLPRLMAHLGQHHVDLSLVTFNWFLVVFADSLISNILLRVWDAFLYEGTKYNEKEILRLQNGLEIYQYLRFFTKTISNSRKLMNIAFNDMNPFRMKQLRQLRMVHRERLEAELRELEQLKAEYLERRASRRRAVSEGCASEDEVEGEA

SEQ ID NO: 87062 - protein, 928 aa, Homo sapiens
  Payload ID: 17420
  Gene Symbol: TBC1D2
  Gene Name: TBC1 domain family, member 2
  Uniprot ID: Q9BYX2
  ENSP ID: ENSP00000481721
MEGAGENAPESSSSAPGSEESARDPQVPPPEEESGDCARSLEAVPKKLCGYLSKFGGKGPIRGWKSRWFFYDERKCQLYYSRTAQDANPLDSIDLSSAVFDCKADAEEGIFEIKTPSRVITLKAATKQAMLYWLQQLQMKRWEFHNSPPAPPATPDAALAGNGPVLHLELGQEEAELEEFLCPVKTPPGLVGVAAALQPFPALQNISLKHLGTEIQNTMHNIRGNKQAQGTGHEPPGEDSPQSGEPQREEQPLASDASTPGREPEDSPKPAPKPSLTISFAQKAKRQNNTFPFFSEGITRNRTAQEKVAALEQQVLMLTKELKSQKELVKILHKALEAAQQEKRASSAYLAAAEDKDRLELVRHKVRQIAELGRRVEALEQERESLAHTASLREQQVQELQQHVQLLMDKNHAKQQVICKLSEKVTQDFTHPPDQSPLRPDAANRDFLSQQGKIEHLKDDMEAYRTQNCFLNSEIHQVTKIWRKVAEKEKALLTKCAYLQARNCQVESKYLAGLRRLQEALGDEASECSELLRQLVQEALQWEAGEASSDSIELSPISKYDEYGFLTVPDYEVEDLKLLAKIQALESRSHHLLGLEAVDRPLRERWAALGDLVPSAELKQLLRAGVPREHRPRVWRWLVHLRVQHLHTPGCYQELLSRGQAREHPAARQIELDLNRTFPNNKHFTCPTSSFPDKLRRVLLAFSWQNPTIGYCQGLNRLAAIALLVLEEEESAFWCLVAIVETIMPADYYCNTLTASQVDQRVLQDLLSEKLPRLMAHLGQHHVDLSLVTFNWFLVVFADSLISNILLRVWDAFLYEGTKVVFRYALAIFKYNEKEILRLQNGLEIYQYLRFFTKTISNSRKLMNIAFNDMNPFRMKQLRQLRMVHRERLEAELRELEQLKAEYLERRASRRRAVSEGCASEDEVEGEA

SEQ ID NO: 87063 - protein, 403 aa, Homo sapiens
  Payload ID: 17421
  Gene Symbol: TBC1D20
  Gene Name: TBC1 domain family, member 20
  Uniprot ID: Q96BZ9
  ENSP ID: ENSP00000346139
MALRSAQGDGPTSGHWDGGAEKADFNAKRKKKVAEIHQALNSDPTDVAALRRMAISEGGLLTDEIRRKVWPKLLNVNANDPPPISGKNLRQMSKDYQQVLLDVRRSLRRFPPGMPEEQREGLQEELIDIILLILERNPQLHYYQGYHDIVVTFLLVVGERLATSLVEKLSTHHLRDFMDPTMDNTKHILNYLMPIIDQVNPELHDFMQSAEVGTIFALSWLITWFGHVLSDFRHVVRLYDFFLACHPLMPIYFAAVIVLYREQEVLDCDCDMASVHHLLSQIPQDLPYETLISRAGDLFVQFPPSELAREAAAQQQAERTAASTFKDFELASAQQRPDMVLRQRFRGLLRPEDRTKDVLTKPRTNRFVKLAVMGLTVALGAAALAVVKSALEWAPKFQLQLFP

SEQ ID NO: 87064 - protein, 403 aa, Homo sapiens; identical to SEQ ID NO: 87063
  Payload ID: 17421
  Gene Symbol: TBC1D20
  Gene Name: TBC1 domain family, member 20
  Uniprot ID: Q96BZ9
  ENSP ID: ENSP00000432280

SEQ ID NO: 87065 - protein, 336 aa, Homo sapiens
  Payload ID: 17422
  Gene Symbol: TBC1D21
  Gene Name: TBC1 domain family, member 21
  Uniprot ID: Q8IYX1
  ENSP ID: ENSP00000300504
MTTLSPENSLSARQSASFILVKRKPPIDKTEWDSFFDESGHLAKSRDFICVNILERGLHPFVRTEAWKFLTGYFSWQSSQDERLTVDSMRRKNYKALCQMYEKIQPLLENLHRNFTETRNNIARDIQKIYDKDPLGNVLIDKKRLEKILLLSYVCNTQAEYQQGFHEMMMLFQLMVEHDHETFWLFQFFLQKTEHSCVINIGVAKNLDMLSTLITFLDPVFAEHLKGKGAGAVQSLFPWFCFCFQRAFKSFDDVWRLWEVLLTGKPCRNFQVLVAYSMLQMVREQVLQESMGGDDILLACNNLIDLDADELISAACVVYAELIQKDVPQTLKDFFL

SEQ ID NO: 87066 - protein, 300 aa, Homo sapiens
  Payload ID: 17422
  Gene Symbol: TBC1D21
  Gene Name: TBC1 domain family, member 21
  Uniprot ID: Q8IYX1
  ENSP ID: ENSP00000439325
MTTLSPENSLSARQSASFILGLHPFVRTEAWKFLTGYFSWQSSQDERLTVDSMRRKNYKALCQMYEKIQPLLENLHRNFTETRNNIARDIQKIYDKDPLGNVLIDKKRLEKILLLSYVCNTQAEYQQGFHEMMMLFQLMVEHDHETFWLFQFFLQKTEHSCVINIGVAKNLDMLSTLITFLDPVFAEHLKGKGAGAVQSLFPWFCFCFQRAFKSFDDVWRLWEVLLTGKPCRNFQVLVAYSMLQMVREQVLQESMGGDDILLACNNLIDLDADELISAACVVYAELIQKDVPQTLKDFFL

SEQ ID NO: 87067 - protein, 299 aa, Homo sapiens
  Payload ID: 17422
  Gene Symbol: TBC1D21
  Gene Name: TBC1 domain family, member 21
  ENSP ID: ENSP00000457096
MTTLSPENSLSARQSASFILVKRKPPIDKTEWDSFFDESGHLAKSRDFICVNILERGLHPFVRTEAWKFLTGYFSWQSSQDERLTVDSMRRKNYKALCQMYEKIQPLLENLHRNFTETRNNIEYQQGFHEMMMLFQLMVEHDHETFWLFQFFLQKTEHSCVINIGVAKNLDMLSTLITFLDPVFAEHLKGKGAGAVQSLFPWFCFCFQRAFKSFDDVWRLWEVLLTGKPCRNFQVLVAYSMLQMVREQVLQESMGGDDILLACNNLIDLDADELISAACVVYAELIQKDVPQTLKDFFL

SEQ ID NO: 87068 - protein, 517 aa, Homo sapiens
  Payload ID: 17423
  Gene Symbol: TBC1D22A
  Gene Name: TBC1 domain family, member 22A
  Uniprot ID: Q8WUA7
  ENSP ID: ENSP00000336724
MASDGARKQFWKRSNSKLPGSIQHVYGAQHPPFDPLLHGTLLRSTAKMPTTPVKAKRVSTFQEFESNTSDAWDAGEDDDELLAMAAESLNSEVVMETANRVLRNHSQRQGRPTLQEGPGLQQKPRPEAEPPSPPSGDLRLVKSVSESHTSCPAESASDAAPLQRSQSLPHSATVTLGGTSDPSTLSSSALSEREASRLDKFKQLLAGPNTDLEELRRLSWSGIPKPVRPMTWKLLSGYLPANVDRRPATLQRKQKEYFAFIEHYYDSRNDEVHQDTYRQIHIDIPRMSPEALILQPKVTEIFERILFIWAIRHPASGYVQGINDLVTPFFVVFICEYIEAEEVDTVDVSGVPAEVLCNIEADTYWCMSKLLDGIQDNYTFAQPGIQMKVKMLEELVSRIDEQVHRHLDQHEVRYLQFAFRWMNNLLMREVPLRCTIRLWDTYQSEPDGFSHFHLYVCAAFLVRWRKEILEEKDFQELLLFLQNLPTAHWDDEDISLLLAEAYRLKFAFADAPNHYKK

SEQ ID NO: 87069 - protein, 439 aa, Homo sapiens
  Payload ID: 17423
  Gene Symbol: TBC1D22A
  Gene Name: TBC1 domain family, member 22A
  Uniprot ID: Q8WUA7
  ENSP ID: ENSP00000347932
MASDGARKQFWKRSNSKLPGSLLRSTAKMPTTPVKAKRVSTFQEFESNTSDAWDAGEDDDELLAMAAESLNSEVVMETANRVLRNHSQRQGRPTLQEGPGLQQKPRPEAEPPSPPSGDLRLVKSVSESHTSCPAEELRRLSWSGIPKPVRPMTWKLLSGYLPANVDRRPATLQRKQKEYFAFIEHYYDSRNDEVHQDTYRQIHIDIPRMSPEALILQPKVTEIFERILFIWAIRHPASGYVQGINDLVTPFFVVFICEYIEAEEVDTVDVSGVPAEVLCNIEADTYWCMSKLLDGIQDNYTFAQPGIQMKVKMLEELVSRIDEQVHRHLDQHEVRYLQFAFRWMNNLLMREVPLRCTIRLWDTYQSEPDGFSHFHLYVCAAFLVRWRKEILEEKDFQELLLFLQNLPTAHWDDEDISLLLAEAYRLKFAFADAPNHYKK

SEQ ID NO: 87070 - protein, 487 aa, Homo sapiens
  Payload ID: 17423
  Gene Symbol: TBC1D22A
  Gene Name: TBC1 domain family, member 22A
  ENSP ID: ENSP00000370383
MWEPQPDVGSLLRSTAKMPTTPVKAKRVSTFQEFESNTSDAWDAGEDDDELLAMAAESLNSEVVMETANRVLRNHSQRQGRPTLQEGPGLQQKPRPEAEPPSPPSGDLRLVKSVSESHTSCPAESASDAAPLQRSQSLPHSATVTLGGTSDPSTLSSSALSEREASRLDKFKQLLAGPNTDLEELRRLSWSGIPKPVRPMTWKLLSGYLPANVDRRPATLQRKQKEYFAFIEHYYDSRNDEVHQDTYRQIHIDIPRMSPEALILQPKVTEIFERILFIWAIRHPASGYVQGINDLVTPFFVVFICEYIEAEEVDTVDVSGVPAEVLCNIEADTYWCMSKLLDGIQDNYTFAQPGIQMKVKMLEELVSRIDEQVHRHLDQHEVRYLQFAFRWMNNLLMREVPLRCTIRLWDTYQSEPDGFSHFHLYVCAAFLVRWRKEILEEKDFQELLLFLQNLPTAHWDDEDISLLLAEAYRLKFAFADAPNHYKK

SEQ ID NO: 87071 - protein, 237 aa, Homo sapiens
  Payload ID: 17423
  Gene Symbol: TBC1D22A
  Gene Name: TBC1 domain family, member 22A
  ENSP ID: ENSP00000377964
MASDGARKQFWKRSNSKLPGSIQHVYGAQHPPFDPLLHGTLLRSTAKMPTTPVKAKRVSTFQEFESNTSDAWDAGEDDDELLAMAAESLNSEVVMETANRVLRNHSQRQGRPTLQEGPGLQQKPRPEAEPPSPPSGDLRLVKSVSESHTSCPAESASDAAPLQRSQSLPHSATVTLGGTSDPSTLSSSALSEREASRLDKFKQLLAGPNTDLGLPSRQCRPETSHSPEKTKRIFCIY

SEQ ID NO: 87072 - protein, 458 aa, Homo sapiens
  Payload ID: 17423
  Gene Symbol: TBC1D22A
  Gene Name: TBC1 domain family, member 22A
  ENSP ID: ENSP00000384036
MASDGARKQFWKRSNSKLPGSIQHVYGAQHPPFDPLLHGTLLRSTAKMPTTPVKAKRVSTFQEFESNTSDAWDAGEDDDELLAMAAESLNSEVVMETANRVLRNHSQRQGRPTLQEGPGLQQKPRPEAEPPSPPSGDLRLVKSVSESHTSCPAEELRRLSWSGIPKPVRPMTWKLLSGYLPANVDRRPATLQRKQKEYFAFIEHYYDSRNDEVHQDTYRQIHIDIPRMSPEALILQPKVTEIFERILFIWAIRHPASGYVQGINDLVTPFFVVFICEYIEAEEVDTVDVSGVPAEVLCNIEADTYWCMSKLLDGIQDNYTFAQPGIQMKVKMLEELVSRIDEQVHRHLDQHEVRYLQFAFRWMNNLLMREVPLRCTIRLWDTYQSEPDGFSHFHLYVCAAFLVRWRKEILEEKDFQELLLFLQNLPTAHWDDEDISLLLAEAYRLKFAFADAPNHYKK

SEQ ID NO: 87073 - protein, 470 aa, Homo sapiens
  Payload ID: 17423
  Gene Symbol: TBC1D22A
  Gene Name: TBC1 domain family, member 22A
  Uniprot ID: Q8WUA7
  ENSP ID: ENSP00000385634
MPTTPVKAKRVSTFQEFESNTSDAWDAGEDDDELLAMAAESLNSEVVMETANRVLRNHSQRQGRPTLQEGPGLQQKPRPEAEPPSPPSGDLRLVKSVSESHTSCPAESASDAAPLQRSQSLPHSATVTLGGTSDPSTLSSSALSEREASRLDKFKQLLAGPNTDLEELRRLSWSGIPKPVRPMTWKLLSGYLPANVDRRPATLQRKQKEYFAFIEHYYDSRNDEVHQDTYRQIHIDIPRMSPEALILQPKVTEIFERILFIWAIRHPASGYVQGINDLVTPFFVVFICEYIEAEEVDTVDVSGVPAEVLCNIEADTYWCMSKLLDGIQDNYTFAQPGIQMKVKMLEELVSRIDEQVHRHLDQHEVRYLQFAFRWMNNLLMREVPLRCTIRLWDTYQSEPDGFSHFHLYVCAAFLVRWRKEILEEKDFQELLLFLQNLPTAHWDDEDISLLLAEAYRLKFAFADAPNHYKK

SEQ ID NO: 87074 - protein, 58 aa, Homo sapiens
  Payload ID: 17423
  Gene Symbol: TBC1D22A
  Gene Name: TBC1 domain family, member 22A
  ENSP ID: ENSP00000398828
MASDGARKQFWKRSNSKLPGRDGVSLCYPGWSRSPDLVIRPPRPPDKTGFLCSCDMLL

SEQ ID NO: 87075 - protein, 324 aa, Homo sapiens
  Payload ID: 17423
  Gene Symbol: TBC1D22A
  Gene Name: TBC1 domain family, member 22A
  Uniprot ID: Q8WUA7
  ENSP ID: ENSP00000406214
MPTTPVKAKRVSTFQEFESNTSDAWDAGEDDDELLAMAAESLNSEVVMETANRVLRNHSQRQGRPTLQEGPGLQQKPRPEAEPPSPPSGDLRLVKSVSESHTSCPAESASDAAPLQRSQSLPHSATVTLGGTSDPSTLSSSALSEREASRLDKFKQLLAGPNTDLEELRRLSWSGIPKPVRPMTWKLLSGYLPANVDRRPATLQRKQKEYFAFIEHYYDSRNDEVHQDTYRQIHIDIPRMSPEALILQPKVTEIFERILFIWAIRHPASGYVQGINDLVTPFFVVFICEYIAFPGCGRPQIPILAVIWRDEPYPRTDEQIILRR

SEQ ID NO: 87076 - protein, 505 aa, Homo sapiens
  Payload ID: 17424
  Gene Symbol: TBC1D22B
  Gene Name: TBC1 domain family, member 22B
  Uniprot ID: Q9NU19
  ENSP ID: ENSP00000362590
MAAENSKQFWKRSAKLPGSIQPVYGAQHPPLDPRLTKNFIKERSKVNTVPLKNKKASSFHEFARNTSDAWDIGDDEEEDFSSPSFQTLNSKVALATAAQVLENHSKLRVKPERSQSTTSDVPANYKVIKSSSDAQLSRNSSDTCLRNPLHKQQSLPLRPIIPLVARISDQNASGAPPMTVREKTRLEKFRQLLSSQNTDLDELRKCSWPGVPREVRPITWRLLSGYLPANTERRKLTLQRKREEYFGFIEQYYDSRNEEHHQDTYRQIHIDIPRTNPLIPLFQQPLVQEIFERILFIWAIRHPASGYVQGINDLVTPFFVVFLSEYVEEDVENFDVTNLSQDMLRSIEADSFWCMSKLLDGIQDNYTFAQPGIQKKVKALEELVSRIDEQVHNHFRRYEVEYLQFAFRWMNNLLMRELPLRCTIRLWDTYQSEPEGFSHFHLYVCAAFLIKWRKEILDEEDFQGLLMLLQNLPTIHWGNEEIGLLLAEAYRLKYMFADAPNHYRR

SEQ ID NO: 87077 - protein, 684 aa, Homo sapiens
  Payload ID: 17425
  Gene Symbol: TBC1D23
  Gene Name: TBC1 domain family, member 23
  Uniprot ID: Q9NUY8
  ENSP ID: ENSP00000340693
MAEGEDVPPLPTSSGDGWEKDLEEALEAGGCDLETLRNIIQGRPLPADLRAKVWKIALNVAGKGDSLASWDGILDLPEQNTIHKDCLQFIDQLSVPEEKAAELLLDIESVITFYCKSRNIKYSTSLSWIHLLKPLVHLQLPRSDLYNCFYAIMNKYIPRDCSQKGRPFHLFRLLIQYHEPELCSYLDTKKITPDSYALNWLGSLFACYCSTEVTQAIWDGYLQQADPFFIYFLMLIILVNAKEVILTQESDSKEEVIKFLENTPSSLNIEDIEDLFSLAQYYCSKTPASFRKDNHHLFGSTLLGIKDDDADLSQALCLAISVSEILQANQLQGEGVRFFVVDCRPAEQYNAGHLSTAFHLDSDLMLQNPSEFAQSVKSLLEAQKQSIESGSIAGGEHLCFMGSGREEEDMYMNMVLAHFLQKNKEYVSIASGGFMALQQHLADINVDGPENGYGHWIASTSGSRSSINSVDGESPNGSSDRGMKSLVNKMTVALKTKSVNVREKVISFIENTSTPVDRHVSSSDRVGKPYRGVKPVFSIGDEEEYDTDEIDSSSMSDDDRKEVVNIQTWINKPDVKHHFPCKEVKESGHMFPSHLLVTATHMYCLREIVSRKGLAYIQSRQALNSVVKITSKKKHPELITFKYGNSSASGIEILAIERYLIPNAGDATKAIKQQIMKVLDALES

SEQ ID NO: 87078 - protein, 699 aa, Homo sapiens
  Payload ID: 17425
  Gene Symbol: TBC1D23
  Gene Name: TBC1 domain family, member 23
  Uniprot ID: Q9NUY8
  ENSP ID: ENSP00000377700
MAEGEDVPPLPTSSGDGWEKDLEEALEAGGCDLETLRNIIQGRPLPADLRAKVWKIALNVAGKGDSLASWDGILDLPEQNTIHKDCLQFIDQLSVPEEKAAELLLDIESVITFYCKSRNIKYSTSLSWIHLLKPLVHLQLPRSDLYNCFYAIMNKYIPRDCSQKGRPFHLFRLLIQYHEPELCSYLDTKKITPDSYALNWLGSLFACYCSTEVTQAIWDGYLQQADPFFIYFLMLIILVNAKEVILTQESDSKEEVIKFLENTPSSLNIEDIEDLFSLAQYYCSKTPASFRKDNHHLFGSTLLGIKDDDADLSQALCLAISVSEILQANQLQGEGVRFFVVDCRPAEQYNAGHLSTAFHLDSDLMLQNPSEFAQSVKSLLEAQKQSIESGSIAGGEHLCFMGSGREEEDMYMNMVLAHFLQKNKEYVSIASGGFMALQQHLADINVDGPENGYGHWIASTSGSRSSINSVDGESPNGSSDRGMKSLVNKMTVALKTKSVNVREKVISFIENTSTPVDRMSFNLPWPDRSCTERHVSSSDRVGKPYRGVKPVFSIGDEEEYDTDEIDSSSMSDDDRKEVVNIQTWINKPDVKHHFPCKEVKESGHMFPSHLLVTATHMYCLREIVSRKGLAYIQSRQALNSVVKITSKKKHPELITFKYGNSSASGIEILAIERYLIPNAGDATKAIKQQIMKVLDALES

SEQ ID NO: 87079 - protein, 189 aa, Homo sapiens
  Payload ID: 17425
  Gene Symbol: TBC1D23
  Gene Name: TBC1 domain family, member 23
  ENSP ID: ENSP00000417487
MAEGEDVPPLPTSSGDGWEKDLEEALEAGGCDLETLRNIIQGRPLPADLRAKVWKSLFKSFFQIALNVAGKGDSLASWDGILDLPEQNTIHKDCLQFIDQLSVPEEKAAELLLDIESVITFYCKSRNIKYSTSLSWIHLLKPLVHLQLPRSDLYNCFYAIMNKYIPRDCSQKGRPFHLFRLLIQYHEPE

SEQ ID NO: 87080 - protein, 562 aa, Homo sapiens
  Payload ID: 17425
  Gene Symbol: TBC1D23
  Gene Name: TBC1 domain family, member 23
  ENSP ID: ENSP00000418059
MGWYFRLARTEHYSQRLPAVYWDCSQKGRPFHLFRLLIQYHEPELCSYLDTKKITPDSYALNWLGSLFACYCSTEVTQAIWDGYLQQADPFFIYFLMLIILVNAKEVILTQESDSKEEVIKFLENTPSSLNIEDIEDLFSLAQYYCSKTPASFRKDNHHLFGSTLLGIKDDDADLSQALCLAISVSEILQANQLQGEGVRFFVVDCRPAEQYNAGHLSTAFHLDSDLMLQNPSEFAQSVKSLLEAQKQSIESGSIAGGEHLCFMGSGREEEDMYMNMVLAHFLQKNKEYVSIASGGFMALQQHLADINVDGPENGYGHWIASTSGSRSSINSVDGESPNGSSDRGMKSLVNKMTVALKTKSVNVREKVISFIENTSTPVDRMSFNLPWPDRSCTERHVSSSDRVGKPYRGVKPVFSIGDEEEYDTDEIDSSSMSDDDRKEVVNIQTWINKPDVKHHFPCKEVKESGHMFPSHLLVTATHMYCLREIVSRKGLAYIQSRQALNSVVKITSKKKHPELITFKYGNSSASGIEILAIERYLIPNAGDATKAIKQQIMKVLDALES

SEQ ID NO: 87081 - protein, 171 aa, Homo sapiens
  Payload ID: 17425
  Gene Symbol: TBC1D23
  Gene Name: TBC1 domain family, member 23
  ENSP ID: ENSP00000418714
MESREKDLEEALEAGGCDLETLRNIIQGRPLPADLRAKVWKIALNVAGKGDSLASWDGILDLPEQNTIHKDCLQFIDQLSVPEEKAAELLLDIESVITFYCKSRNIKYSTSLSWIHLLKPLVHLQLPRSDLYNCFYAIMNKYIPRDCSQKGRPFHLFRLLIQYHEPELCSY

SEQ ID NO: 87082 - protein, 559 aa, Homo sapiens
  Payload ID: 17426
  Gene Symbol: TBC1D24
  Gene Name: TBC1 domain family, member 24
  Uniprot ID: Q9ULP9
  ENSP ID: ENSP00000293970
MDSPGYNCFVDKDKMDAAIQDLGPKELSCTELQELKQLARQGYWAQSHALRGKVYQRLIRDIPCRTVTPDASVYSDIVGKIVGKHSSSCLPLPEFVDNTQVPSYCLNARGEGAVRKILLCLANQFPDISFCPALPAVVALLLHYSIDEAECFEKACRILACNDPGRRLIDQSFLAFESSCMTFGDLVNKYCQAAHKLMVAVSEDVLQVYADWQRWLFGELPLCYFARVFDVFLVEGYKVLYRVALAILKFFHKVRAGQPLESDSVKQDIRTFVRDIAKTVSPEKLLEKAFAIRLFSRKEIQLLQMANEKALKQKGITVKQKSVSLSKRQFVHLAVHAENFRSEIVSVREMRDIWSWVPERFALCQPLLLFSSLQHGYSLARFYFQCEGHEPTLLLIKTTQKEVCGAYLSTDWSERNKFGGKLGFFGTGECFVFRLQPEVQRYEWVVIKHPELTKPPPLMAAEPTAPLSHSASSDPADRLSPFLAARHFNLPSKTESMFMAGGSDCLIVGGGGGQALYIDGDLNRGRTSHCDTFNNQPLCSENFLIAAVEAWGFQDPDTQ

SEQ ID NO: 87083 - protein, 553 aa, Homo sapiens
  Payload ID: 17426
  Gene Symbol: TBC1D24
  Gene Name: TBC1 domain family, member 24
  Uniprot ID: Q9ULP9
  ENSP ID: ENSP00000454408
MDSPGYNCFVDKDKMDAAIQDLGPKELSCTELQELKQLARQGYWAQSHALRGKVYQRLIRDIPCRTVTPDASVYSDIVGKIVGKHSSSCLPLPEFVDNTQVPSYCLNARGEGAVRKILLCLANQFPDISFCPALPAVVALLLHYSIDEAECFEKACRILACNDPGRRLIDQSFLAFESSCMTFGDLVNKYCQAAHKLMVAVSEDVLQVYADWQRWLFGELPLCYFARVFDVFLVEGYKVLYRVALAILKFFHKVRAGQPLESDSVKQDIRTFVRDIAKTVSPEKLLEKAFAIRLFSRKEIQLLQMANEKALKQKGITVKQKRQFVHLAVHAENFRSEIVSVREMRDIWSWVPERFALCQPLLLFSSLQHGYSLARFYFQCEGHEPTLLLIKTTQKEVCGAYLSTDWSERNKFGGKLGFFGTGECFVFRLQPEVQRYEWVVIKHPELTKPPPLMAAEPTAPLSHSASSDPADRLSPFLAARHFNLPSKTESMFMAGGSDCLIVGGGGGQALYIDGDLNRGRTSHCDTFNNQPLCSENFLIAAVEAWGFQDPDTQ

SEQ ID NO: 87084 - protein, 19 aa, Homo sapiens
  Payload ID: 17426
  Gene Symbol: TBC1D24
  Gene Name: TBC1 domain family, member 24
  ENSP ID: ENSP00000455005
ENFLIAAVEAWGFQDPDTQ

SEQ ID NO: 87085 - protein, 69 aa, Homo sapiens
  Payload ID: 17426
  Gene Symbol: TBC1D24
  Gene Name: TBC1 domain family, member 24
  ENSP ID: ENSP00000457266
  MOD_RES (1)..(1): Any amino acid
XVPERFALCQPLLLFSSLQHGYSLARCVVLTCPQTGVREISLEANWASLGPENALCLGCSLRCSATSGW

SEQ ID NO: 87086 - protein, 53 aa, Homo sapiens
  Payload ID: 17426
  Gene Symbol: TBC1D24
  Gene Name: TBC1 domain family, member 24
  ENSP ID: ENSP00000457896
MDSPGYNCFVDKDKMDAAIQDLGPKELSCTELQELKQLARQGYWAQSHALRGK

SEQ ID NO: 87087 - protein, 553 aa, Homo sapiens; identical to SEQ ID NO: 87083
  Payload ID: 17426
  Gene Symbol: TBC1D24
  Gene Name: TBC1 domain family, member 24
  Uniprot ID: Q9ULP9
  ENSP ID: ENSP00000486121

SEQ ID NO: 87088 - protein, 339 aa, Homo sapiens
  Payload ID: 17426
  Gene Symbol: TBC1D24
  Gene Name: TBC1 domain family, member 24
  ENSP ID: ENSP00000486835
MDSPGYNCFVDKDKMDAAIQDLGPKELSCTELQELKQLARQGYWAQSHALRGKVYQRLIRDIPCRTVTPDASVYSDIVGKIVGKHSSSCLPLPEFVDNTQVPSYCLNARGEGAVRKILLCLANQFPDISFCPALPAVVALLLHYSIDEAECFEKACRILACNDPGRRLIDQSFLAFESSCMTFGDLVNKYCQAAHKLMVAVSEDVLQVYADWQRWLFGELPLCYFARVFDVFLVEGYKVLYRVALAILKFFHKVRAGQPLESDSVKQDIRTFVRDIAKTVSPEKLLEKAFAIRLFSRKEIQLLQMANEKALKQKGITVKQKSLYTWPSMQRTSARRSSA

SEQ ID NO: 87089 - protein, 688 aa, Homo sapiens
  Payload ID: 17427
  Gene Symbol: TBC1D25
  Gene Name: TBC1 domain family, member 25
  Uniprot ID: Q3MII6
  ENSP ID: ENSP00000365962
MATASGASDLSGSGAPPPGVGAQAAAAAEEEEREVVRVRVKKCESFLPPEFRSFAVDPQITSLDVLQHILIRAFDLSGKKNFGISYLGRDRLGQEVYLSLLSDWDLSTAFATASKPYLQLRVDIRPSEDSPLLEDWDIISPKDVIGSDVLLAEKRSSLTTAALPFTQSILTQVGRTLSKVQQVLSWSYGEDVKPFKPPLSDAEFHTYLNHEGQLSRPEELRLRIYHGGVEPSLRKVVWRYLLNVYPDGLTGRERMDYMKRKSREYEQLKSEWAQRANPEDLEFIRSTVLKDVLRTDRAHPYYAGPEDGPHLRALHDLLTTYAVTHPQVSYCQGMSDLASPILAVMDHEGHAFVCFCGIMKRLAANFHPDGRAMATKFAHLKLLLRHADPDFYQYLQEAGADDLFFCYRWLLLELKREFAFDDALRMLEVTWSSLPPDPPEHEVELVGPPSQVADAGFGGHRGWPVRQRHMLRPAGGGGSTFEDAVDHLATASQGPGGGGRLLRQASLDGLQQLRDNMGSRRDPLVQLPHPAALISSKSLSEPLLNSPDPLLSSFSHPDSPSSSSPPSTQEASPTGDMAVGSPLMQEVGSPKDPGKSLPPVPPMGLPPPQEFGRGNPFMLFLCLAILLEHRDHIMRNGLDYNELAMHFDRLVRKHHLGRVLRRARALFADYLQSEVWDSEEGAEATAAS

SEQ ID NO: 87090 - protein, 230 aa, Homo sapiens
  Payload ID: 17427
  Gene Symbol: TBC1D25
  Gene Name: TBC1 domain family, member 25
  ENSP ID: ENSP00000402268
MATASGASDLSGSGAPPPGVGAQAAAAAEEEEREVVRVRVKHGDGAPGGLPHVFSPQKCESFLPPEFRSFAVDPQITSLDVLQHILIRAFDLSGKKNFGISYLGRDRLGQEVYLSLLSDWDLSTAFATASKPYLQLRVDIRPSEDSPLLEDWDIISPKDVIGSDVLLAEKRSSLTTAALPFTQSILTQVGRTLSKVQQVLSWSYGEDVKPFKPPLSDAEFHTYLNHEGQL

SEQ ID NO: 87091 - protein, 100 aa, Homo sapiens
  Payload ID: 17427
  Gene Symbol: TBC1D25
  Gene Name: TBC1 domain family, member 25
  Uniprot ID: Q3MII6
  ENSP ID: ENSP00000476787
MATASGASDLSGSGAPPPGVGAQAAAAAEEEEREVVRVRVKKCESFLPPEFRSFAVDPQITSLDVLQHILIRAFDLSGPIARRLGHNQPQRCHWLRRVAG

SEQ ID NO: 87092 - protein, 511 aa, Homo sapiens
  Payload ID: 17428
  Gene Symbol: TBC1D26
  Gene Name: TBC1 domain family, member 26
  Uniprot ID: Q9HBT8
  ENSP ID: ENSP00000408168
MGALSSQDSPHFQEKSTEEGEVAALRLTARSQETVTFKDVAMDFTPEEWGKLDPAQRDVMLENYRNLVSLWLPVSKPESYNLENGKEPLKLERKAPKSSYSDMETRPQSKDSTSVQDFSKAESCKVAIIDRLTRNSVYDSNLEAALECENWLENQQGNQERHLREMFTHMNSLSEETDHKHDVYWKSFNQKSVLITEDRVPKGSYAFHTLEKSLKQKSNLMKKQRTYKEKKPHKCNDCGELFTYHSVLIRHQRVHTGEKPYTCNECGKSFSHRANLTKHQRTHTRILFECSECKKTFTESSSLATHQRIHVGERPYECNECGKGFNRSTHLVQHQLIHTGVKPYECNECDKAFIHSSALIKHQRTHTGEKPYKCQECGKAFSHCSSLTKHQRVHTGEKPYECSECGKTFSQSTHLVQHQRIHTGEKPYECNECGKTFSRSSNFAKHQRIHIGKKPYKCSECGKAFIHSSALIQHQRTHTGEKPFRCNECGKSFKCSSSLIRHQRVHTEEQP

SEQ ID NO: 87093 - protein, 250 aa, Homo sapiens
  Payload ID: 17428
  Gene Symbol: TBC1D26
  Gene Name: TBC1 domain family, member 26
  ENSP ID: ENSP00000410111
MEMDGDPYNLPAQGQGNIIITKYEQGHRAGAAVDLGHEQVDVRKYTNNLGIVHEMELPHVSALEVKQRRKESKRTNKWQKMLADWTKYRSTKKLSQRVYKVIPLAVRGRAWSLLLDIDRIKSQNPGKYKVMKEKGKRSSRIIHCIQLDVSHTLQKHMMFIQRFGVKQQELCDILVAYSAYNPEVGYHRDLSRITAILLLCLPEEDAFWALTQLLAGERHSLWYSTAQILPGSRGSYRTRSRCCTSPSQRS

SEQ ID NO: 87094 - protein, 250 aa, Homo sapiens; identical to SEQ ID NO: 87093
  Payload ID: 17428
  Gene Symbol: TBC1D26
  Gene Name: TBC1 domain family, member 26
  Uniprot ID: Q86UD7
  ENSP ID: ENSP00000434391

SEQ ID NO: 87095 - protein, 521 aa, Homo sapiens
  Payload ID: 17428
  Gene Symbol: TBC1D26
  Gene Name: TBC1 domain family, member 26
  Uniprot ID: Q9HBT8
  ENSP ID: ENSP00000458062
METDLAEMPEKGALSSQDSPHFQEKSTEEGEVAALRLTARSQETVTFKDVAMDFTPEEWGKLDPAQRDVMLENYRNLVSLWLPVSKPESYNLENGKEPLKLERKAPKSSYSDMETRPQSKDSTSVQDFSKAESCKVAIIDRLTRNSVYDSNLEAALECENWLENQQGNQERHLREMFTHMNSLSEETDHKHDVYWKSFNQKSVLITEDRVPKGSYAFHTLEKSLKQKSNLMKKQRTYKEKKPHKCNDCGELFTYHSVLIRHQRVHTGEKPYTCNECGKSFSHRANLTKHQRTHTRILFECSECKKTFTESSSLATHQRIHVGERPYECNECGKGFNRSTHLVQHQLIHTGVKPYECNECDKAFIHSSALIKHQRTHTGEKPYKCQECGKAFSHCSSLTKHQRVHTGEKPYECSECGKTFSQSTHLVQHQRIHTGEKPYECNECGKTFSRSSNFAKHQRIHIGKKPYKCSECGKAFIHSSALIQHQRTHTGEKPFRCNECGKSFKCSSSLIRHQRVHTEEQP

SEQ ID NO: 87096 - protein, 210 aa, Homo sapiens
  Payload ID: 17428
  Gene Symbol: TBC1D26
  Gene Name: TBC1 domain family, member 26
  Uniprot ID: Q86UD7
  ENSP ID: ENSP00000463097
MEMDGDPYNLPAQGQGNIIITKYEQGHRAGAAVDLGHEQVDVRKYTNNLGIVHEMELPHVSALEVKQRRKESKRTNKWQKMLADWTKYRSTKKLSQRVYKVIPLAVRGRAWSLLLDIDRIKSQNPGKYKVMKEKGKRSSRIIHCIQLDVSHTLQKHMMFIQRFGVKQQELCDILVAYSAYNPVSIPGQRYSWDMCPYSQAWVSLGGVATS

SEQ ID NO: 87097 - protein, 52 aa, Homo sapiens
  Payload ID: 17428
  Gene Symbol: TBC1D26
  Gene Name: TBC1 domain family, member 26
  ENSP ID: ENSP00000463606
MEMDGDPYNLPAQGQGNIIITKYEQGHRAGAAVDLGHEQVDVRKYTNNLGIV

SEQ ID NO: 87098 - protein, 66 aa, Homo sapiens
  Payload ID: 17428
  Gene Symbol: TBC1D26
  Gene Name: TBC1 domain family, member 26
  ENSP ID: ENSP00000463783
MEMDGDPYNLPAQGQGNIIITKYEQGHRAGAAVDLGHEQVDVRKYTNNLGIVHEMELPHVSALEVK

SEQ ID NO: 87099 - protein, 13 aa, Homo sapiens
  Payload ID: 17428
  Gene Symbol: TBC1D26
  Gene Name: TBC1 domain family, member 26
  ENSP ID: ENSP00000464068
MEMDGDPYNLPAQ

SEQ ID NO: 87100 - protein, 15 aa, Homo sapiens
  Payload ID: 17428
  Gene Symbol: TBC1D26
  Gene Name: TBC1 domain family, member 26
  ENSP ID: ENSP00000464236
MEMDGDPYNLPAQGQ

SEQ ID NO: 87101 - protein, 210 aa, Homo sapiens; identical to SEQ ID NO: 87096
  Payload ID: 17428
  Gene Symbol: TBC1D26
  Gene Name: TBC1 domain family, member 26
  Uniprot ID: Q86UD7
  ENSP ID: ENSP00000478643

SEQ ID NO: 87102 - protein, 210 aa, Homo sapiens
  Payload ID: 17429
  Gene Symbol: TBC1D28
  Gene Name: TBC1 domain family, member 28
  Uniprot ID: Q2M2D7
  ENSP ID: ENSP00000339973
MEMDEDPDNLPAQGQGNIIITKYEQGHRAGAAVDLGHEQVDVRKYTNNLGIVHEMELPRVSALEVKQRRKESKRTNKWQKMLADWTKYRSTKKLSQRVCKVIPLAVRGRALSLLLDIDKIKSQNPGKYKVMKEKGKRSSRIIHCIQLDVSHTLQKHMMFIQRFGVKQQELCDILVAYSAYNPVSIPGQRYSWYLCPYSQAWVSLGGVATS

SEQ ID NO: 87103 - protein, 210 aa, Homo sapiens; identical to SEQ ID NO: 87102
  Payload ID: 17429
  Gene Symbol: TBC1D28
  Gene Name: TBC1 domain family, member 28
  Uniprot ID: Q2M2D7
  ENSP ID: ENSP00000385821

SEQ ID NO: 87104 - protein, 65 aa, Homo sapiens
  Payload ID: 17429
  Gene Symbol: TBC1D28
  Gene Name: TBC1 domain family, member 28
  ENSP ID: ENSP00000458676
MEMDEDPDNLPAQGQGNIIITKYEQGHRAGAAVDLGHEQVDVRKYTNNLGIVHEMELPRVSALEV

SEQ ID NO: 87105 - protein, 13 aa, Homo sapiens
  Payload ID: 17429
  Gene Symbol: TBC1D28
  Gene Name: TBC1 domain family, member 28
  ENSP ID: ENSP00000460935
MEMDEDPDNLPAQ

SEQ ID NO: 87106 - protein, 52 aa, Homo sapiens
  Payload ID: 17429
  Gene Symbol: TBC1D28
  Gene Name: TBC1 domain family, member 28
  ENSP ID: ENSP00000461503
MEMDEDPDNLPAQGQGNIIITKYEQGHRAGAAVDLGHEQVDVRKYTNNLGIV

SEQ ID NO: 87107 - protein, 15 aa, Homo sapiens
  Payload ID: 17429
  Gene Symbol: TBC1D28
  Gene Name: TBC1 domain family, member 28
  ENSP ID: ENSP00000461684
MEMDEDPDNLPAQGQ

SEQ ID NO: 87108 - protein, 150 aa, Homo sapiens
  Payload ID: 17430
  Gene Symbol: TBC1D29
  Gene Name: TBC1 domain family, member 29
  Uniprot ID: Q9UFV1
  ENSP ID: ENSP00000462799
MGHLDKEGLCTQGSSFSWLLRVLNDGISLGLTPCLWDMYLLEGEQMLMLITSIAFKVQRSLYEETNKETWGPATPRALKGTGRARPICESLHSSLQALTASESSRGPSLLQTPPRVPGQQALSRGDKGISVSLSLPSLPSRRGRCGRIIG

SEQ ID NO: 87109 - protein, 81 aa, Homo sapiens
  Payload ID: 17430
  Gene Symbol: TBC1D29
  Gene Name: TBC1 domain family, member 29
  ENSP ID: ENSP00000463703
MGHLDKEGLCTQGSSFSWLLRVLNDGISLGLTPCLWDMYLLEGEQMLMLITSIAFKVQRRPSRALEEPDPFVRASTPPCKR

SEQ ID NO: 87110 - protein, 150 aa, Homo sapiens; identical to SEQ ID NO: 87108
  Payload ID: 17430
  Gene Symbol: TBC1D29
  Gene Name: TBC1 domain family, member 29
  Uniprot ID: Q9UFV1
  ENSP ID: ENSP00000464450

SEQ ID NO: 87111 - protein, 963 aa, Homo sapiens
  Payload ID: 17431
  Gene Symbol: TBC1D2B
  Gene Name: TBC1 domain family, member 2B
  Uniprot ID: Q9UPU7
  ENSP ID: ENSP00000300584
MPGAGARAEEGGGGGEGAAQGAAAEPGAGPAREPARLCGYLQKLSGKGPLRGYRSRWFVFDARRCYLYYFKSPQDALPLGHLDIADACFSYQGPDEAAEPGTEPPAHFQVHSAGAVTVLKAPNRQLMTYWLQELQQKRWEYCNSLDMVKWDSRTSPTPGDFPKGLVARDNTDLIYPHPNASAEKARNVLAVETVPGELVGEQAANQPAPGHPNSINFYSLKQWGNELKNSMSSFRPGRGHNDSRRTVFYTNEEWELLDPTPKDLEESIVQEEKKKLTPEGNKGVTGSGFPFDFGRNPYKGKRPLKDIIGSYKNRHSSGDPSSEGTSGSGSVSIRKPASEMQLQVQSQQEELEQLKKDLSSQKELVRLLQQTVRSSQYDKYFTSSRLCEGVPKDTLELLHQKDDQILGLTSQLERFSLEKESLQQEVRTLKSKVGELNEQLGMLMETIQAKDEVIIKLSEGEGNGPPPTVAPSSPSVVPVARDQLELDRLKDNLQGYKTQNKFLNKEILELSALRRNAERRERDLMAKYSSLEAKLCQIESKYLILLQEMKTPVCSEDQGPTREVIAQLLEDALQVESQEQPEQAFVKPHLVSEYDIYGFRTVPEDDEEEKLVAKVRALDLKTLYLTENQEVSTGVKWENYFASTVNREMMCSPELKNLIRAGIPHEHRSKVWKWCVDRHTRKFKDNTEPGHFQTLLQKALEKQNPASKQIELDLLRTLPNNKHYSCPTSEGIQKLRNVLLAFSWRNPDIGYCQGLNRLVAVALLYLEQEDAFWCLVTIVEVFMPRDYYTKTLLGSQVDQRVFRDLMSEKLPRLHGHFEQYKVDYTLITFNWFLVVFVDSVVSDILFKIWDSFLYEGPKVIFRFALALFKYKEEEILKLQDSMSIFKYLRYFTRTILDARKLISISFGDLNPFPLRQIRNRRAYHLEKVRLELTELEAIREDFLRERDTSPDKGELVSDEEEDT

SEQ ID NO: 87112 - protein, 914 aa, Homo sapiens
  Payload ID: 17431
  Gene Symbol: TBC1D2B
  Gene Name: TBC1 domain family, member 2B
  Uniprot ID: Q9UPU7
  ENSP ID: ENSP00000387165
MPGAGARAEEGGGGGEGAAQGAAAEPGAGPAREPARLCGYLQKLSGKGPLRGYRSRWFVFDARRCYLYYFKSPQDALPLGHLDIADACFSYQGPDEAAEPGTEPPAHFQVHSAGAVTVLKAPNRQLMTYWLQELQQKRWEYCNSLDMVKWDSRTSPTPGDFPKGLVARDNTDLIYPHPNASAEKARNVLAVETVPGELVGEQAANQPAPGHPNSINFYSLKQWGNELKNSMSSFRPGRGHNDSRRTVFYTNEEWELLDPTPKDLEESIVQEEKKKLTPEGNKGVTGSGFPFDFGRNPYKGKRPLKDIIGSYKNRHSSGDPSSEGTSGSGSVSIRKPASEMQLQVQSQQEELEQLKKDLSSQKELVRLLQQTVRSSQYDKYFTSSRLCEGVPKDTLELLHQKDDQILGLTSQLERFSLEKESLQQEVRTLKSKVGELNEQLGMLMETIQAKDEVIIKLSEGEGNGPPPTVAPSSPSVVPVARDQLELDRLKDNLQGYKTQNKFLNKEILELSALRRNAERRERDLMAKYSSLEAKLCQIESKYLILLQEMKTPVCSEDQGPTREVIAQLLEDALQVESQEQPEQAFVKPHLVSEYDIYGFRTVPEDDEEEKLVAKVRALDLKTLYLTENQEVSTGVKWENYFASTVNREMMCSPELKNLIRAGIPHEHRSKVWKWCVDRHTRKFKDNTEPGHFQTLLQKALEKQNPASKQIELDLLRTLPNNKHYSCPTSEGIQKLRNVLLAFSWRNPDIGYCQGLNRLVAVALLYLEQEDAFWCLVTIVEVFMPRDYYTKTLLGSQVDQRVFRDLMSEKLPRLHGHFEQYKVDYTLITFNWFLVVFVDSVVSDILFKIWDSFLYEGPKVIFRFALALFKYKEEEILKLQDSMSIFKYLRYFTRTILDARSGTDAPTTWRKSGWS

SEQ ID NO: 87113 - protein, 291 aa, Homo sapiens
  Payload ID: 17431
  Gene Symbol: TBC1D2B
  Gene Name: TBC1 domain family, member 2B
  ENSP ID: ENSP00000413666
MITTTKELAPNRQLMTYWLQELQQKRWEYCNSLDMVKWDSRTSPTPGDFPKGLVARDNTDLIYPHPNASAEKARNVLAVETVPGELVGEQAANQPAPGHPNSINFYSLKQWGNELKNSMSSFRPGRGHNDSRRTVFYTNEEWELLDPTPKDLEESIVQEEKKKLTPEGNKGVTGSGFPFDFGRNPYKGKRPLKDIIGSYKNRHSSGDPSSEGTSGSGSVSIRKPASEMQLQVQSQQEELEQLKKDLSSQKELVRLLQQTVRSSQYDKYFTSSRLCEGVPKDTLELLHQKDD

SEQ ID NO: 87114 - protein, 122 aa, Homo sapiens
  Payload ID: 17431
  Gene Symbol: TBC1D2B
  Gene Name: TBC1 domain family, member 2B
  ENSP ID: ENSP00000453114
  MOD_RES (1)..(1): Any amino acid
XCKIRCLYLSISATSLALSLMLGPACRSEQYTLCLCTPRGHGAQPGTGTQVPTAQDPKTLSLPEQHLTACVRMKADLHRHLLAVLLVLIHPLFSYVASPLAVPGGVAECGVLVGWVPRPSAS

SEQ ID NO: 87115 - protein, 549 aa, Homo sapiens
  Payload ID: 17432
  Gene Symbol: TBC1D3
  Gene Name: TBC1 domain family, member 3
  Uniprot ID: Q8IZP1
  ENSP ID: ENSP00000478683
MDVVEVAGSWWAQEREDIIMKYEKGHRAGLPEDKGPKPFRSYNNNVDHLGIVHETELPPLTAREAKQIRREISRKSKWVDMLGDWEKYKSSRKLIDRAYKGMPMNIRGPMWSVLLNTEEMKLKNPGRYQIMKEKGKRSSEHIQRIDRDVSGTLRKHIFFRDRYGTKQRELLHILLAYEEYNPEVGYCRDLSHIAALFLLYLPEEDAFWALVQLLASERHSLQGFHSPNGGTVQGLQDQQEHVVATSQPKTMGHQDKKDLCGQCSPLGCLIRILIDGISLGLTLRLWDVYLVEGEQALMPITRIAFKVQQKRLTKTSRCGPWARFCNRFVDTWARDEDTVLKHLRASMKKLTRKKGDLPPPAKPEQGSSASRPVPASRGGKTLCKGDRQAPPGPPARFPRPIWSASPPRAPRSSTPCPGGAVREDTYPVGTQGVPSPALAQGGPQGSWRFLQWNSMPRLPTDLDVEGPWFRHYDFRQSCWVRAISQEDQLAPCWQAEHPAERVRSAFAAPSTDSDQGTPFRARDEQQCAPTSGPCLCGLHLESSQFPPGF

SEQ ID NO: 87116 - protein, 123 aa, Homo sapiens
  Payload ID: 17433
  Gene Symbol: TBC1D30
  Gene Name: TBC1 domain family, member 30
  ENSP ID: ENSP00000439897
MRQDKLTGSLRRGGRCLKRQGGGVGTILSNVLKKRSCISRTAPRLLCTLEPGVDTKLKFTLEPSLGQNGFQQWYDALKAVARLSTGIPKEWRRKDLHRTGCSSYCGQEAEQDRVVLKRVLLAY

SEQ ID NO: 87117 - protein, 761 aa, Homo sapiens
  Payload ID: 17433
  Gene Symbol: TBC1D30
  Gene Name: TBC1 domain family, member 30
  Uniprot ID: Q9Y2I9
  ENSP ID: ENSP00000440207
MRQDKLTGSLRRGGRCLKRQGGGVGTILSNVLKKRSCISRTAPRLLCTLEPGVDTKLKFTLEPSLGQNGFQQWYDALKAVARLSTGIPKEWRRKVWLTLADHYLHSIAIDWDKTMRFTFNERSNPDDDSMGIQIVKDLHRTGCSSYCGQEAEQDRVVLKRVLLAYARWNKTVGYCQGFNILAALILEVMEGNEGDALKIMIYLIDKVLPESYFVNNLRALSVDMAVFRDLLRMKLPELSQHLDTLQRTANKESGGGYEPPLTNVFTMQWFLTLFATCLPNQTVLKIWDSVFFEGSEIILRVSLAIWAKLGEQIECCETADEFYSTMGRLTQEMLENDLLQSHELMQTVYSMAPFPFPQLAELREKYTYNITPFPATVKPTSVSGRHSKARDSDEENDPDDEDAVVNAVGCLGPFSGFLAPELQKYQKQIKEPNEEQSLRSNNIAELSPGAINSCRSEYHAAFNSMMMERMTTDINALKRQYSRIKKKQQQQVHQVYIRADKGPVTSILPSQVNSSPVINHLLLGKKMKMTNRAAKNAVIHIPGHTGGKISPVPYEDLKTKLNSPWRTHIRVHKKNMPRTKSHPGCGDTVGLIDEQNEASKTNGLGAAEAFPSGCTATAGREGSSPEGSTRRTIEGQSPEPVFGDADVDVSAVQAKLGALELNQRDAAAETELRVHPPCQRHCPEPPSAPEENKATSKAPQGSNSKTPIFSPFPSVKPLRKSATARNLGLYGPTERTPTVHFPQMSRSFSKPGGGNSGTKKR

SEQ ID NO: 87118 - protein, 647 aa, Homo sapiens
  Payload ID: 17433
  Gene Symbol: TBC1D30
  Gene Name: TBC1 domain family, member 30
  ENSP ID: ENSP00000440640
MRFTFNERSNPDDDSMGIQIVKDLHRTGCSSYCGQEAEQDRVVLKRVLLAYARWNKTVGYCQGFNILAALILEVMEGNEGDALKIMIYLIDKVLPESYFVNNLRALSVDMAVFRDLLRMKLPELSQHLDTLQRTANKESGGGYEPPLTNVFTMQWFLTLFATCLPNQTVLKIWDSVFFEGSEIILRVSLAIWAKLGEQIECCETADEFYSTMGRLTQEMLENDLLQSHELMQTVYSMAPFPFPQLAELREKYTYNITPFPATVKPTSVSGRHSKARDSDEENDPDDEDAVVNAVGCLGPFSGFLAPELQKYQKQIKEPNEEQSLRSNNIAELSPGAINSCRSEYHAAFNSMMMERMTTDINALKRQYSRIKKKQQQQVHQVYIRADKGPVTSILPSQVNSSPVINHLLLGKKMKMTNRAAKNAVIHIPGHTGGKISPVPYEDLKTKLNSPWRTHIRVHKKNMPRTKSHPGCGDTVGLIDEQNEASKTNGLGAAEAFPSGCTATAGREGSSPEGSTRRTIEGQSPEPVFGDADVDVSAVQAKLGALELNQRDAAAETELRVHPPCQRHCPEPPSAPEENKATSKAPQGSNSKTPIFSPFPSVKPLRKSATARNLGLYGPTERTPTVHFPQMSRSFSKPGGGNSGTKKR

SEQ ID NO: 87119 - protein, 146 aa, Homo sapiens
  Payload ID: 17433
  Gene Symbol: TBC1D30
  Gene Name: TBC1 domain family, member 30
  ENSP ID: ENSP00000440787
MLYLRQKDANELKTILRELKYRIGIQSAKLLRHLKQKDRLLHKVQRNCDIVTACLQAVSQKRRVDTKLKFTLEPSLGQNGFQQWYDALKAVARLSTGIPKEWRRKVWLTLADHYLHSIAIDWDKTMRFTFNERSNPDDDSMGIQIV

SEQ ID NO: 87120 - protein, 91 aa, Homo sapiens
  Payload ID: 17433
  Gene Symbol: TBC1D30
  Gene Name: TBC1 domain family, member 30
  ENSP ID: ENSP00000442442
MRFTFNERSNPDDDSMGIQIVKDLHRTGCSSYCGQEAEQDRVVLKRVLLAYARWNKTVGYCQGFNILAALILEVMEGNEGDALKIMIYLID

SEQ ID NO: 87121 - protein, 1066 aa, Homo sapiens
  Payload ID: 17434
  Gene Symbol: TBC1D31
  Gene Name: TBC1 domain family, member 31
  Uniprot ID: Q96DN5
  ENSP ID: ENSP00000287380
MQSTDLGNKESGKIWHRKPSPATRDGIIVNIIHNTSDYHPKVLRFLNVAFDGTGDCLIAGDHQGNIYVFDLHGNRFNLVQRTAQACTALAFNLRRKSEFLVALADYSIKCFDTVTKELVSWMRGHESSVFSISVHASGKYAITTSSDTAQLWDLDTFQRKRKLNIRQSVGIQKVFFLPLSNTILSCFKDNSIFAWECDTLFCKYQLPAPPESSSILYKVFAVTRDGRILAAGGKSNHLHLWCLEARQLFRIIQMPTKVRAIRHLEFLPDSFDAGSNQVLGVLSQDGIMRFINMQTCKLLFEIGSLDEGISSSAISPHGRYIASIMENGSLNIYSVQALTQEINKPPPPLVKVIEDLPKNKLSSSDLKMKVTSGRVQQPAKSRESKMQTRILKQDLTGDFESKKNELPDGLNKKRLQILLKGYGEYPTKYRMFIWRSLLQLPENHTAFSTLIDKGTHVAFLNLQKKYPIKSRKLLRVLQRTLSALAHWSVIFSDTPYLPLLAFPFVKLFQNNQLICFEVIATLIINWCQHWFEYFPNPPINILSMIENVLAFHDKELLQHFIDHDITSQLYAWPLLETVFSEVLTREEWLKLFDNIFSNHPSFLLMTVVAYNICSRTPLLSCNLKDDFEFFFHHRNNLDINVVIRQVYHLMETTPTDIHPDSMLNVFVALTKGQYPVFNQYPKFIVDYQTQERERIRNDELDYLRERQTVEDMQAKVDQQRVEDEAWYQKQELLRKAEETRREMLLQEEEKMIQQRQRLAAVKRELKVKEMHLQDAARRRFLKLQQDQQEMELRRLDDEIGRKVYMRDREIAATARDLEMRQLELESQKRLYEKNLTENQEALAKEMRADADAYRRKVDLEEHMFHKLIEAGETQSQKTQKVIKENLAKAEQACLNTDWQIQSLHKQKCDDLQRNKCYQEVAKLLRENRRKEIEIINAMVEEEAKKWKEAEGKEFRLRSAKKASALSDASRKWFLKQEINAAVEHAENPCHKEEPRFQNEQDSSCLPRTSQLNDSSEMDPSTQISLNRRAVEWDTTGQNLIKKVRNLRQRLTARARHRCQTPHLLAA

SEQ ID NO: 87122 - protein, 970 aa, Homo sapiens
  Payload ID: 17434
  Gene Symbol: TBC1D31
  Gene Name: TBC1 domain family, member 31
  Uniprot ID: Q96DN5
  ENSP ID: ENSP00000312701
MQSTDLGNKESGKIWHRKPSPATRDGIIVNIIHNTSDYHPKVLRFLNVAFDGTGDCLIAGDHQGNIYVFDLHGNRFNLVQRTAQACTALAFNLRRKSEFLVALADYSIKCFDTVTKELVSWMRGHESSVFSISVHASGKYAITTSSDTAQLWDLDTFQRKRKLNIRQSVGIQKVFFLPLSNTILSCFKDNSIFAWECDTLFCKYQLPAPPESSSILYKVFAVTRDGRILAAGGKSNHLHLWCLEARQLFRIIQMPTKVRAIRHLEFLPDSFDAGSNQVLGVLSQDGIMRFINMQTCKLLFEIGSLDEGISSSAISPHGRYIASIMENGSLNIYSVQALTQEINKPPPPLVKVIEDLPKNKLSSSDLKMKVTSGRVQQPAKSRESKMQTRILKQDLTGDFESKKNELPDGLNKKRLQILLKGYGEYPTKYRMFIWRSLLQLPENHTAFSTLIDKGTHVAFLNLQKKYPIKSRKLLRVLQRTLSALAHWSVIFSDTPYLPLLAFPFVKLFQNNQLICFEVIATLIINWCQHWFEYFPNPPINILSMIENVLAFHDKELLQHFIDHDITSQLYAWPLLETVFSEVLTREEWLKLFDNIFSNHPSFLLMTVVAYNICSRTPLLSCNLKDDFEFFFHHRNNLDINVVIRQVYHLMETTPTDIHPDSMLNVFVALTKGQYPVFNQYPKFIVDYQTQERERIRNDELDYLRERQTVEDMQAKVDQQRVEDEAWYQKQELLRKAEETRREMLLQEEEKMIQQRQRLAAVKRELKVKEMHLQDAARRRFLKLQQDQQEMELRRLDDEIGRKNLTENQEALAKEMRADADAYRRKVDLEEHMFHKLIEAGETQSQKTQKWKEAEGKEFRLRSAKKASALSDASRKWFLKQEINAAVEHAENPCHKEEPRFQNEQDSSCLPRTSQLNDSSEMDPSTQISLNRRAVEWDTTGQNLIKKVRNLRQRLTARARHRCQTPHLLAA

SEQ ID NO: 87123 - protein, 68 aa, Homo sapiens
  Payload ID: 17434
  Gene Symbol: TBC1D31
  Gene Name: TBC1 domain family, member 31
  ENSP ID: ENSP00000427848
MRGHESSVFSISVHASGKYAITTSSDTAQLWDLDTFQRKRKLNIRQSVGIQKVFFLPLSNTILSCFKD

SEQ ID NO: 87124 - protein, 44 aa, Homo sapiens
  Payload ID: 17434
  Gene Symbol: TBC1D31
  Gene Name: TBC1 domain family, member 31
  ENSP ID: ENSP00000428486
MFLTYMETVTKELVSWMRGHESSVFSISVHASGKYAITTSSDTA

SEQ ID NO: 87125 - protein, 247 aa, Homo sapiens
  Payload ID: 17434
  Gene Symbol: TBC1D31
  Gene Name: TBC1 domain family, member 31
  ENSP ID: ENSP00000428891
MEQNTLPVLWSLHIGVIIVNIIHNTSDYHPKVLRFLNVAFDGTGDCLIAGDHQGNIYVFDLHGNRFNLVQRTAQACTALAFNLRRKSEFLVALADYSIKCFDTVTKELVSWMRGHESSVFSISVHASGKYAITTSSDTAQLWDLDTFQRKRKLNIRQSVGIQKVFFLPLSNTILSCFKDNSIFAWECDTLFCKYQLPAPPESSSILYKVFAVTRDGRILAAGGKSNHLHLWCLEARQLFRIIQMPTK

SEQ ID NO: 87126 - protein, 961 aa, Homo sapiens
  Payload ID: 17434
  Gene Symbol: TBC1D31
  Gene Name: TBC1 domain family, member 31
  ENSP ID: ENSP00000429334
MFLTYMETVTKELVSWMRGHESSVFSISVHASGKYAITTSSDTAQLWDLDTFQRKRKLNIRQSVGIQKVFFLPLSNTILSCFKDNSIFAWECDTLFCKYQLPAPPESSSILYKVFAVTRDGRILAAGGKSNHLHLWCLEARQLFRIIQMPTKVRAIRHLEFLPDSFDAGSNQVLGVLSQDGIMRFINMQTCKLLFEIGSLDEGISSSAISPHGRYIASIMENGSLNIYSVQALTQEINKPPPPLVKVIEDLPKNKLSSSDLKMKVTSGRVQQPAKSRESKMQTRILKQDLTGDFESKKNELPDGLNKKRLQILLKGYGEYPTKYRMFIWRSLLQLPENHTAFSTLIDKGTHVAFLNLQKKYPIKSRKLLRVLQRTLSALAHWSVIFSDTPYLPLLAFPFVKLFQNNQLICFEVIATLIINWCQHWFEYFPNPPINILSMIENVLAFHDKELLQHFIDHDITSQLYAWPLLETVFSEVLTREEWLKLFDNIFSNHPSFLLMTVVAYNICSRTPLLSCNLKDDFEFFFHHRNNLDINVVIRQVYHLMETTPTDIHPDSMLNVFVALTKGQYPVFNQYPKFIVDYQTQERERIRNDELDYLRERQTVEDMQAKVDQQRVEDEAWYQKQELLRKAEETRREMLLQEEEKMIQQRQRLAAVKRELKVKEMHLQDAARRRFLKLQQDQQEMELRRLDDEIGRKVYMRDREIAATARDLEMRQLELESQKRLYEKNLTENQEALAKEMRADADAYRRKVDLEEHMFHKLIEAGETQSQKTQKVIKENLAKAEQACLNTDWQIQSLHKQKCDDLQRNKCYQEVAKLLRENRRKEIEIINAMVEEEAKKWKEAEGKEFRLRSAKKASALSDASRKWFLKQEINAAVEHAENPCHKEEPRFQNEQDSSCLPRTSQLNDSSEMDPSTQISLNRRAVEWDTTGQNLIKKVRNLRQRLTARARHRCQTPHLLAA

SEQ ID NO: 87127 - protein, 620 aa, Homo sapiens
  Payload ID: 17434
  Gene Symbol: TBC1D31
  Gene Name: TBC1 domain family, member 31
  ENSP ID: ENSP00000429494
MKVTSGRVQQPAKSRESKMQTRILKQDLTGDFESKKNELPDGLNKKRLQILLKGYGEYPTKYRMFIWRSLLQLPENHTAFSTLIDKGTHVAFLNLQKKYPIKSRKLLRVLQRTLSALAHWSVIFSDTPYLPLLAFPFVKLFQNNQLICFEVIATLIINWCQHWFEYFPNPPINILSMIENVLAFHDKELLQHFIDHDITSQLYAWPLLETVFSEVLTREEWLKLFDNIFSNHPSFLLMTVVAYNICSRTPLLSCNLKDDFETVEDMQAKVDQQRVEDEAWYQKQELLRKAEETRREMLLQEEEKMIQQRQRLAAVKRELKVKEMHLQDAARRRFLKLQQDQQEMELRRLDDEIGRKVYMRDREIAATARDLEMRQLELESQKRLYEKNLTENQEALAKEMRADADAYRRKVDLEEHMFHKLIEAGETQSQKTQKVIKENLAKAEQACLNTDWQIQSLHKQKCDDLQRNKCYQEVAKLLRENRRKEIEIINAMVEEEAKKWKEAEGKEFRLRSAKKASALSDASRKWFLKQEINAAVEHAENPCHKEEPRFQNEQDSSCLPRTSQLNDSSEMDPSTQISLNRRAVEWDTTGQNLIKKVRNLRQRLTARARHRCQTPHLLAA

SEQ ID NO: 87128 - protein, 943 aa, Homo sapiens
  Payload ID: 17434
  Gene Symbol: TBC1D31
  Gene Name: TBC1 domain family, member 31
  ENSP ID: ENSP00000430628
MFLTYMETVTKELVSWMRGHESSVFSISVHASGKYAITTSSDTAQLWDLDTFQRKRKLNIRQSVGIQKVFFLPLSNTILSCFKDNSIFAWECDTLFCKYQLPAPPESSSILYKVFAVTRDGRILAAGGKSNHLHLWCLEARQLFRIIQMPTKVRAIRHLEFLPDSFDAGSNQVLGVLSQDGIMRFINMQTCKLLFEIGSLDEGISSSAISPHGRYIASIMENGSLNIYSVQALTQEINKPPPPLVKVIEDLPKNKLSSSDLKMKVTSGRVQQPAKSRESKMQTRILKQDLTGDFESKKNELPDGLNKKRLQILLKGYGEYPTKYSTLIDKGTHVAFLNLQKKYPIKSRKLLRVLQRTLSALAHWSVIFSDTPYLPLLAFPFVKLFQNNQLICFEVIATLIINWCQHWFEYFPNPPINILSMIENVLAFHDKELLQHFIDHDITSQLYAWPLLETVFSEVLTREEWLKLFDNIFSNHPSFLLMTVVAYNICSRTPLLSCNLKDDFEFFFHHRNNLDINVVIRQVYHLMETTPTDIHPDSMLNVFVALTKGQYPVFNQYPKFIVDYQTQERERIRNDELDYLRERQTVEDMQAKVDQQRVEDEAWYQKQELLRKAEETRREMLLQEEEKMIQQRQRLAAVKRELKVKEMHLQDAARRRFLKLQQDQQEMELRRLDDEIGRKVYMRDREIAATARDLEMRQLELESQKRLYEKNLTENQEALAKEMRADADAYRRKVDLEEHMFHKLIEAGETQSQKTQKVIKENLAKAEQACLNTDWQIQSLHKQKCDDLQRNKCYQEVAKLLRENRRKEIEIINAMVEEEAKKWKEAEGKEFRLRSAKKASALSDASRKWFLKQEINAAVEHAENPCHKEEPRFQNEQDSSCLPRTSQLNDSSEMDPSTQISLNRRAVEWDTTGQNLIKKVRNLRQRLTARARHRCQTPHLLAA

SEQ ID NO: 87129 - protein, 146 aa, Homo sapiens
  Payload ID: 17434
  Gene Symbol: TBC1D31
  Gene Name: TBC1 domain family, member 31
  ENSP ID: ENSP00000430927
MAPQAVPGHAGRPPPPLVKVIEDLPKNKLSSSDLKMKVTSGRVQQPAKSRESKMQTRILKQDLTGDFESKKNELPDGLNKKRLQILLKGYGEYPTKYRMFIWRSLLQLPENHTAFSTLIDKGTHVAFLNLQKKYPIKSRKLLRVLQ

SEQ ID NO: 87130 - protein, 78 aa, Homo sapiens
  Payload ID: 17434
  Gene Symbol: TBC1D31
  Gene Name: TBC1 domain family, member 31
  ENSP ID: ENSP00000432064
  MOD_RES (1)..(1): Any amino acid
XLNKKRLQILLKGYGEYPTKYRMFIWRSLLQLPENHTAFSTLIDKGTHVAFLNLQKKYPIKSRKLLRVLQSQLVSTLV

SEQ ID NO: 87131 - protein, 155 aa, Homo sapiens
  Payload ID: 17434
  Gene Symbol: TBC1D31
  Gene Name: TBC1 domain family, member 31
  ENSP ID: ENSP00000432525
  MOD_RES (1)..(1): Any amino acid
XDTLFCKYQLPAPPESSSILYKVFAVTRDGRILAAGGKSNHLHLWCLEARQLFRIIQMPTKVRAIRHLEFLPDSFDAGSNQVLGVLSQDGIMRFINMQTCKLLFEIGSLDEGISSSAISPHGRYIASIMENGSLNIYSVQALTQEINKEEVRAQN

SEQ ID NO: 87132 - protein, 80 aa, Homo sapiens
  Payload ID: 17434
  Gene Symbol: TBC1D31
  Gene Name: TBC1 domain family, member 31
  ENSP ID: ENSP00000440772
MQSTDLGNKESGKIWHRKPSPATRDGIIVNIIHNTSDYHPKVLRFLNVAFDGTGDCLIAGDHQGNIYVFDLHGNSHQGAS

SEQ ID NO: 87133 - protein, 1298 aa, Homo sapiens
  Payload ID: 17435
  Gene Symbol: TBC1D32
  Gene Name: TBC1 domain family, member 32
  Uniprot ID: Q96NH3
  ENSP ID: ENSP00000275159
MAHFSSEDQAMLQAMLRRLFQSVKEKITGAPSLECAEEILLHLEETDENFHNYEFVKYLRQHIGNTLGSMIEEEMEKCTSDRNQGEECGYDTVVQQVTKRTQESKEYKEMMHYLKNIMIAVVESMINKFEEDETRNQERQKKIQKEKSHSYRTDNCSDSDSSLNQSYKFCQGKLQLILDQLDPGQPKEVRYEALQTLCSAPPSDVLNCENWTTLCEKLTVSLSDPDPVFSDRILKFCAQTFLLSPLHMTKEIYTSLAKYLESYFLSRENHIPTLSAGVDITNPNMTRLLKKVRLLNEYQKEAPSFWIRHPEKYMEEIVESTLSLLTVKHNQSHVVSQKILDPIYFFALVDTKAVWFKKWMHAHYSRTTVLRLLETKYKSLVTTAIQQCVQYFEMCKTRKADETLGHSKHCRNKQKTFYYLGQELQYIYFIHSLCLLGRLLIYKQGRKLFPIKLKNKKGLVSLIDLLVLFTQLIYYSPSCPKMTSAAHSENYSPASMVTEVLWILSDQKECAVECLYNNIVIETLLQPIHNLMKGNEASPNCSETALIHIAGILARIASVEEGLILLLYGANMNSSEESPTGAHIIAQFSKKLLDEDISIFSGSEMLPVVKGAFISVCRHIYSTCEGLQVLITYNLHESIAKAWKKTSLLSERIPTPVEGSDSVSSVSQESQNIMAWEDNLLDDLLHFAATPKGLLLLQRTGAINECVTFIFNRYAKKLQVSRHKKFGYGVLVTRVASTAAGGIALKKSGFINELITELWSNLEYGRDDVRVTHPRTTPVDPIDRSCQKSFLALVNLLSYPAIYELVRNQDLPNKTEYSLREVPTCVIDIIDRLIILNSEAKIRSLFNYEQSHIFGLRLLSVICCDLDTLLLLEAQYQVSEMLLNAQEENILEISESHRDFIIDGLSVERNHVLVRINLVGGPLERILPPRLLEKSDNPYPWPMFSSYPLPNCYLSDITRNAGIKQDNDLDKLLLCLKISDKQTEWIENCQRQFCKMMKAKPDIISGEALIELLEKFVLHLTESPSECYFPSVEYTATDANVKNESLSSVQQLGIKMTVRYGKFLSLLKDGAENDLTWVLKHCERFLKQQQTSIKSSLLCLQGNYAGHDWFVSSLFMIMLGDKEKTFQFLHQFSRLLTSAFLWLPRLHISSYLPNDTVESGIHPVYFCSTHYIEMLLKAELPLVFSAFHMSGFAPSQICLQWITQCFWNYLDWIEICHYIATCVFLGPDYQVYICIAVFKHLQQDILQHTQTQDLQVFLKEEALHGFRVSDYFEYMEILEQNYRTVLLRDMRNIRLQST

SEQ ID NO: 87134 - protein, 1257 aa, Homo sapiens
  Payload ID: 17435
  Gene Symbol: TBC1D32
  Gene Name: TBC1 domain family, member 32
  Uniprot ID: Q96NH3
  ENSP ID: ENSP00000381270
MAHFSSEDQAMLQAMLRRLFQSVKEKITGAPSLECAEEILLHLEETDENFHNYEFVKYLRQHIGNTLGSMIEEEMEKCTSDRNQGEECGYDTVVQQVTKRTQESKEYKEMMHYLKNIMIAVVESMINKFEEDETRNQERQKKIQKEKSHSYRTDNCSDSDSSLNQSYKFCQGKLQLILDQLDPGQPKEVRYEALQTLCSAPPSDVLNCENWTTLCEKLTVSLSDPDPVFSDRILKFCAQTFLLSPLHMTKEIYTSLAKYLESYFLSRENHIPTLSAGVDITNPNMTRLLKKVRLLNEYQKEAPSFWIRHPEKYMEEIVESTLSLLTVKHNQSHVVSQKILDPIYFFALVDTKAVWFKKWMHAHYSRTTVLRLLETKYKSLVTTAIQQCVQYFEMCKTRKADETLGHSKHCRNKQKTFYYLGQELQYIYFIHSLCLLGRLLIYKQGRKLFPIKLKNKKGLVSLIDLLVLFTQLIYYSPSCPKMTSAAHSENYSPASMVTEVLWILSDQKECAVECLYNNIVIETLLQPIHNLMKGNEASPNCSETALIHIAGILARIASVEEGLILLLYGANMNSSEESPTGAHIIAQFSKKLLDEDISIFSGSEMLPVVKGAFISVCRHIYSTCEGLQVLITYNLHESIAKAWKKTSLLSERIPTPVEGSDSVSSVSQESQNIMAWEDNLLDDLLHFAATPKGLLLLQRTGAINECVTFIFNRYAKKLQVSRHKKFGYGVLVTRVASTAAGGIALKKSGFINELITELWSNLEYGRDDVRVTHPRTTPVDPIDRSCQKSFLALVNLLSYPAIYELVRNQDLPNKTEYSLREVPTCVIDIIDRLIILNSEAKIRSLFNYEQSHIFGLRDFIIDGLSVERNHVLVRINLVGGPLERILPPRLLEKSDNPYPWPMFSSYPLPNCYLSDITRNAGIKQDNDLDKLLLCLKISDKQTEWIENCQRQFCKMMKAKPDIISGEALIELLEKFVLHLTESPSECYFPSVEYTATDANVKNESLSSVQQLGIKMTVRYGKFLSLLKDGAENDLTWVLKHCERFLKQQQTSIKSSLLCLQGNYAGHDWFVSSLFMIMLGDKEKTFQFLHQFSRLLTSAFLWLPRLHISSYLPNDTVESGIHPVYFCSTHYIEMLLKAELPLVFSAFHMSGFAPSQICLQWITQCFWNYLDWIEICHYIATCVFLGPDYQVYICIAVFKHLQQDILQHTQTQDLQVFLKEEALHGFRVSDYFEYMEILEQNYRTVLLRDMRNIRLQST

SEQ ID NO: 87135 - protein, 213 aa, Homo sapiens
  Payload ID: 17435
  Gene Symbol: TBC1D32
  Gene Name: TBC1 domain family, member 32
  ENSP ID: ENSP00000397993
MAHFSSEDQAMLQAMLRRLFQSVKEKITGAPSLECAEEILLHLEETDENFHNYEFVKYLRQHIGNTLGSMIEEEMEKCTSDRNQGEECGYDTVVQQVTKRTQESKEYKEMMHYLKNIMIAVVESMINKFEEDETRNQERQKKIQKEKSHSYRTDNCSDSDSSLNQSYKFCQGKLQLILDQLDPGQPKEVRYEALQTLCSAPPSDVLNCENWTT

SEQ ID NO: 87136 - protein, 108 aa, Homo sapiens
  Payload ID: 17435
  Gene Symbol: TBC1D32
  Gene Name: TBC1 domain family, member 32
  Uniprot ID: Q96NH3
  ENSP ID: ENSP00000428839
MAHFSSEDQAMLQAMLRRLFQSVKEKITGAPSLECAEEILLHLEETDENFHNYEFVKYLRQHIGNTLGSMIEEEMEKCTSDRNQGEECGYDTVVQQVTKRTQESKELP

SEQ ID NO: 87137 - protein, 67 aa, Homo sapiens
  Payload ID: 17435
  Gene Symbol: TBC1D32
  Gene Name: TBC1 domain family, member 32
  ENSP ID: ENSP00000429928
ITRNAGIKQDNDLDKLLLCLKISDKQTEWIENCQRQFCKMMKAKPDIISGEVLPIFRFFLCEIPSRV

SEQ ID NO: 87138 - protein, 549 aa, Homo sapiens
  Payload ID: 17436
  Gene Symbol: TBC1D3B
  Gene Name: TBC1 domain family, member 3B
  ENSP ID: ENSP00000477537
MDVVEVAGSWWAQEREDIIMKYEKGHRAGLPEDKGPKPFRSYNNNVDHLGIVHETELPPLTAREAKQIRREISRKSKWVDMLGDWEKYKSSRKLIDRAYKGMPMNIRGPMWSVLLNIEEMKLKNPGRYQIMKEKGKRSSEHIQRIDRDISGTLRKHMFFRDRYGTKQRELLHILLAYEEYNPEVGYCRDLSHIAALFLLYLPEEDAFWALVQLLASERHSLQGFHSPNGGTVQGLQDQQEHVVATSQSKTMGHQDKKDLCGQCSPLGCLIRILIDGISLGLTLRLWDVYLVEGEQALMPITRIAFKVQQKRLTKTSRCGPWARFCNRFVDTWARDEDTVLKHLRASMKKLTRKQGDLPPPAKPEQGSSASRPVPASRGGKTLCKGDRQAPPGPPAWFPRPIWSASPPRAPRSSTPCPGGAVREDTYPVGTQGVPSPALAQGGPQGSWRFLQWNSMPRLPTDLDVEGPWFRHYDFRQSCWVRAISQEDQLAPCWQAEHPAERVRSAFAAPSTDSDQGTPFRARDEQQCAPTSGPCLCGLHLESSQFPPGF

SEQ ID NO: 87139 - protein, 49 aa, Homo sapiens
  Payload ID: 17436
  Gene Symbol: TBC1D3B
  Gene Name: TBC1 domain family, member 3B
  ENSP ID: ENSP00000478440
MLGDWEKYKSSRKLIDRAYKGMPMNIRGPMWSVLLNIEEMKLKNPGRYQ

SEQ ID NO: 87140 - protein, 549 aa, Homo sapiens
  Payload ID: 17436
  Gene Symbol: TBC1D3B
  Gene Name: TBC1 domain family, member 3B
  Uniprot ID: A6NDS4
  ENSP ID: ENSP00000478473
MDVVEVAGSWWAQEREDIIMKYEKGHRAGLPEDKGPKPFRSYNNNVDHLGIVHETELPPLTAREAKQIRREISRKSKWVDMLGDWEKYKSSRKLIDRAYKGMPMNIRGPMWSVLLNIEEMKLKNPGRYQIMKEKGKRSSEHIQRIDRDISGTLRKHMFFRDRYGTKQRELLHILLAYEEYNPEVGYCRDLSHIAALFLLYLPEEDAFWALVQLLASERHSLQGFHSPNGGTVQGLQDQQEHVVATSQSKTMGHQDKKDLCGQCSPLGCLIRILIDGISLGLTLRLWDVYLVEGEQALMPITRIAFKVQQKRLTKTSRCGPWARFCNRFVDTWARDEDTVLKHLRASMKKLTRKQGDLPPPAKPEQGSSASRPVPASRGRKTLCKGDRQAPPGPPARFPRPIWSASPPRAPRSSTPCPGGAVREDTYPVGTQGVPSPALAQGGPQGSWRFLQWNSMPRLPTDLDVEGPWFRHYDFRQSCWVRAISQEDQLAPCWQAEHPAERVRSAFAAPSTDSDQGTPFRARDEQQCAPTSGPCLCGLHLESSQFPPGF

SEQ ID NO: 87141 - protein, 549 aa, Homo sapiens; identical to SEQ ID NO: 87138
  Payload ID: 17436
  Gene Symbol: TBC1D3B
  Gene Name: TBC1 domain family, member 3B
  ENSP ID: ENSP00000478775

SEQ ID NO: 87142 - protein, 549 aa, Homo sapiens
  Payload ID: 17436
  Gene Symbol: TBC1D3B
  Gene Name: TBC1 domain family, member 3B
  ENSP ID: ENSP00000479135
MDVVEVAGSWWAQEREDIIMKYEKGHRAGLPEDKGPKPFRSYNNNVDHLGIVHETELPPLTAREAKQIRREISRKSKWVDMLGDWEKYKSSRKLIDRAYKGMPMNIRGPMWSVLLNIEEMKLKNPGRYQIMKEKGKRSSEHIQRIDRDISGTLRKHMFFRDRYGTKQRELLHILLAYEEYNPEVGYCRDLSHIAALFLLYFPEEDAFWALVQLLASERHSLQGFHSPNGGTVQGLQDQQEHVVATSQSKTMGHQDKKDLCGQCSPLGCLIRILIDGISLGLTLRLWDVYLVEGEQALMPITRIAFKVQQKRLTKTSRCGPWARFCNRFVDTWARDEDTVLKHLRASMKKLTRKQGDLPPPAKPEQGSSASRPVPASRGGKTLCKGDRQAPPGPPARFPRPIWSASPPRAPRSSTPCPGGAVREDTYPVGTQGVPSPALAQGGPQGSWRFLQWNSMPRLPTDLDVEGPWFRHYDFRQSCWVRAISQEDQLAPCWQAEHPAERVRSAFAAPSTDSDQGTPFRARDEQQYAPTSGPCLCGLHLESSQFPPGF

SEQ ID NO: 87143 - protein, 115 aa, Homo sapiens
  Payload ID: 17436
  Gene Symbol: TBC1D3B
  Gene Name: TBC1 domain family, member 3B
  ENSP ID: ENSP00000479418
MDVVEVAGSWWAQEREDIIMKYEKGHRAGLPEDKGPKPFRSYNNNVDHLGIVQSGQPPFQGQNSSLTPLQVQPEVVRPEVWGPSREPVGMETGLGQAPGRSAVLSASEHKRSGAA

SEQ ID NO: 87144 - protein, 549 aa, Homo sapiens; identical to SEQ ID NO: 87140
  Payload ID: 17436
  Gene Symbol: TBC1D3B
  Gene Name: TBC1 domain family, member 3B
  Uniprot ID: A6NDS4
  ENSP ID: ENSP00000484556

SEQ ID NO: 87145 - protein, 115 aa, Homo sapiens; identical to SEQ ID NO: 87143
  Payload ID: 17436
  Gene Symbol: TBC1D3B
  Gene Name: TBC1 domain family, member 3B
  ENSP ID: ENSP00000487619

SEQ ID NO: 87146 - protein, 549 aa, Homo sapiens; identical to SEQ ID NO: 87142
  Payload ID: 17436
  Gene Symbol: TBC1D3B
  Gene Name: TBC1 domain family, member 3B
  ENSP ID: ENSP00000487654

SEQ ID NO: 87147 - protein, 49 aa, Homo sapiens; identical to SEQ ID NO: 87139
  Payload ID: 17436
  Gene Symbol: TBC1D3B
  Gene Name: TBC1 domain family, member 3B
  ENSP ID: ENSP00000487824

SEQ ID NO: 87148 - protein, 115 aa, Homo sapiens; identical to SEQ ID NO: 87143
  Payload ID: 17436
  Gene Symbol: TBC1D3B
  Gene Name: TBC1 domain family, member 3B
  ENSP ID: ENSP00000488156

SEQ ID NO: 87149 - protein, 49 aa, Homo sapiens; identical to SEQ ID NO: 87139
  Payload ID: 17436
  Gene Symbol: TBC1D3B
  Gene Name: TBC1 domain family, member 3B
  ENSP ID: ENSP00000488670

SEQ ID NO: 87150 - protein, 549 aa, Homo sapiens
  Payload ID: 17437
  Gene Symbol: TBC1D3C
  Gene Name: TBC1 domain family, member 3C
  ENSP ID: ENSP00000480107
MDVVEVAGSWWAQEREDIIMKYEKGHRAGLPEDKGPKPFRSYNNNVDHLGIVHETELPPLTAREAKQIRREISRKSKWVDMLGDWEKYKSSRKLIDRAYKGMPMNIRGPMWSVLLNTEEMKLKNPGRYQIMKEKGKRSSEHIQRIDRDVSGTLRKHIFFRDRYGTKQRELLHILLAYEEYNPEVGYCRDLSHIAALFLLYLPEEDAFWALVQLLASERHSLQGFHSPNGGTVQGLQDQQEHVVATSQPKTMGHQDKKDLCGQCSPLGCLIRILIDGISLGLTLRLWDVYLVEGEQALMPITRIAFKVQQKRLTKTSRCGPWARFCNRFVDTWARDEDTVLKHLRASMKKLTRKQGDLQPPAKPEQGSSASRPVPASRGGKTLCKGDRQAPPGPPARFPRPIWSASPPRAPRSSTPCPGGAVREDTYPVGTQGVPSPALAQGGPQGSWRFLQWNSMPRLPTDLDVEGPWFRHYDFRQSCWVRAISQEDQLAPCWQAEHPAERVRSAFAAPSTDSDQGTPFRARDEQPCAPTSGPCLCGLHLESSQFPPGF

SEQ ID NO: 87151 - protein, 549 aa, Homo sapiens; identical to SEQ ID NO: 87115
  Payload ID: 17437
  Gene Symbol: TBC1D3C
  Gene Name: TBC1 domain family, member 3C
  Uniprot ID: Q6IPX1
  ENSP ID: ENSP00000482345

SEQ ID NO: 87152 - protein, 549 aa, Homo sapiens
  Payload ID: 17438
  Gene Symbol: TBC1D3D
  Gene Name: TBC1 domain family, member 3D
  Uniprot ID: A0A087WVF3
  ENSP ID: ENSP00000478426
MDVVEVAGSWWAQEREDIIMKYEKGHRAGLPEDKGPKPFRSYNNNVDHLGIVHETELPPLTAREAKQIRREISRKSKWVDMLGDWEKYKSSRKLIDRAYKGMPMNIRGPMWSVLLNTEEMKLKNPGRYQIMKEKGKRSSEHIQRIDRDVSGTLRKHIFFRDRYGTKQRELLHILLAYEEYNPEVGYCRDLSHIAALFLLYLPEEDAFWALVQLLASERHSLQGFHSPNGGTVQGLQDQQEHVVATSQPKTMGHQDKKDLCGQCSPLGCLIRILIDGISLGLTLRLWDVYLVEGEQALMPITRIAFKVQQKRLTKTSRCGPWARFCNRFVDTWARDEDTVLKHLRASMKKLTRKQGDLPPPAKPEQGSSASRPVPASRGGKTLCKGDRQAPPGPPARFPRPIWSASPPRAPRSSTPCPGGAVREDTYPVGTQGVPSPALAQGGPQGSWRFLQWNSMPRLPTDLDVEGPWFRHYDFRQSCWVRAISQEDQLAPCWQAEHPAERVRSAFAAPSTDSDQGTPFRARDEQQCAPTSGPCLCGLHLESSQFPPGF

SEQ ID NO: 87153 - protein, 549 aa, Homo sapiens; identical to SEQ ID NO: 87152
  Payload ID: 17438
  Gene Symbol: TBC1D3D
  Gene Name: TBC1 domain family, member 3D
  Uniprot ID: A0A087WVF3
  ENSP ID: ENSP00000479402

SEQ ID NO: 87154 - protein, 549 aa, Homo sapiens
  Payload ID: 17439
  Gene Symbol: TBC1D3E
  Gene Name: TBC1 domain family, member 3E
  Uniprot ID: A0A087X179
  ENSP ID: ENSP00000483965
MDVVEVAGSWWAQEREDIIMKYEKGHRAGLPEDKGPKPFRSYNNNVDHLGIVHETELPPLTAREAKQIRREISRKSKWVDMLGDWEKYKSSRKLIDQAYKGMPMNIRGPMWSVLLNTEEMKLKNPGRYQIMKEKGKKSSEHIQRIDRDVSGTLRKHIFFRDRYGTKQRELLHILLAYEEYNPEVGYCRDLSHIAALFLLYLPEEDAFWALVQLLASERHSLQGFHSPNGGTVQGLQDQQEHVVATSQPKTMGHQDKKDLCGQCSPLGCLIRILIDGISLGLTLRLWDVYLVEGEQALMPITRIAFKVQQKRLTKTSRCGPWARFCNRFVDTWARDEDTVLKHLRASMKKLTRKKGDLPPPAKPEQGSSASRPVPASRGGKTLCKGDRQAPPGPPARFPRPIWSASPPRAPRSSTPCPGGAVREDTYPVGTQGVPSPALAQGGPQGSWRFLQWNSMPRLPTDLDVEGPWFRHYDFRQSCWVRAISQEDQLAPCWQAEHPAERVRSAFAAPSTDSDQGTPFRARDEQQCAPTSGPCLCGLHLESSQFPPGF

SEQ ID NO: 87155 - protein, 549 aa, Homo sapiens; identical to SEQ ID NO: 87115
  Payload ID: 17439
  Gene Symbol: TBC1D3E
  Gene Name: TBC1 domain family, member 3E
  ENSP ID: ENSP00000483991

SEQ ID NO: 87156 - protein, 495 aa, Homo sapiens
  Payload ID: 17440
  Gene Symbol: TBC1D3F
  Gene Name: TBC1 domain family, member 3F
  ENSP ID: ENSP00000477679
MDVVEVAGSWWAQEREDIIMKYEKGHRAGLPEDKGPKPFRSYNNNVDHLGIVHETELPPLTAREAKQIRREISRKSKWVDMLGDWEKYKSSRKLIDRAYKGMPMNIRGPMWSVLLNIEEMKLKNPGRYQIMKEKGKRSSEHIQRIDRDVSGTLRKHIFFRDRYGTKQRELLHILLAYEEYNPEVGYCRDLSHIAALFLLYLPEEDAFWALVQLLASERHSLQGFHSPNGGTVQGLQDQQEHVVATSQPKTMGHQDKKDLCGQCSPLGCLIRILIDGISLGLTLRLWDVYLVEGEQALMPITRIAFKVQQKRLTKTSRCGPWARFCNRFVDTWARDEDTVLKHLRASMKKLTRKKGDVPPPAKPEQGSSASRPVPASRGGKTLCKGDRQAPPGPPARFPRPIWSASPPRAPRSSTPCPGGAVREDTYPVGTQGVPSPALAQGGPQGSWRFLQWNSMPRLPTDLDVEGPWFRHYDFRQSCWVRAISQEDQLAPCWQA

SEQ ID NO: 87157 - protein, 549 aa, Homo sapiens
  Payload ID: 17440
  Gene Symbol: TBC1D3F
  Gene Name: TBC1 domain family, member 3F
  Uniprot ID: A6NER0
  ENSP ID: ENSP00000477822
MDVVEVAGSWWAQEREDIIMKYEKGHRAGLPEDKGPKPFRSYNNNVDHLGIVHETELPPLTAREAKQIRREISRKSKWVDMLGDWEKYKSSRKLIDRAYKGMPMNIRGPMWSVLLNIEEMKLKNPGRYQIMKEKGKRSSEHIQRIDRDVSGTLRKHIFFRDRYGTKQRELLHILLAYEEYNPEVGYCRDLSHIAALFLLYLPEEDAFWALVQLLASERHSLQGFHSPNGGTVQGLQDQQEHVVATSQPKTMGHQDKKDLCGQCSPLGCLIRILIDGISLGLTLRLWDVYLVEGEQALMPITRIAFKVQQKRLTKTSRCGPWARFCNRFVDTWARDEDTVLKHLRASMKKLTRKKGDVPPPAKPEQGSSASRPVPASRGGKTLCKGDRQAPPGPPARFPRPIWSASPPRAPRSSTPCPGGAVREDTYPVGTQGVPSPALAQGGPQGSWRFLQWNSMPRLPTDLDVEGPWFRHYDFRQSCWVRAISQEDQLAPCWQAEHPAERVRSAFAAPSTDSDQGTPFRARDEQQCAPTSGPCLCGLHLESSQFPPGF

SEQ ID NO: 87158 - protein, 549 aa, Homo sapiens
  Payload ID: 17440
  Gene Symbol: TBC1D3F
  Gene Name: TBC1 domain family, member 3F
  ENSP ID: ENSP00000479401
MDVVEVAGSWWAQEREDIIMKYEKGHRAGLPEDKGPKPFRSYNNNVDHLGIVHETELPPLTAREAKQIRREISRKSKWVDMLGDWEKYKSSRKLIDRAYKGMPMNIRGPMWSVLLNIEEMKLKNPGRYQIMKEKGKRSSEHIQRIDRDVSGTLRKHIFFRDRYGTKQRELLHILLAYEEYNPEVGYCRDLSHIAALFLLYLPEEDAFWALVQLLASERHSLQGFHSPNGGTVQGLQDQQEHVVATSQPKTMGHQDKKDLCGQCSPLGCLIRILIDGISLGLTLRLWDVYLVEGEQALMPITRIAFKVQQKRLTKTSRCGPWARFCNRFVDTWARDEDTVLKHLRASMKKLTRKQGDLPPPAKPEQGSSASRPVPASRGGKTLCKGDRQAPPGPPARFPRPIWSASPPRAPRSSTPCPGGAVREDTYPVGTQGVPSPALAQGGPQGSWRFLQWNSMPRLPTDLDVEGPWFRHYDFRQSCWVRAISQEDQLAPCWQAEHPAERVRSAFAAPSTDSDQGTPFRARDEQQCAPTSGPCLCGLHLESSQFPPGF

SEQ ID NO: 87159 - protein, 495 aa, Homo sapiens; identical to SEQ ID NO: 87156
  Payload ID: 17440
  Gene Symbol: TBC1D3F
  Gene Name: TBC1 domain family, member 3F
  ENSP ID: ENSP00000487737

SEQ ID NO: 87160 - protein, 549 aa, Homo sapiens
  Payload ID: 17441
  Gene Symbol: TBC1D3G
  Gene Name: TBC1 domain family, member 3G
  Uniprot ID: Q6DHY5
  ENSP ID: ENSP00000456861
MDVVEVAGSWWAQEREDIIMKYEKGHRAGLPEDKGPKPFRSYNNNVDHLGIVHETELPPLTAREAKQIRREISRKSKWVDMLGDWEKYKSSRKLIDRAYKGMPMNIRGPMWSVLLNIEEMKLKNPGRYQIMKEKGKRSSEHIQRIDRDISGTLRKHMFFRDRYGTKQRELLHILLAYEEYNPEVGYCRDLSHIAALFLLYLPEEDAFWALVQLLASERHSLQGFHSPNGGTVQGLQDQQEHVVATSQPKTMGHQDKKDLCGQCSPLGCLIRILIDGISLGLTLRLWDVYLVEGEQALMPITRIAFKVQQKRLTKTSRCGPWARFCNRFVDTWARDEDTVLKHLRASMKKLTRKQGDLPPPAKPEQGSSASRPVPASRGGKTLCKGDRQAPPGPPARFPRPIWSASPPRAPRSSTPCPGGAVREDTYPVGTQGVPSPALAQGGPQGSWRFLQWNSMPRLPTDLDVEGPWFRHYDFRQSCWVRAISQEDQLAPCWQAEHPAERVRSAFAAPSTDSDQGTPFRARDEQQCAPTSGPCLCGLHLESSQFPPGF

SEQ ID NO: 87161 - protein, 549 aa, Homo sapiens; identical to SEQ ID NO: 87160
  Payload ID: 17441
  Gene Symbol: TBC1D3G
  Gene Name: TBC1 domain family, member 3G
  Uniprot ID: Q6DHY5
  ENSP ID: ENSP00000482403

SEQ ID NO: 87162 - protein, 549 aa, Homo sapiens
  Payload ID: 17442
  Gene Symbol: TBC1D3H
  Gene Name: TBC1 domain family, member 3H
  Uniprot ID: P0C7X1
  ENSP ID: ENSP00000480874
MDVVEVAGSWWAQEREDIIMKYEKGHRAGLPEDKGPKPFRSYNNNVDHLGIVHETELPPLTAREAKQIRREISRKSKWVDMLGDWEKYKSSRKLIDRAYKGMPMNIRGPMWSVLLNTEEMKLKNPGRYQIMKEKGKRSSEHIQRIDRDISGTLRKHMFFRDRYGTKQRELLHILLAYEEYNPEVGYCRDLSHIAALFLLYLPEEDAFWALVQLLASERHSLQGFHSPNGGTVQGLQDQQEHVVATSQPKTMGHQDKKDLCGQCSPLGCLIRILIDGISLGLTLRLWDVYLVEGEQALMPITRIAFKVQQKRLTKTSRCGPWARFCNRFVDTWARDEDTVLKHLRASMKKLTRKQGDLPPPAKPEQGSSASRPVPASRGGKTLCKGDRQAPPGPPARFPRPIWSASPPRAPRSSTPCPGGAVREDTYPVGTQGVPSPALAQGGPQGSWRFLQWNSMPRLPTDLDVEGPWFRHYDFRQSCWVRAISQEDQLAPCWQAEHPAERVRSAFAAPSTDSDQGTPFRARDEQQCAPTSGPCLCGLHLESSQFPPGF

SEQ ID NO: 87163 - protein, 549 aa, Homo sapiens; identical to SEQ ID NO: 87158
  Payload ID: 17442
  Gene Symbol: TBC1D3H
  Gene Name: TBC1 domain family, member 3H
  ENSP ID: ENSP00000481284

SEQ ID NO: 87164 - protein, 549 aa, Homo sapiens; identical to SEQ ID NO: 87162
  Payload ID: 17442
  Gene Symbol: TBC1D3H
  Gene Name: TBC1 domain family, member 3H
  Uniprot ID: P0C7X1
  ENSP ID: ENSP00000481632

SEQ ID NO: 87165 - protein, 549 aa, Homo sapiens; identical to SEQ ID NO: 87162
  Payload ID: 17442
  Gene Symbol: TBC1D3H
  Gene Name: TBC1 domain family, member 3H
  Uniprot ID: P0C7X1
  ENSP ID: ENSP00000482630

SEQ ID NO: 87166 - protein, 549 aa, Homo sapiens
  Payload ID: 17443
  Gene Symbol: TBC1D3I
  Gene Name: TBC1 domain family, member 3I
  ENSP ID: ENSP00000478225
MDVVEVAGSWWAQEREDIIMKYEKGHRAGLPEDKGPKPFRSYNNNVDHLGIVHETELPPLTAREAKQIRREISRKSKWVDMLGDWEKYKSSRKLIDRAYKGMPMNIRGPMWSVLLNTEEMKMKNPGRYQIMKEKGKRSSEHIQRIDRDVSGTLRKHIFFRDRYGTKQRELLHILLAYEEYNPEVGYCRDLSHIAALFLLYLPEEDAFWALVQLLASERHSLQGFHSPNGGTVQGLQDQQEHVVATSQPKTMGHQDKKDLCGQCSPLGCLIRILIDGISLGLTLRLWDVYLVEGEQALMPITRIAFKVQQKRLTKTSRCGPWARFCNRFVDTWARDEDTVLKHLRASMKKLTRKQGDLPPPAKPEQGSSASRPVPASRGGKTLCKGDRQAPPGPPARFPRPIWSASPPRAPRSSTPCPGGAVREDTYPVGTQGVPSPALAQGGPQGSWRFLQWNSMPRLPTDLDVEGPWFRHYDFRQSCWVRAISQEDQLAPCWQAEHPAERVRSAFAAPSTDSDQGTPFRARDEQQCAPTSGPCLCGLHLESSQFPPGF

SEQ ID NO: 87167 - protein, 549 aa, Homo sapiens; identical to SEQ ID NO: 87166
  Payload ID: 17443
  Gene Symbol: TBC1D3I
  Gene Name: TBC1 domain family, member 3I
  ENSP ID: ENSP00000478802

SEQ ID NO: 87168 - protein, 291 aa, Homo sapiens
  Payload ID: 17443
  Gene Symbol: TBC1D3I
  Gene Name: TBC1 domain family, member 3I
  ENSP ID: ENSP00000479137
MDVVEVAGSWWAQEREDIIMKYEKGHRAGLPEDKGPKPFRSYNNNVDHLGIVHETELPPLTAREAKQIRREISRKSKWVDMLGDWEKYKSSRKLIDRAYKGMPMNIRGPMWSVLLNTEEMKMKNPGRYQIMKEKGKRSSEHIQRIDRDVSGTLRKHIFFRDRYGTKQRELLHILLAYEEYNPEVGYCRDLSHIAALFLLYLPEEDAFWALVQLLASERHSLQGFHSPNGGTVQGLQDQQEHVVATSQPKTMGHQSASRRRPGVARGHVFATGSLIPGPGMRTLCSSILGPL

SEQ ID NO: 87169 - protein, 291 aa, Homo sapiens; identical to SEQ ID NO: 87168
  Payload ID: 17443
  Gene Symbol: TBC1D3I
  Gene Name: TBC1 domain family, member 3I
  ENSP ID: ENSP00000479474

SEQ ID NO: 87170 - protein, 291 aa, Homo sapiens; identical to SEQ ID NO: 87168
  Payload ID: 17443
  Gene Symbol: TBC1D3I
  Gene Name: TBC1 domain family, member 3I
  ENSP ID: ENSP00000480410

SEQ ID NO: 87171 - protein, 291 aa, Homo sapiens; identical to SEQ ID NO: 87168
  Payload ID: 17443
  Gene Symbol: TBC1D3I
  Gene Name: TBC1 domain family, member 3I
  ENSP ID: ENSP00000480473

SEQ ID NO: 87172 - protein, 549 aa, Homo sapiens; identical to SEQ ID NO: 87166
  Payload ID: 17443
  Gene Symbol: TBC1D3I
  Gene Name: TBC1 domain family, member 3I
  Uniprot ID: A0A087WXS9
  ENSP ID: ENSP00000481258

SEQ ID NO: 87173 - protein, 291 aa, Homo sapiens; identical to SEQ ID NO: 87168
  Payload ID: 17443
  Gene Symbol: TBC1D3I
  Gene Name: TBC1 domain family, member 3I
  ENSP ID: ENSP00000482914

SEQ ID NO: 87174 - protein, 549 aa, Homo sapiens; identical to SEQ ID NO: 87160
  Payload ID: 17443
  Gene Symbol: TBC1D3I
  Gene Name: TBC1 domain family, member 3I
  ENSP ID: ENSP00000484223

SEQ ID NO: 87175 - protein, 291 aa, Homo sapiens; identical to SEQ ID NO: 87168
  Payload ID: 17443
  Gene Symbol: TBC1D3I
  Gene Name: TBC1 domain family, member 3I
  ENSP ID: ENSP00000487662

SEQ ID NO: 87176 - protein, 549 aa, Homo sapiens
  Payload ID: 17444
  Gene Symbol: TBC1D3K
  Gene Name: TBC1 domain family, member 3K
  Uniprot ID: A0A087X1G2
  ENSP ID: ENSP00000484181
MDVVEVAGSWWAQEREDIIMKYEKGHRAGLPEDKGPKPFRSYNNNVDHLGIVHETELPPLTAREAKQIRREISRKSKWVDMLGDWEKYKSSRKLIDRAYKGMPMNIRGPMWSVLLNIEEMKLKNPGRYQIMKEKGKKSSEHIQRIDRDVSGTLRKHIFFRDRYGTKQRELLHILLAYEEYNPEVGYCRDLSHIAALFLLYLPEEDAFWALVQLLASERHSLQGFHSPNGGTVQGLQDQQEHVVATSQPKTMGHQDKKDLCGQCSPLGCLIRILIDGISLGLTLRLWDVYLVEGEQALMPITRIAFKVQQKRLTKTSRCGPWARFCNRFVDTWARDEDTVLKHLRASMKKLTRKKGDLPPPAKPEQGSSASRPVPASRGGKTLCKGDRQAPPGPPARFPRPIWSASPPRAPRSSTPCPGGAVREDTYPVGTQGVPSPALAQGGPQGSWRFLQWNSMPRLPTDLDVEGPWFRHYDFRQSCWVRAISQEDQLAPCWQAEHPAERVRSAFAAPSTDSDQGTPFRARDEQQCAPTSGPCLCGLHLESSQFPPGF

SEQ ID NO: 87177 - protein, 549 aa, Homo sapiens
  Payload ID: 17444
  Gene Symbol: TBC1D3K
  Gene Name: TBC1 domain family, member 3K
  ENSP ID: ENSP00000484542
MDVVEVAGSWWAQEREDIIMKYEKGHRAGLPEDKGPKPFRSYNNNVDHLGIVHETELPPLTAREAKQIRREISRKSKWVDMLGDWEKYKSSRKLIDRAYKGMPMNIRGPMWSVLLNTEEMKLKNPGRYQIMKEKGKRSSEHIQRIDRDVSGTLRKHIFFRDRYGTKQRELLHILLAYEEYNPEVGYCRDLSHIAALFLLYLPEEDAFWALVQLLASERHSLQGFHSPNGGTVQGLQDQQEHVVATSQPKTMGHQDKKDLCGQCSPLGCLIRILIDGISLGLTLRLWDVYLVEGEQALMPITRIAFKVQQKRLTKTSRCGPWARFCNRFVDTWARDEDTVLKHLRASMKKLTRKQGDLPPPAKPEQGSSASRPVPASRGGKTLCKGDRQAPPGPPARFPRPIWSASPPRAPRSSTPCPGGAVREDTYPVGTQGVPSPALAQGGPQGSWRFLQWNSMPRLPTDLDVEGPWFRHYDFRQSCWVRAISQEDQLAPCWQAEHPAERVRSAFAAPSTDSDQGTPFRARDEQPCAPTSGPCLCGLHLESSQFPPGF

SEQ ID NO: 87178 - protein, 549 aa, Homo sapiens; identical to SEQ ID NO: 87150
  Payload ID: 17445
  Gene Symbol: TBC1D3L
  Gene Name: TBC1 domain family, member 3L
  Uniprot ID: B9A6J9
  ENSP ID: ENSP00000479577

SEQ ID NO: 87179 - protein, 549 aa, Homo sapiens; identical to SEQ ID NO: 87150
  Payload ID: 17445
  Gene Symbol: TBC1D3L
  Gene Name: TBC1 domain family, member 3L
  Uniprot ID: B9A6J9
  ENSP ID: ENSP00000480130

SEQ ID NO: 87180 - protein, 549 aa, Homo sapiens; identical to SEQ ID NO: 87150
  Payload ID: 17445
  Gene Symbol: TBC1D3L
  Gene Name: TBC1 domain family, member 3L
  Uniprot ID: B9A6J9
  ENSP ID: ENSP00000481508

SEQ ID NO: 87181 - protein, 549 aa, Homo sapiens
  Payload ID: 17445
  Gene Symbol: TBC1D3L
  Gene Name: TBC1 domain family, member 3L
  ENSP ID: ENSP00000482811
MDVVEVAGSWWAQEREDIIMKYEKGHRAGLPEDKGPKPFRSYNNNVDHLGIVHETELPPLTAREAKQIRREISRKSKWVDMLGDWEKYKSSRKLIDRAYKGMPMNIRGPMWSVLLNIEEMKLKNPGRYQIMKEKGKRSSEHIQRIDRDVSGTLRKHIFFRDRYGTKQRELLHILLAYEEYNPEVGYCRDLSHIAALFLLYLPEEDAFWALVQLLASERHSLQGFHSPNGGTVQGLQDQQEHVVATSQPKTMGHQDKKDLCGQCSPLGCLIRILIDGISLGLTLRLWDVYLVEGEQALMPITRIAFKVQQKRLTKTSRCGPWARFCNRFVDTWARDEDTVLKHLRASMKKLTRKQGDLPPPAKPEQGSSASRPVPASRGGKTLCKGDRQAPPGPPARFPRPIWSASPPRAPRSSTPCPGGAVREDTYPVGTQGVPSPALAQGGPQGSWRFLQWNSMPRLPTDLDVEGPWFRHYDFRQSCWVRAISQEDQLAPCWQAEHPAERVRSAFAAPSTDSDQGTPFRARDEQPCAPTSGPCLCGLHLESSQFPPGF

SEQ ID NO: 87182 - protein, 1235 aa, Homo sapiens
  Payload ID: 17446
  Gene Symbol: TBC1D4
  Gene Name: TBC1 domain family, member 4
  Uniprot ID: O60343
  ENSP ID: ENSP00000366852
MEPPSCIQDEPFPHPLEPEPGVSAQPGPGKPSDKRFRLWYVGGSCLDHRTTLPMLPWLMAEIRRRSQKPEAGGCGAPAAREVILVLSAPFLRCVPAPGAGASGGTSPSATQPNPAVFIFEHKAQHISRFIHNSHDLTYFAYLIKAQPDDPESQMACHVFRATDPSQVPDVISSIRQLSKAAMKEDAKPSKDNEDAFYNSQKFEVLYCGKVTVTHKKAPSSLIDDCMEKFSLHEQQRLKIQGEQRGPDPGEDLADLEVVVPGSPGDCLPEEADGTDTHLGLPAGASQPALTSSRVCFPERILEDSGFDEQQEFRSRCSSVTGVQRRVHEGSQKSQPRRRHASAPSHVQPSDSEKNRTMLFQVGRFEINLISPDTKSVVLEKNFKDISSCSQGIKHVDHFGFICRESPEPGLSQYICYVFQCASESLVDEVMLTLKQAFSTAAALQSAKTQIKLCEACPMHSLHKLCERIEGLYPPRAKLVIQRHLSSLTDNEQADIFERVQKMKPVSDQEENELVILHLRQLCEAKQKTHVHIGEGPSTISNSTIPENATSSGRFKLDILKNKAKRSLTSSLENIFSRGANRMRGRLGSVDSFERSNSLASEKDYSPGDSPPGTPPASPPSSAWQTFPEEDSDSPQFRRRAHTFSHPPSSTKRKLNLQDGRAQGVRSPLLRQSSSEQCSDGEGRKRTSSTCSNESLSVGGTSVTPRRISWRQRIFLRVASPMNKSPSAMQQQDGLDRNELLPLSPLSPTMEEEPLVVFLSGEDDPEKIEERKKSKELRSLWRKAIHQQILLLRMEKENQKLEASRDELQSRKVKLDYEEVGACQKEVLITWDKKLLNCRAKIRCDMEDIHTLLKEGVPKSRRGEIWQFLALQYRLRHRLPNKQQPPDISYKELLKQLTAQQHAILVDLGRTFPTHPYFSVQLGPGQLSLFNLLKAYSLLDKEVGYCQGISFVAGVLLLHMSEEQAFEMLKFLMYDLGFRKQYRPDMMSLQIQMYQLSRLLHDYHRDLYNHLEENEISPSLYAAPWFLTLFASQFSLGFVARVFDIIFLQGTEVIFKVALSLLSSQETLIMECESFENIVEFLKNTLPDMNTSEMEKIITQVFEMDISKQLHAYEVEYHVLQDELQESSYSCEDSETLEKLERANSQLKRQNMDLLEKLQVAHTKIQALESNLENLLTRETKMKSLIRTLEQEKMAYQKTVEQLRKLLPADALVNCDLLLRDLNCNPNNKAKIGNKP

SEQ ID NO: 87183 - protein, 1298 aa, Homo sapiens
  Payload ID: 17446
  Gene Symbol: TBC1D4
  Gene Name: TBC1 domain family, member 4
  Uniprot ID: O60343
  ENSP ID: ENSP00000366863
MEPPSCIQDEPFPHPLEPEPGVSAQPGPGKPSDKRFRLWYVGGSCLDHRTTLPMLPWLMAEIRRRSQKPEAGGCGAPAAREVILVLSAPFLRCVPAPGAGASGGTSPSATQPNPAVFIFEHKAQHISRFIHNSHDLTYFAYLIKAQPDDPESQMACHVFRATDPSQVPDVISSIRQLSKAAMKEDAKPSKDNEDAFYNSQKFEVLYCGKVTVTHKKAPSSLIDDCMEKFSLHEQQRLKIQGEQRGPDPGEDLADLEVVVPGSPGDCLPEEADGTDTHLGLPAGASQPALTSSRVCFPERILEDSGFDEQQEFRSRCSSVTGVQRRVHEGSQKSQPRRRHASAPSHVQPSDSEKNRTMLFQVGRFEINLISPDTKSVVLEKNFKDISSCSQGIKHVDHFGFICRESPEPGLSQYICYVFQCASESLVDEVMLTLKQAFSTAAALQSAKTQIKLCEACPMHSLHKLCERIEGLYPPRAKLVIQRHLSSLTDNEQADIFERVQKMKPVSDQEENELVILHLRQLCEAKQKTHVHIGEGPSTISNSTIPENATSSGRFKLDILKNKAKRSLTSSLENIFSRGANRMRGRLGSVDSFERSNSLASEKDYSPGDSPPGTPPASPPSSAWQTFPEEDSDSPQFRRRAHTFSHPPSSTKRKLNLQDGRAQGVRSPLLRQSSSEQCSNLSSVRRMYKESNSSSSLPSLHTSFSAPSFTAPSFLKSFYQNSGRLSPQYENEIRQDTASESSDGEGRKRTSSTCSNESLSVGGTSVTPRRISWRQRIFLRVASPMNKSPSAMQQQDGLDRNELLPLSPLSPTMEEEPLVVFLSGEDDPEKIEERKKSKELRSLWRKAIHQQILLLRMEKENQKLEASRDELQSRKVKLDYEEVGACQKEVLITWDKKLLNCRAKIRCDMEDIHTLLKEGVPKSRRGEIWQFLALQYRLRHRLPNKQQPPDISYKELLKQLTAQQHAILVDLGRTFPTHPYFSVQLGPGQLSLFNLLKAYSLLDKEVGYCQGISFVAGVLLLHMSEEQAFEMLKFLMYDLGFRKQYRPDMMSLQIQMYQLSRLLHDYHRDLYNHLEENEISPSLYAAPWFLTLFASQFSLGFVARVFDIIFLQGTEVIFKVALSLLSSQETLIMECESFENIVEFLKNTLPDMNTSEMEKIITQVFEMDISKQLHAYEVEYHVLQDELQESSYSCEDSETLEKLERANSQLKRQNMDLLEKLQVAHTKIQALESNLENLLTRETKMKSLIRTLEQEKMAYQKTVEQLRKLLPADALVNCDLLLRDLNCNPNNKAKIGNKP

SEQ ID NO: 87184 - protein, 1290 aa, Homo sapiens
  Payload ID: 17446
  Gene Symbol: TBC1D4
  Gene Name: TBC1 domain family, member 4
  Uniprot ID: O60343
  ENSP ID: ENSP00000395986
MEPPSCIQDEPFPHPLEPEPGVSAQPGPGKPSDKRFRLWYVGGSCLDHRTTLPMLPWLMAEIRRRSQKPEAGGCGAPAAREVILVLSAPFLRCVPAPGAGASGGTSPSATQPNPAVFIFEHKAQHISRFIHNSHDLTYFAYLIKAQPDDPESQMACHVFRATDPSQVPDVISSIRQLSKAAMKEDAKPSKDNEDAFYNSQKFEVLYCGKVTVTHKKAPSSLIDDCMEKFSLHEQQRLKIQGEQRGPDPGEDLADLEVVVPGSPGDCLPEEADGTDTHLGLPAGASQPALTSSRVCFPERILEDSGFDEQQEFRSRCSSVTGVQRRVHEGSQKSQPRRRHASAPSHVQPSDSEKNRTMLFQVGRFEINLISPDTKSVVLEKNFKDISSCSQGIKHVDHFGFICRESPEPGLSQYICYVFQCASESLVDEVMLTLKQAFSTAAALQSAKTQIKLCEACPMHSLHKLCERIEGLYPPRAKLVIQRHLSSLTDNEQADIFERVQKMKPVSDQEENELVILHLRQLCEAKQKTHVHIGEGPSTISNSTIPENATSSGRFKLDILKNKAKRSLTSSLENIFSRGANRMRGRLGSVDSFERSNSLASEKDYSPGDSPPGTPPASPPSSAWQTFPEEDSDSPQFRRRAHTFSHPPSSTKRKLNLQDGRAQGVRSPLLRQSSSEQCSNLSSVRRMYKESNSSSSLPSLHTSFSAPSFTAPSFLKSFYQNSGRLSPQYENEISDGEGRKRTSSTCSNESLSVGGTSVTPRRISWRQRIFLRVASPMNKSPSAMQQQDGLDRNELLPLSPLSPTMEEEPLVVFLSGEDDPEKIEERKKSKELRSLWRKAIHQQILLLRMEKENQKLEASRDELQSRKVKLDYEEVGACQKEVLITWDKKLLNCRAKIRCDMEDIHTLLKEGVPKSRRGEIWQFLALQYRLRHRLPNKQQPPDISYKELLKQLTAQQHAILVDLGRTFPTHPYFSVQLGPGQLSLFNLLKAYSLLDKEVGYCQGISFVAGVLLLHMSEEQAFEMLKFLMYDLGFRKQYRPDMMSLQIQMYQLSRLLHDYHRDLYNHLEENEISPSLYAAPWFLTLFASQFSLGFVARVFDIIFLQGTEVIFKVALSLLSSQETLIMECESFENIVEFLKNTLPDMNTSEMEKIITQVFEMDISKQLHAYEVEYHVLQDELQESSYSCEDSETLEKLERANSQLKRQNMDLLEKLQVAHTKIQALESNLENLLTRETKMKSLIRTLEQEKMAYQKTVEQLRKLLPADALVNCDLLLRDLNCNPNNKAKIGNKP

SEQ ID NO: 87185 - protein, 282 aa, Homo sapiens
  Payload ID: 17446
  Gene Symbol: TBC1D4
  Gene Name: TBC1 domain family, member 4
  ENSP ID: ENSP00000396932
DNEQADIFERVQKMKPVSDQEENELVILHLRQLCEAKQKTHVHIGEGPSTISNSTIPENATSSGRFKLDILKNKAKRSLTSSLENIFSRGANRMRGRLGSVDSFERSNSLASEKDYSPGDSPPGTPPASPPSSAWQTFPEEDSDSPQFRRRAHTFSHPPSSTKRKLNLQDGRAQGVRSPLLRQSSSEQCSDGEGRKRTSSTCSNESLSVGGTSVTPRRISWRQRIFLRVASPMNKSPSAMQQQDGLDRNELLPLSPLSPTMEEEPLVVFLSGEDDPEKIEER

SEQ ID NO: 87186 - protein, 795 aa, Homo sapiens
  Payload ID: 17447
  Gene Symbol: TBC1D5
  Gene Name: TBC1 domain family, member 5
  Uniprot ID: Q92609
  ENSP ID: ENSP00000253692
MYHSLSETRHPLQPEEQEVGIDPLSSYSNKSGGDSNKNGRRTSSTLDSEGTFNSYRKEWEELFVNNNYLATIRQKGINGQLRSSRFRSICWKLFLCVLPQDKSQWISRIEELRAWYSNIKEIHITNPRKVVGQQDLMINNPLSQDEGSLWNKFFQDKELRSMIEQDVKRTFPEMQFFQQENVRKILTDVLFCYARENEQLLYKQGMHELLAPIVFVLHCDHQAFLHASESAQPSEEMKTVLNPEYLEHDAYAVFSQLMETAEPWFSTFEHDGQKGKETLMTPIPFARPQDLGPTIAIVTKVNQIQDHLLKKHDIELYMHLNRLEIAPQIYGLRWVRLLFGREFPLQDLLVVWDALFADGLSLGLVDYIFVAMLLYIRDALISSNYQTCLGLLMHYPFIGDVHSLILKALFLRDPKRNPRPVTYQFHPNLDYYKARGADLMNKSRTNAKGAPLNINKVSNSLINFGRKLISPAMAPGSAGGPVPGGNSSSSSSVVIPTRTSAEAPSHHLQQQQQQQRLMKSESMPVQLNKGLSSKNISSSPSVESLPGGREFTGSPPSSATKKDSFFSNISRSRSHSKTMGRKESEEELEAQISFLQGQLNDLDAMCKYCAKVMDTHLVNIQDVILQENLEKEDQILVSLAGLKQIKDILKGSLRFNQSQLEAEENEQITIADNHYCSSGQGQGRGQGQSVQMSGAIKQASSETPGCTDRGNSDDFILISKDDDGSSARGSFSGQAQPLRTLRSTSGKSQAPVCSPLVFSDPLMGPASASSSNPSSSPDDDSSKDSGFTIVSPLDI

SEQ ID NO: 87187 - protein, 142 aa, Homo sapiens
  Payload ID: 17447
  Gene Symbol: TBC1D5
  Gene Name: TBC1 domain family, member 5
  ENSP ID: ENSP00000387395
MYHSLSETRHPLQPEEQEVGIDPLSSYSNKSGGDSNKNGRRTSSTLDSEGTFNSYRKEWEELFVNNNYLATIRQKGINGQLRSSRFRSICWKLFLCVLPQDKSQWISRIEELRAWYSNIKEIHITNPRKVVGQQDLMINNPL

SEQ ID NO: 87188 - protein, 110 aa, Homo sapiens
  Payload ID: 17447
  Gene Symbol: TBC1D5
  Gene Name: TBC1 domain family, member 5
  ENSP ID: ENSP00000393882
MYHSLSETRHPLQPEEQEVGIDPLSSYSNKSGGDSNKNGRRTSSTLDSEGTFNSYRKEWEELFVNNNYLATIRQKGINGQLRSSRFRSICWKLFLCVLPQDKSQWISRIE

SEQ ID NO: 87189 - protein, 183 aa, Homo sapiens
  Payload ID: 17447
  Gene Symbol: TBC1D5
  Gene Name: TBC1 domain family, member 5
  ENSP ID: ENSP00000396239
MYHSLSETRHPLQPEEQEVGIDPLSSYSNKSGGDSNKNGRRTSSTLDSEGTFNSYRKEWEELFVNNNYLATIRQKGINGQLRSSRFRSICWKLFLCVLPQDKSQWISRIEELRAWYSNIKEIHITNPRKVVGQQDLMINNPLSQDEGSLWNKFFQDKELRSMIEQDVKRTFPEMQFFQQENVR

SEQ ID NO: 87190 - protein, 32 aa, Homo sapiens
  Payload ID: 17447
  Gene Symbol: TBC1D5
  Gene Name: TBC1 domain family, member 5
  ENSP ID: ENSP00000396850
MYHSLSETRHPLQPEEQEVGIDPLSSYSNKSG

SEQ ID NO: 87191 - protein, 795 aa, Homo sapiens; identical to SEQ ID NO: 87186
  Payload ID: 17447
  Gene Symbol: TBC1D5
  Gene Name: TBC1 domain family, member 5
  Uniprot ID: Q92609
  ENSP ID: ENSP00000398127

SEQ ID NO: 87192 - protein, 140 aa, Homo sapiens
  Payload ID: 17447
  Gene Symbol: TBC1D5
  Gene Name: TBC1 domain family, member 5
  ENSP ID: ENSP00000399967
MYHSLSETRHPLQPEEQEVGIDPLSSYSNKSGGDSNKNGRRTSSTLDSEGTFNSYRKEWEELFVNNNYLATIRQKGINGQLRSSRFRSICWKLFLCVLPQDKSQWISRIEELRAWYSNIKEIHITNPRKVVGQQDLMINN

SEQ ID NO: 87193 - protein, 817 aa, Homo sapiens
  Payload ID: 17447
  Gene Symbol: TBC1D5
  Gene Name: TBC1 domain family, member 5
  Uniprot ID: Q92609
  ENSP ID: ENSP00000402935
MYHSLSETRHPLQPEEQEVGIDPLSSYSNKSGGDSNKNGRRTSSTLDSEGTFNSYRKEWEELFVNNNYLATIRQKGINGQLRSSRFRSICWKLFLCVLPQDKSQWISRIEELRAWYSNIKEIHITNPRKVVGQQDLMINNPLSQDEGSLWNKFFQDKELRSMIEQDVKRTFPEMQFFQQENVRKILTDVLFCYARENEQLLYKQGMHELLAPIVFVLHCDHQAFLHASESAQPSEEMKTVLNPEYLEHDAYAVFSQLMETAEPWFSTFEHDGQKGKETLMTPIPFARPQDLGPTIAIVTKVNQIQDHLLKKHDIELYMHLNRLEIAPQIYGLRWVRLLFGREFPLQDLLVVWDALFADGLSLGLVDYIFVAMLLYIRDALISSNYQTCLGLLMHYPFIGDVHSLILKALFLRDPKRNPRPVTYQFHPNLDYYKARGADLMNKSRTNAKGAPLNINKVSNSLINFGRKLISPAMAPGSAGGPVPGGNSSSSSSVVIPTRTSAEAPSHHLQQQQQQQRLMKSESMPVQLNKGDVVTGSDAQVSVPVQTLTDLQGLSSKNISSSPSVESLPGGREFTGSPPSSATKKDSFFSNISRSRSHSKTMGRKESEEELEAQISFLQGQLNDLDAMCKYCAKVMDTHLVNIQDVILQENLEKEDQILVSLAGLKQIKDILKGSLRFNQSQLEAEENEQITIADNHYCSSGQGQGRGQGQSVQMSGAIKQASSETPGCTDRGNSDDFILISKDDDGSSARGSFSGQAQPLRTLRSTSGKSQAPVCSPLVFSDPLMGPASASSSNPSSSPDDDSSKDSGFTIVSPLDI

SEQ ID NO: 87194 - protein, 40 aa, Homo sapiens
  Payload ID: 17447
  Gene Symbol: TBC1D5
  Gene Name: TBC1 domain family, member 5
  ENSP ID: ENSP00000405886
MYHSLSETRHPLQPEEQEVGIDPLSSYSNKSGGKNGKNYL

SEQ ID NO: 87195 - protein, 30 aa, Homo sapiens
  Payload ID: 17447
  Gene Symbol: TBC1D5
  Gene Name: TBC1 domain family, member 5
  ENSP ID: ENSP00000408603
MYHSLSETRHPLQPEEQEVGIDPLSSYSNK

SEQ ID NO: 87196 - protein, 129 aa, Homo sapiens
  Payload ID: 17447
  Gene Symbol: TBC1D5
  Gene Name: TBC1 domain family, member 5
  ENSP ID: ENSP00000410596
MYHSLSETRHPLQPEEQEVGIDPLSSYSNKSGGDSNKNGRRTSSTLDSEGTFNSYRKEWEELFVNNNYLATIRQKGINGQLRSSRFRSICWKLFLCVLPQDKSQWISRIEELRAWYSNIKEIHITNPRK

SEQ ID NO: 87197 - protein, 40 aa, Homo sapiens; identical to SEQ ID NO: 87194
  Payload ID: 17447
  Gene Symbol: TBC1D5
  Gene Name: TBC1 domain family, member 5
  ENSP ID: ENSP00000411780

SEQ ID NO: 87198 - protein, 593 aa, Homo sapiens
  Payload ID: 17447
  Gene Symbol: TBC1D5
  Gene Name: TBC1 domain family, member 5
  ENSP ID: ENSP00000411925
MLWFLSYRKEWEELFVNNNYLATIRQKGINGQLRSSRFRSICWKLFLCVLPQDKSQWISRIEELRAWYSNIKEIHITNPRKVVGQQDLMINNPLSQDEGSLWNKFFQDKELRSMIEQDVKRTFPEMQFFQQENVRKILTDVLFCYARENEQLLYKQGMHELLAPIVFVLHCDHQAFLHASESAQPSEEMKTVLNPEYLEHDAYAVFSQLMETAEPWFSTFEHDGQKGKETLMTPIPFARPQDLGPTIAIVTKVNQIQDHLLKKHDIELYMHLNRLEIAPQIYGLRWVRLLFGREFPLQDLLVVWDALFADGLSLGLVDYIFVAMLLYIRDALISSNYQTCLGLLMHYPFIGDVHSLILKALFLRDPKRNPRPVTYQFHPNLDYYKARGADLMNKSRTNAKGAPLNINKVSNSLINFGRKLISPAMAPGSAGGPVPGGNSSSSSSVVIPTRTSAEAPSHHLQQQQQQQRLMKSESMPVQLNKGDVVTGSDAQVSVPVQTLTDLQGLSSKNISSSPSVESLPGGREFTGSPPSSATKKDSFFSNISRSRSHSKTMGRKESEEELEAQISFLQGQLNDLDAMCKYCAKVMDTHLGK

SEQ ID NO: 87199 - protein, 74 aa, Homo sapiens
  Payload ID: 17447
  Gene Symbol: TBC1D5
  Gene Name: TBC1 domain family, member 5
  ENSP ID: ENSP00000414159
MYHSLSETRHPLQPEEQEVGIDPLSSYSNKSGGDSNKNGRRTSSTLDSEGTFNSYRKEWEELFVNNNYLATIRQ

SEQ ID NO: 87200 - protein, 40 aa, Homo sapiens; identical to SEQ ID NO: 87194
  Payload ID: 17447
  Gene Symbol: TBC1D5
  Gene Name: TBC1 domain family, member 5
  ENSP ID: ENSP00000414250

SEQ ID NO: 87201 - protein, 79 aa, Homo sapiens
  Payload ID: 17447
  Gene Symbol: TBC1D5
  Gene Name: TBC1 domain family, member 5
  ENSP ID: ENSP00000415379
MYHSLSETRHPLQPEEQEVGIDPLSSYSNKSGGDSNKNGRRTSSTLDSEGTFNSYRKEWEELFVNNNYLATIRQKGING

SEQ ID NO: 87202 - protein, 88 aa, Homo sapiens
  Payload ID: 17447
  Gene Symbol: TBC1D5
  Gene Name: TBC1 domain family, member 5
  ENSP ID: ENSP00000424998
MYHSLSETRHPLQPEEQEVGIDPLSSYSNKSGGDSNKNGRRTSSTLDSEGTFNSYRKEWEELFVNNNYLATIRQKGINGQLRSSRFRS

SEQ ID NO: 87203 - protein, 247 aa, Homo sapiens
  Payload ID: 17448
  Gene Symbol: TBC1D7
  Gene Name: TBC1 domain family, member 7
  Uniprot ID: Q9P0N9
  ENSP ID: ENSP00000343100
MTEDSQRNFRSVYYEKVGFRGVEEKKSLEILLKDDRLDTEKLCTFSQRFPLPSMYRALVWKVLLGILPPHHESHAKVMMYRKEQYLDVLHALKVVRFVSDATPQAEVYLRMYQLESGKLPRSPSFPLPKAFEQYLNLEDGRLLTHLRMCSAAPKLPYDLWFKRCFAGCLPESSLQRVWDKVVSGSCKILVFVAVEILLTFKIKVMALNSAEKITKFLENIPQDSSDAIVSKAIDLWHKHCGTPVHSS

SEQ ID NO: 87204 - protein, 293 aa, Homo sapiens
  Payload ID: 17448
  Gene Symbol: TBC1D7
  Gene Name: TBC1 domain family, member 7
  Uniprot ID: Q9P0N9
  ENSP ID: ENSP00000348813
MTEDSQRNFRSVYYEKVGFRGVEEKKSLEILLKDDRLDTEKLCTFSQRFPLPSMYRALVWKVLLGILPPHHESHAKVMMYRKEQYLDVLHALKVVRFVSDATPQAEVYLRMYQLESGKLPRSPSFPLEPDDEVFLAIAKAMEEMVEDSVDCYWITRRFVNQLNTKYRDSLPQLPKAFEQYLNLEDGRLLTHLRMCSAAPKLPYDLWFKRCFAGCLPESSLQRVWDKVVSGSCKILVFVAVEILLTFKIKVMALNSAEKITKFLENIPQDSSDAIVSKAIDLWHKHCGTPVHSS

SEQ ID NO: 87205 - protein, 130 aa, Homo sapiens
  Payload ID: 17448
  Gene Symbol: TBC1D7
  Gene Name: TBC1 domain family, member 7
  ENSP ID: ENSP00000368593
MTEDSQRNFRSVYYEKVGFRGVEEKKSLEILLKDDRLDTEKLCTFSQRFPLPSMYRALVWKVLLGILPPHHESHAKVMMYRKEQYLDVLHALKVVRFVSDATPQAEVYLRMYQLESGKLPRSPSFPLEPD

SEQ ID NO: 87206 - protein, 293 aa, Homo sapiens; identical to SEQ ID NO: 87204
  Payload ID: 17448
  Gene Symbol: TBC1D7
  Gene Name: TBC1 domain family, member 7
  Uniprot ID: Q9P0N9
  ENSP ID: ENSP00000368602

SEQ ID NO: 87207 - protein, 266 aa, Homo sapiens
  Payload ID: 17448
  Gene Symbol: TBC1D7
  Gene Name: TBC1 domain family, member 7
  Uniprot ID: Q9P0N9
  ENSP ID: ENSP00000368609
MTEDSQRNFRSVYYEKVGFRGVEEKKSLEILLKDDRLGILPPHHESHAKVMMYRKEQYLDVLHALKVVRFVSDATPQAEVYLRMYQLESGKLPRSPSFPLEPDDEVFLAIAKAMEEMVEDSVDCYWITRRFVNQLNTKYRDSLPQLPKAFEQYLNLEDGRLLTHLRMCSAAPKLPYDLWFKRCFAGCLPESSLQRVWDKVVSGSCKILVFVAVEILLTFKIKVMALNSAEKITKFLENIPQDSSDAIVSKAIDLWHKHCGTPVHSS

SEQ ID NO: 87208 - protein, 249 aa, Homo sapiens
  Payload ID: 17448
  Gene Symbol: TBC1D7
  Gene Name: TBC1 domain family, member 7
  ENSP ID: ENSP00000394425
MTEDSQRNFRSVYYEKVGFRGVEEKKSLEILLKDDRLDTEKLCTFSQRFPLPSMYRALVWKVLLGILPPHHESHAKVMMYRKEQYLDVLHALKVVRFVSDATPQAEVYLRMYQLESGKLPRSPSFPLEPDDEVFLAIAKAMEEMVEDSVDCYWITRRFVNQLNTKYRDSLPQLPKAFEQYLNLEDGRLLTHLRMCSAAPKLPYDLWFKRCFAGCLPESSLQRVWDKVVSGSCKILVFVAVEILLTFKIK

SEQ ID NO: 87209 - protein, 136 aa, Homo sapiens
  Payload ID: 17448
  Gene Symbol: TBC1D7
  Gene Name: TBC1 domain family, member 7
  ENSP ID: ENSP00000401339
MTEDSQRNFRSVYYEKVGFRGVEEKKSLEILLKDDRLDTEKLCTFSQRFPLPSMYRALVWKVLLGILPPHHESHAKVMMYRKEQYLDVLHALKVVRFVSDATPQAEVYLRMYQLESGKLPRSPSFPLEPDDEVFLA

SEQ ID NO: 87210 - protein, 179 aa, Homo sapiens
  Payload ID: 17448
  Gene Symbol: TBC1D7
  Gene Name: TBC1 domain family, member 7
  ENSP ID: ENSP00000401438
MTEDSQRNFRSVYYEKVGFRGVEEKKSLEILLKDDRLDTEKLCTFSQRFPLPSMYRALVWKVLLGILPPHHESHAKVMMYRKEQYLDVLHALKVVRFVSDATPQAEVYLRMYQLESGKLPRSPSFPLEPDDEVFLAIAKAMEEMVEDSVDCYWITRRFVNQLNTKYRDSLPQLEGINVG

SEQ ID NO: 87211 - protein, 238 aa, Homo sapiens
  Payload ID: 17448
  Gene Symbol: TBC1D7
  Gene Name: TBC1 domain family, member 7
  ENSP ID: ENSP00000404680
MTEDSQRNFRSVYYEKVGFRGVEEKKSLEILLKDDRLGILPPHHESHAKVMMYRKEQYLDVLHALKVVRFVSDATPQAEVYLRMYQLESGKLPRSPSFPLEPDDEVFLAIAKAMEEMVEDSVDCYWITRRFVNQLNTKYRDSLPQLPKAFEQYLNLEDGRLLTHLRMCSAAPKLPYDLWFKRCFAGCLPESSLQRVWDKVVSGSCKILVFVAVEILLTFKIKVMALNSAEKITKFLEN

SEQ ID NO: 87212 - protein, 194 aa, Homo sapiens
  Payload ID: 17448
  Gene Symbol: TBC1D7
  Gene Name: TBC1 domain family, member 7
  ENSP ID: ENSP00000412102
MTEDSQRNFRSVYYEKVGFRGVEEKKSLEILLKDDRLGILPPHHESHAKVMMYRKEQYLDVLHALKVVRFVSDATPQAEVYLRMYQLESGKLPRSPSFPLEPDDEVFLAIAKAMEEMVEDSVDCYWITRRFVNQLNTKYRDSLPQLPKAFEQYLNLEDGRLLTHLRMCSAAPKLPYDLWFKRCFAGCLPESSLQ

SEQ ID NO: 87213 - protein, 156 aa, Homo sapiens
  Payload ID: 17448
  Gene Symbol: TBC1D7
  Gene Name: TBC1 domain family, member 7
  ENSP ID: ENSP00000414101
MTEDSQRNFRSVYYEKVGFRGVEEKKSLEILLKDDRLDTEKLCTFSQRFPLPSMYRALVWKVLLGILPPHHESHAKVMMYRKEQYLDVLHALKVVRFVSDATPQAEVYLRMYQLESGKLPRSPSFPLEPDDEVFLAIAKAMEEMVEDSVDCYWITR

SEQ ID NO: 87214 - protein, 238 aa, Homo sapiens; identical to SEQ ID NO: 87211
  Payload ID: 17448
  Gene Symbol: TBC1D7
  Gene Name: TBC1 domain family, member 7
  ENSP ID: ENSP00000414292

SEQ ID NO: 87215 - protein, 207 aa, Homo sapiens
  Payload ID: 17448
  Gene Symbol: TBC1D7
  Gene Name: TBC1 domain family, member 7
  ENSP ID: ENSP00000417005
MTEDSQRNFRSVYYEKVGFRGVEEKKSLEILLKDDRLGILPPHHESHAKVMMYRKEQYLDVLHALKVVRFVSDATPQAEVYLRMYQLESGKLPRSPSFPLEPDDEVFLAIAKAMEEMVEDSVDCYWITRRFVNQLNTKYRDSLPQLPKAFEQYLNLEDGRLLTHLRMCSAAPKLPYDLWFKRCFAGCLPESSLQRVWDKVVSGSCKI

SEQ ID NO: 87216 - protein, 199 aa, Homo sapiens
  Payload ID: 17448
  Gene Symbol: TBC1D7
  Gene Name: TBC1 domain family, member 7
  ENSP ID: ENSP00000475191
MTEDSQRNFRSVYYEKVGFRGVEEKKSLEILLKDDRLGILPPHHESHAKVMMYRKEQYLDVLHALKVVRFVSDATPQAEVYLRMYQLESGKLPRSPSFPLEPDDEVFLAIAKAMEEMVEDSVDCYWITRRFVNQLNTKYRDSLPQLPKAFEQYLNLEDGRLLTHLRMCSAAPKLPYDLWFKRCFAGCLPESSLQRQGLG

SEQ ID NO: 87217 - protein, 164 aa, Homo sapiens
  Payload ID: 17448
  Gene Symbol: TBC1D7
  Gene Name: TBC1 domain family, member 7
  ENSP ID: ENSP00000475355
MTEDSQRNFRSVYYEKVGFRGVEEKKSLEILLKDDRLGILPPHHESHAKVMMYRKEQYLDVLHALKVVRFVSDATPQAEVYLRMYQLESGKLPRSPSFPLVSGHFCLTLSSTLDRPILPAFDYIMFCLKNFWWLPVVIRIKVTHLYLAFMAMHILTQPSYFLFF

SEQ ID NO: 87218 - protein, 20 aa, Homo sapiens
  Payload ID: 17448
  Gene Symbol: TBC1D7
  Gene Name: TBC1 domain family, member 7
  ENSP ID: ENSP00000475469
MTEDSQRNFRSVYYEKVGFR

SEQ ID NO: 87219 - protein, 293 aa, Homo sapiens; identical to SEQ ID NO: 87204
  Payload ID: 17448
  Gene Symbol: TBC1D7
  Gene Name: TBC1 domain family, member 7
  Uniprot ID: Q9P0N9
  ENSP ID: ENSP00000475727

SEQ ID NO: 87220 - protein, 152 aa, Homo sapiens
  Payload ID: 17448
  Gene Symbol: TBC1D7
  Gene Name: TBC1 domain family, member 7
  ENSP ID: ENSP00000475795
MTEDSQRNFRSVYYEKVGFRGVEEKKSLEILLKDDRLDTEKLCTFSQRFPLPSMYRALVWKVLLGILPPHHESHAKVMMYRKEQYLDVLHALKVVRFVSDATPQAEVYLRMYQLESGKLPRSPSFPLVSGHFCLTLSSTLDRPILPAFDYIM

SEQ ID NO: 87221 - protein, 87 aa, Homo sapiens
  Payload ID: 17448
  Gene Symbol: TBC1D7
  Gene Name: TBC1 domain family, member 7
  ENSP ID: ENSP00000476109
MTEDSQRNFRSVYYEKVGFRGVEEKKSLEILLKDDRLDTEKLCTFSQRFPLPSMYRALVWKVLLGLEKPAALSGYVIWRQRGNISGT

SEQ ID NO: 87222 - protein, 1140 aa, Homo sapiens
  Payload ID: 17449
  Gene Symbol: TBC1D8
  Gene Name: TBC1 domain family, member 8 (with GRAM domain)
  Uniprot ID: O95759
  ENSP ID: ENSP00000366036
MWLKPEEVLLKNALKLWVTQKSSCYFILQRRRGHGEGGGRLTGRLVGALDAVLDSNARVAPFRILLQVPGSQVYSPIACGATLEEINQHWDWLEQNLLHTLSVFDNKDDIASFVKGKVKALIAEETSSRLAEQEEEPEKFREALVKFEARFNFPEAEKLVTYYSCCCWKGRVPRQGWLYLSINHLCFYSFFLGKELKLVVPWVDIQKLERTSNVFLTDTIRITTQNKERDFSMFLNLDEVFKVMEQLADVTLRRLLDNEVFDLDPDLQEPSQITKRDLEARAQNEFFRAFFRLPRKEKLHAVVDCSLWTPFSRCHTTGRMFASDSYICFASREDGCCKIILPLREVVSIEKMEDTSLLPHPIIVSIRSKVAFQFIELRDRDSLVEALLARLKQVHANHPVHYDTSADDDMASLVFHSTSMCSDHRFGDLEMMSSQNSEESEKEKSPLMHPDALVTAFQQSGSQSPDSRMSREQIKISLWNDHFVEYGRTVCMFRTEKIRKLVAMGIPESLRGRLWLLFSDAVTDLASHPGYYGNLVEESLGKCCLVTEEIERDLHRSLPEHPAFQNETGIAALRRVLTAYAHRNPKIGYCQSMNILTSVLLLYTKEEEAFWLLVAVCERMLPDYFNHRVIGAQVDQSVFEELIKGHLPELAEHMNDLSALASVSLSWFLTLFLSIMPLESAVNVVDCFFYDGIKAIFQLGLAVLEANAEDLCSSKDDGQALMILSRFLDHIKNEDSPGPPVGSHHAFFSDDQEPYPVTDISDLIRDSYEKFGDQSVEQIEHLRYKHRIRVLQGHEDTTKQNVLRVVIPEVSILPEDLEELYDLFKREHMMSCYWEQPRPMASRHDPSRPYAEQYRIDARQFAHLFQLVSPWTCGAHTEILAERTFRLLDDNMDQLIEFKAFVSCLDIMYNGEMNEKIKLLYRLHIPPALTENDRDSQSPLRNPLLSTSRPLVFGKPNGDAVDYQKQLKQMIKDLAKEKDKTEKELPKMSQREFIQFCKTLYSMFHEDPEENDLYQAIATVTTLLLQIGEVGQRGSSSGSCSQECGEELRASAPSPEDSVFADTGKTPQDSQAFPEAAERDWTVSLEHILASLLTEQSLVNFFEKPLDMKSKLENAKINQYNLKTFEMSHQSQSELKLSNL

SEQ ID NO: 87223 - protein, 1155 aa, Homo sapiens
  Payload ID: 17449
  Gene Symbol: TBC1D8
  Gene Name: TBC1 domain family, member 8 (with GRAM domain)
  ENSP ID: ENSP00000386856
MWLKPEEVLLKNALKLWVTQKSSCYFILQRRRGHGEGGGRLTGRLVGALDAVLDSNARVAPFRILLQVPGSQVYSPIACGELLNGSDVYWAIATGATLEEINQHWDWLEQNLLHTLSVFDNKDDIASFVKGKVKALIAEETSSRLAEQEEEPEKFREALVKFEARFNFPEAEKLVTYYSCCCWKGRVPRQGWLYLSINHLCFYSFFLGKELKLVVPWVDIQKLERTSNVFLTDTIRITTQNKERDFSMFLNLDEVFKVMEQLADVTLRRLLDNEVFDLDPDLQEPSQITKRDLEARAQNEFFRAFFRLPRKEKLHAVVDCSLWTPFSRCHTTGRMFASDSYICFASREDGCCKIILPLREVVSIEKMEDTSLLPHPIIVSIRSKVAFQFIELRDRDSLVEALLARLKQVHANHPVHYDTSADDDMASLVFHSTSMCSDHRFGDLEMMSSQNSEESEKEKSPLMHPDALVTAFQQSGSQSPDSRMSREQIKISLWNDHFVEYGRTVCMFRTEKIRKLVAMGIPESLRGRLWLLFSDAVTDLASHPGYYGNLVEESLGKCCLVTEEIERDLHRSLPEHPAFQNETGIAALRRVLTAYAHRNPKIGYCQSMNILTSVLLLYTKEEEAFWLLVAVCERMLPDYFNHRVIGAQVDQSVFEELIKGHLPELAEHMNDLSALASVSLSWFLTLFLSIMPLESAVNVVDCFFYDGIKAIFQLGLAVLEANAEDLCSSKDDGQALMILSRFLDHIKNEDSPGPPVGSHHAFFSDDQEPYPVTDISDLIRDSYEKFGDQSVEQIEHLRYKHRIRVLQGHEDTTKQNVLRVVIPEVSILPEDLEELYDLFKREHMMSCYWEQPRPMASRHDPSRPYAEQYRIDARQFAHLFQLVSPWTCGAHTEILAERTFRLLDDNMDQLIEFKAFVSCLDIMYNGEMNEKIKLLYRLHIPPALTENDRDSQSPLRNPLLSTSRPLVFGKPNGDAVDYQKQLKQMIKDLAKEKDKTEKELPKMSQREFIQFCKTLYSMFHEDPEENDLYQAIATVTTLLLQIGEVGQRGSSSGSCSQECGEELRASAPSPEDSVFADTGKTPQDSQAFPEAAERDWTVSLEHILASLLTEQSLVNFFEKPLDMKSKLENAKINQYNLKTFEMSHQSQSELKLSNL

SEQ ID NO: 87224 - protein, 1114 aa, Homo sapiens
  Payload ID: 17450
  Gene Symbol: TBC1D8B
  Gene Name: TBC1 domain family, member 8B (with GRAM domain)
  ENSP ID: ENSP00000276175
MWLKPEEVLLKNALKLWLMERSNDYFVLQRRRGYGEEGGGGLTGLLVGTLDSVLDSTAKVAPFRILHQTPDSQVYLSIACGANREEITKHWDWLEQNIMKTLSVFDSNEDITNFVQGKIRGLIAEEGKHCFAKEDDPEKFREALLKFEKCFGLPEKEKLVTYYSCSYWKGRVPCQGWLYLSTNFLSFYSFLLGSEIKLIISWDEVSKLEKTSNVILTESIHVCSQGENHYFSMFLHINQTYLLMEQLANYAIRRLFDKETFDNDPVLYNPLQITKRGLENRAHSEQFNAFFRLPKGESLKEVHECFLWVPFSHFNTHGKMCISENYICFASQDGNQCSVIIPLREVLAIDKTNDSSKSVIISIKGKTAFRFHEVKDFEQLVAKLRLRCGAASTQYHDISTESTEPSDNFEVQSLTSQRECSKTVNTEALMTVFHPQNLETLNSKMLKEKMKEQSWKILFAECGRGVSMFRTKKTRDLVVRGIPETLRGELWMLFSGAVNDMATNPDYYTEVVEQSLGTCNLATEEIERDLRRSLPEHPAFQSDTGISALRRVLTAYAYRNPKIGYCQAMNILTSVLLLYAKEEEAFWLLVAVCERMLPDYFNRRIIGALVDQAVFEELIRDHLPQLTEHMTDMTFFSSVSLSWFLTLFISVLPIESAVNVVDCFFYDGIKAILQLGLAILDYNLDKLLTCKDDAEAVTALNRFFDNVTNKDSPLPSNVQQGSNVSDEKTSHTRVDITDLIRESNEKYGNIRYEDIHSMRCRNRLYVIQTLEETTKQNVLRVVSQDVKLSLQELDELYVIFKKELFLSCYWCLGCPVLKHHDPSLPYLEQYQIDCQQFRALYHLLSPWAHSANKDSLALWTFRLLDENSDCLINFKEFSSAIDIMYNGSFTEKLKLLFKLHIPPAYTEVKSKDASKGDELSKEELLYFSQLHVSKPANEKEAESAKHSPEKGKGKIDIQAYLSQWQDELFKKEENIKDLPRMNQSQFIQFSKTLYNLFHEDPEEESLYQAIAVVTSLLLRMEEVGRKLHSPTSSAKGFSGTVCGSGGPSEEKTGSHLEKDPCSFREEPQWSFAFEQILASLLNEPALVRFFEKPIDVKAKLENARISQLRSRTKM

SEQ ID NO: 87225 - protein, 632 aa, Homo sapiens
  Payload ID: 17450
  Gene Symbol: TBC1D8B
  Gene Name: TBC1 domain family, member 8B (with GRAM domain)
  Uniprot ID: Q0IIM8
  ENSP ID: ENSP00000310675
MWLKPEEVLLKNALKLWLMERSNDYFVLQRRRGYGEEGGGGLTGLLVGTLDSVLDSTAKVAPFRILHQTPDSQVYLSIACGANREEITKHWDWLEQNIMKTLSVFDSNEDITNFVQGKIRGLIAEEGKHCFAKEDDPEKFREALLKFEKCFGLPEKEKLVTYYSCSYWKGRVPCQGWLYLSTNFLSFYSFLLGSEIKLIISWDEVSKLEKTSNVILTESIHVCSQGENHYFSMFLHINQTYLLMEQLANYAIRRLFDKETFDNDPVLYNPLQITKRGLENRAHSEQFNAFFRLPKGESLKEVHECFLWVPFSHFNTHGKMCISENYICFASQDGNQCSVIIPLREVLAIDKTNDSSKSVIISIKGKTAFRFHEVKDFEQLVAKLRLRCGAASTQYHDISTELAISSESTEPSDNFEVQSLTSQRECSKTVNTEALMTVFHPQNLETLNSKMLKEKMKEQSWKILFAECGRGVSMFRTKKTRDLVVRGIPETLRGELWMLFSGAVNDMATNPDYYTEVVEQSLGTCNLATEEIERDLRRSLPEHPAFQSDTGISALRRVLTAYAYRNPKIGYCQAMNILTSVLLLYAKEEEAFWLLVAVCERMLPDYFNRRIIGSDDFMPLVRIQGQCVIGEK

SEQ ID NO: 87226 - protein, 1120 aa, Homo sapiens
  Payload ID: 17450
  Gene Symbol: TBC1D8B
  Gene Name: TBC1 domain family, member 8B (with GRAM domain)
  Uniprot ID: Q0IIM8
  ENSP ID: ENSP00000349781
MWLKPEEVLLKNALKLWLMERSNDYFVLQRRRGYGEEGGGGLTGLLVGTLDSVLDSTAKVAPFRILHQTPDSQVYLSIACGANREEITKHWDWLEQNIMKTLSVFDSNEDITNFVQGKIRGLIAEEGKHCFAKEDDPEKFREALLKFEKCFGLPEKEKLVTYYSCSYWKGRVPCQGWLYLSTNFLSFYSFLLGSEIKLIISWDEVSKLEKTSNVILTESIHVCSQGENHYFSMFLHINQTYLLMEQLANYAIRRLFDKETFDNDPVLYNPLQITKRGLENRAHSEQFNAFFRLPKGESLKEVHECFLWVPFSHFNTHGKMCISENYICFASQDGNQCSVIIPLREVLAIDKTNDSSKSVIISIKGKTAFRFHEVKDFEQLVAKLRLRCGAASTQYHDISTELAISSESTEPSDNFEVQSLTSQRECSKTVNTEALMTVFHPQNLETLNSKMLKEKMKEQSWKILFAECGRGVSMFRTKKTRDLVVRGIPETLRGELWMLFSGAVNDMATNPDYYTEVVEQSLGTCNLATEEIERDLRRSLPEHPAFQSDTGISALRRVLTAYAYRNPKIGYCQAMNILTSVLLLYAKEEEAFWLLVAVCERMLPDYFNRRIIGALVDQAVFEELIRDHLPQLTEHMTDMTFFSSVSLSWFLTLFISVLPIESAVNVVDCFFYDGIKAILQLGLAILDYNLDKLLTCKDDAEAVTALNRFFDNVTNKDSPLPSNVQQGSNVSDEKTSHTRVDITDLIRESNEKYGNIRYEDIHSMRCRNRLYVIQTLEETTKQNVLRVVSQDVKLSLQELDELYVIFKKELFLSCYWCLGCPVLKHHDPSLPYLEQYQIDCQQFRALYHLLSPWAHSANKDSLALWTFRLLDENSDCLINFKEFSSAIDIMYNGSFTEKLKLLFKLHIPPAYTEVKSKDASKGDELSKEELLYFSQLHVSKPANEKEAESAKHSPEKGKGKIDIQAYLSQWQDELFKKEENIKDLPRMNQSQFIQFSKTLYNLFHEDPEEESLYQAIAVVTSLLLRMEEVGRKLHSPTSSAKGFSGTVCGSGGPSEEKTGSHLEKDPCSFREEPQWSFAFEQILASLLNEPALVRFFEKPIDVKAKLENARISQLRSRTKM

SEQ ID NO: 87227 - protein, 218 aa, Homo sapiens
  Payload ID: 17450
  Gene Symbol: TBC1D8B
  Gene Name: TBC1 domain family, member 8B (with GRAM domain)
  ENSP ID: ENSP00000396440
  MOD_RES (1)..(1): Any amino acid
XFNRFFDNVTNKDSPLPSNVQQGSNVSDEKTSHTRVDITDLIRESNELRVVSQDVKLSLQELDELYVIFKKELFLSCYWCLGCPVLKHHDPSLPYLEQYQIDCQQFRALYHLLSPWAHSANKDSLALWTFRLLDENSDCLINFKEFSSAIDIMYNGSFTEKLKLLFKLHIPPAYTEVKSKDASKGDELSKEELLYFSQLHVSKPANEKEAESAKHSPE

SEQ ID NO: 87228 - protein, 419 aa, Homo sapiens
  Payload ID: 17450
  Gene Symbol: TBC1D8B
  Gene Name: TBC1 domain family, member 8B (with GRAM domain)
  ENSP ID: ENSP00000421375
MWLKPEEVLLKNALKLWLMERSNDYFVLQRRRGYGEEGGGGLTGLLVGTLDSVLDSTAKVAPFRILHQTPDSQVYLSIACGANREEITKHWDWLEQNIMKTLSVFDSNEDITNFVQGKIRGLIAEEGKHCFAKEDDPEKFREALLKFEKCFGLPEKEKLVTYYSCSYWKGRVPCQGWLYLSTNFLSFYSFLLGSEIKLIISWDEVSKLEKTSNVILTESIHVCSQGENHYFSMFLHINQTYLLMEQLANYAIRRLFDKETFDNDPVLYNPLQITKRGLENRAHSEQFNAFFRLPKGESLKEVHECFLWVPFSHFNTHGKMCISENYICFASQDGNQCSVIIPLREVLAIDKTNDSSKSVIISIKGKTAFRFHEVKDFEQLVAKLRLRCGAASTQYHDISTEVINYTAIKSFGKKGVCLV

SEQ ID NO: 87229 - protein, 22 aa, Homo sapiens
  Payload ID: 17450
  Gene Symbol: TBC1D8B
  Gene Name: TBC1 domain family, member 8B (with GRAM domain)
  ENSP ID: ENSP00000422353
MKTLSVFDSNEDITNFVQGKIR

SEQ ID NO: 87230 - protein, 1266 aa, Homo sapiens
  Payload ID: 17451
  Gene Symbol: TBC1D9
  Gene Name: TBC1 domain family, member 9 (with GRAM domain)
  Uniprot ID: Q6ZT07
  ENSP ID: ENSP00000411197
MWVNPEEVLLANALWITERANPYFILQRRKGHAGDGGGGGGLAGLLVGTLDVVLDSSARVAPYRILYQTPDSLVYWTIACGGSRKEITEHWEWLEQNLLQTLSIFENENDITTFVRGKIQGIIAEYNKINDVKEDDDTEKFKEAIVKFHRLFGMPEEEKLVNYYSCSYWKGKVPRQGWMYLSINHLCFYSFLMGREAKLVIRWVDITQLEKNATLLLPDVIKVSTRSSEHFFSVFLNINETFKLMEQLANIAMRQLLDNEGFEQDRSLPKLKRKSPKKVSALKRDLDARAKSERYRALFRLPKDEKLDGHTDCTLWTPFNKMHILGQMFVSTNYICFTSKEENLCSLIIPLREVTIVEKADSSSVLPSPLSISTRNRMTFLFANLKDRDFLVQRISDFLQQTTSKIYSDKEFAGSYNSSDDEVYSRPSSLVSSSPQRSTSSDADGERQFNLNGNSVPTATQTLMTMYRRRSPEEFNPKLAKEFLKEQAWKIHFAEYGQGICMYRTEKTRELVLKGIPESMRGELWLLLSGAINEKATHPGYYEDLVEKSMGKYNLATEEIERDLHRSLPEHPAFQNEMGIAALRRVLTAYAFRNPNIGYCQAMNIVTSVLLLYAKEEEAFWLLVALCERMLPDYYNTRVVGALVDQGVFEELARDYVPQLYDCMQDLGVISTISLSWFLTLFLSVMPFESAVVVVDCFFYEGIKVIFQLALAVLDANVDKLLNCKDDGEAMTVLGRYLDSVTNKDSTLPPIPHLHSLLSDDVEPYPEVDIFRLIRTSYEKFGTIRADLIEQMRFKQRLKVIQTLEDTTKRNVVRTIVTETSFTIDELEELYALFKAEHLTSCYWGGSSNALDRHDPSLPYLEQYRIDFEQFKGMFALLFPWACGTHSDVLASRLFQLLDENGDSLINFREFVSGLSAACHGDLTEKLKLLYKMHVLPEPSSDQDEPDSAFEATQYFFEDITPECTHVVGLDSRSKQGADDGFVTVSLKPDKGKRANSQENRNYLRLWTPENKSKSKNAKDLPKLNQGQFIELCKTMYNMFSEDPNEQELYHATAAVTSLLLEIGEVGKLFVAQPAKEGGSGGSGPSCHQGIPGVLFPKKGPGQPYVVESVEPLPASLAPDSEEHSLGGQMEDIKLEDSSPRDNGACSSMLISDDDTKDDSSMSSYSVLSAGSHEEDKLHCEDIGEDTVLVRSGQGTAALPRSTSLDRDWAITFEQFLASLLTEPALVKYFDKPVCMMARITSAKNIRMMGKPLTSASDYEISAMSG

SEQ ID NO: 87231 - protein, 1233 aa, Homo sapiens
  Payload ID: 17452
  Gene Symbol: TBC1D9B
  Gene Name: TBC1 domain family, member 9B (with GRAM domain)
  Uniprot ID: Q66K14
  ENSP ID: ENSP00000347375
MWLSPEEVLVANALWVTERANPFFVLQRRRGHGRGGGLTGLLVGTLDVVLDSSARVAPYRILHQTQDSQVYWTVACGSSRKEITKHWEWLENNLLQTLSIFDSEEDITTFVKGKIHGIIAEENKNLQPQGDEDPGKFKEAELKMRKQFGMPEGEKLVNYYSCSYWKGRVPRQGWLYLTVNHLCFYSFLLGKEVSLVVQWVDITRLEKNATLLFPESIRVDTRDQELFFSMFLNIGETFKLMEQLANLAMRQLLDSEGFLEDKALPRPIRPHRNISALKRDLDARAKNECYRATFRLPRDERLDGHTSCTLWTPFNKLHIPGQMFISNNYICFASKEEDACHLIIPLREVTIVEKADSSSVLPSPLSISTKSKMTFLFANLKDRDFLVQRISDFLQKTPSKQPGSIGSRKASVVDPSTESSPAPQEGSEQPASPASPLSSRQSFCAQEAPTASQGLLKLFQKNSPMEDLGAKGAKEKMKEESWHIHFFEYGRGVCMYRTAKTRALVLKGIPESLRGELWLLFSGAWNEMVTHPGYYAELVEKSTGKYSLATEEIERDLHRSMPEHPAFQNELGIAALRRVLTAYAFRNPTIGYCQAMNIVTSVLLLYGSEEEAFWLLVALCERMLPDYYNTRVVGALVDQGIFEELTRDFLPQLSEKMQDLGVISSISLSWFLTLFLSVMPFESAVVIVDCFFYEGIKVILQVALAVLDANMEQLLGCSDEGEAMTMLGRYLDNVVNKQSVSPPIPHLRALLSSSDDPPAEVDIFELLKVSYEKFSSLRAEDIEQMRFKQRLKVIQSLEDTAKRSVVRAIPVDIGFSIEELEDLYMVFKAKHLASQYWGCSRTMAGRRDPSLPYLEQYRIDASQFRELFASLTPWACGSHTPLLAGRMFRLLDENKDSLINFKEFVTGMSGMYHGDLTEKLKVLYKLHLPPALSPEEAESALEAAHYFTEDSSSEEALPQEEQEGSGSEERGEEKGTSSPDYRHYLRMWAKEKEAQKETIKDLPKMNQEQFIELCKTLYNMFSEDPMEQDLYHAIATVASLLLRIGEVGKKFSARTGRKPRDCATEEDEPPAPELHQDAARELQPPAAGDPQAKAGGDTHLGKAPQESQVVVEGGSGEGQGSPSQLLSDDETKDDMSMSSYSVVSTGSLQCEDLADDTVLVGGEACSPTARIGGTVDTDWCISFEQILASILTESVLVNFFEKRVDIGLKIKDQKKVERQFSTASDHEQPGVSG

SEQ ID NO: 87232 - protein, 1250 aa, Homo sapiens
  Payload ID: 17452
  Gene Symbol: TBC1D9B
  Gene Name: TBC1 domain family, member 9B (with GRAM domain)
  Uniprot ID: Q66K14
  ENSP ID: ENSP00000349291
MWLSPEEVLVANALWVTERANPFFVLQRRRGHGRGGGLTGLLVGTLDVVLDSSARVAPYRILHQTQDSQVYWTVACGSSRKEITKHWEWLENNLLQTLSIFDSEEDITTFVKGKIHGIIAEENKNLQPQGDEDPGKFKEAELKMRKQFGMPEGEKLVNYYSCSYWKGRVPRQGWLYLTVNHLCFYSFLLGKEVSLVVQWVDITRLEKNATLLFPESIRVDTRDQELFFSMFLNIGETFKLMEQLANLAMRQLLDSEGFLEDKALPRPIRPHRNISALKRDLDARAKNECYRATFRLPRDERLDGHTSCTLWTPFNKLHIPGQMFISNNYICFASKEEDACHLIIPLREVTIVEKADSSSVLPSPLSISTKSKMTFLFANLKDRDFLVQRISDFLQKTPSKQPGSIGSRKASVVDPSTESSPAPQEGSEQPASPASPLSSRQSFCAQEAPTASQGLLKLFQKNSPMEDLGAKGAKEKMKEESWHIHFFEYGRGVCMYRTAKTRALVLKGIPESLRGELWLLFSGAWNEMVTHPGYYAELVEKSTGKYSLATEEIERDLHRSMPEHPAFQNELGIAALRRVLTAYAFRNPTIGYCQAMNIVTSVLLLYGSEEEAFWLLVALCERMLPDYYNTRVVGALVDQGIFEELTRDFLPQLSEKMQDLGVISSISLSWFLTLFLSVMPFESAVVIVDCFFYEGIKVILQVALAVLDANMEQLLGCSDEGEAMTMLGRYLDNVVNKQSVSPPIPHLRALLSSSDDPPAEVDIFELLKVSYEKFSSLRAEDIEQMRFKQRLKVIQSLEDTAKRSVVRAIPVDIGFSIEELEDLYMVFKAKHLASQYWGCSRTMAGRRDPSLPYLEQYRIDASQFRELFASLTPWACGSHTPLLAGRMFRLLDENKDSLINFKEFVTGMSGMYHGDLTEKLKVLYKLHLPPALSPEEAESALEAAHYFTEDSSSEASPLASDLDLFLPWEAQEALPQEEQEGSGSEERGEEKGTSSPDYRHYLRMWAKEKEAQKETIKDLPKMNQEQFIELCKTLYNMFSEDPMEQDLYHAIATVASLLLRIGEVGKKFSARTGRKPRDCATEEDEPPAPELHQDAARELQPPAAGDPQAKAGGDTHLGKAPQESQVVVEGGSGEGQGSPSQLLSDDETKDDMSMSSYSVVSTGSLQCEDLADDTVLVGGEACSPTARIGGTVDTDWCISFEQILASILTESVLVNFFEKRVDIGLKIKDQKKVERQFSTASDHEQPGVSG

SEQ ID NO: 87233 - protein, 166 aa, Homo sapiens
  Payload ID: 17452
  Gene Symbol: TBC1D9B
  Gene Name: TBC1 domain family, member 9B (with GRAM domain)
  ENSP ID: ENSP00000428441
  MOD_RES (1)..(1): Any amino acid
XAPTASQGLLKLFQKNSPMEDLGAKGAKEKMKEESWHIHFFEYGRGVCMYRTAKTRALVLKGIPESLRGELWLLFSGAWNEMVTHPGYYAELVEKSTGKYSLATEEIERDLHRSMPEHPAFQNELGIAALRRVLTAYAFRNPTIGYCQVCQVRWRRRTCWCKLGRS

SEQ ID NO: 87234 - protein, 65 aa, Homo sapiens
  Payload ID: 17452
  Gene Symbol: TBC1D9B
  Gene Name: TBC1 domain family, member 9B (with GRAM domain)
  ENSP ID: ENSP00000428724
  MOD_RES (1)..(1): Any amino acid
XRNISALKRDLDARAKNECYRATFRLPRDERLDGHTSCTLWTPFNKLHIPGQMFISNNYICFATR

SEQ ID NO: 87235 - protein, 100 aa, Homo sapiens
  Payload ID: 17452
  Gene Symbol: TBC1D9B
  Gene Name: TBC1 domain family, member 9B (with GRAM domain)
  ENSP ID: ENSP00000429361
MWLSPEEVLVANALWVTERANPFFVLQRRRGHGRGGGLTGLLVGTLDVVLDSSARVAPYRILHQTQDSQVYWTVACGNHRRREQEPAAPGRRGPREVQGG

SEQ ID NO: 87236 - protein, 409 aa, Homo sapiens
  Payload ID: 17452
  Gene Symbol: TBC1D9B
  Gene Name: TBC1 domain family, member 9B (with GRAM domain)
  ENSP ID: ENSP00000430293
MVFKAKHLASQYWGCSRTMAGRRDPSLPYLEQYRIDASQFRELFASLTPWACGSHTPLLAGRMFRLLDENKDSLINFKEFVTGMSGMYHGDLTEKLKVLYKLHLPPALSPEEAESALEAAHYFTEDSSSEEALPQEEQEGSGSEERGEEKGTSSPDYRHYLRMWAKEKEAQKETIKDLPKMNQEQFIELCKTLYNMFSEDPMEQDLYHAIATVASLLLRIGEVGKKFSARTGRKPRDCATEEDEPPAPELHQDAARELQPPAAGDPQAKAGGDTHLGKAPQESQVVVEGGSGEGQGSPSQLLSDDETKDDMSMSSYSVVSTGSLQCEDLADDTVLVGGEACSPTARIGGTVDTDWCISFEQILASILTESVLVNFFEKRVDIGLKIKDQKKVERQFSTASDHEQPGVSG

SEQ ID NO: 87237 - protein, 100 aa, Homo sapiens; identical to SEQ ID NO: 87235
  Payload ID: 17452
  Gene Symbol: TBC1D9B
  Gene Name: TBC1 domain family, member 9B (with GRAM domain)
  ENSP ID: ENSP00000486765

SEQ ID NO: 87238 - protein, 557 aa, Homo sapiens
  Payload ID: 17453
  Gene Symbol: TBCCD1
  Gene Name: TBCC domain containing 1
  Uniprot ID: Q9NVR7
  ENSP ID: ENSP00000341652
MDQSRVLLWVKAEPFIVGALQVPPPSKFSLHYLRKISTYVQIRATEGAYPRLYWSTWRHIACGKLQLAKDLAWLYFEIFDSLSMKTPEERLEWSEVLSNCMSEEEVEKQRNQLSVDTLQFLLFLYIQQLNKVSLRTSLIGEEWPSPRNKSQSPDLTEKSNCHNKNWNDYSHQAFVYDHLSDLLELLLDPKQLTASFHSTHSSLVSREAVVALSFLIEGTISRARKIYPLHELALWQPLHADSGFSKISKTFSFYKLETWLRSCLTGNPFGTSACLKSGKKLAWAHQVEGTTKRAKIACNTHVAPRMHRLVVMSQVYKQTLAKSSDTLAGAHVKIHRCNESFIYLLSPLRSVTIEKCRNSIFVLGPVGTTLHLHSCDNVKVIAVCHRLSISSTTGCIFHVLTPTRPLILSGNQTVTFAPFHTHYPMLEDHMARTGLATVPNYWDNPMVVCRENSDTRVFQLLPPCEFYVFIIPFEMEGDTTEIPGGLPSVYQKALGQREQKIQIWQKTVKEAHLTKDQRKQFQVLVENKFYEWLINTGHRQQLDSLVPPAAGSKQAAG

SEQ ID NO: 87239 - protein, 226 aa, Homo sapiens
  Payload ID: 17453
  Gene Symbol: TBCCD1
  Gene Name: TBCC domain containing 1
  ENSP ID: ENSP00000391109
MDQSRVLLWVKAEPFIVGALQVPPPSKFSLHYLRKISTYVQIRATEGAYPRLYWSTWRHIACGKLQLAKDLAWLYFEIFDSLSMKTPEERLEWSEVLSNCMSEEEVEKQRNQLSVDTLQFLLFLYIQQLNKVSLRTSLIGEEWPSPRNKSQSPDLTEKSNCHNKNWNDYSHQAFVYDHLSDLLELLLDPKQLTASFHSTHSSLVSREAVVALSFLIEGTISRARKI

SEQ ID NO: 87240 - protein, 461 aa, Homo sapiens
  Payload ID: 17453
  Gene Symbol: TBCCD1
  Gene Name: TBCC domain containing 1
  Uniprot ID: Q9NVR7
  ENSP ID: ENSP00000397091
MTDRLKFGFGFHRFLVLSVDTLQFLLFLYIQQLNKVSLRTSLIGEEWPSPRNKSQSPDLTEKSNCHNKNWNDYSHQAFVYDHLSDLLELLLDPKQLTASFHSTHSSLVSREAVVALSFLIEGTISRARKIYPLHELALWQPLHADSGFSKISKTFSFYKLETWLRSCLTGNPFGTSACLKSGKKLAWAHQVEGTTKRAKIACNTHVAPRMHRLVVMSQVYKQTLAKSSDTLAGAHVKIHRCNESFIYLLSPLRSVTIEKCRNSIFVLGPVGTTLHLHSCDNVKVIAVCHRLSISSTTGCIFHVLTPTRPLILSGNQTVTFAPFHTHYPMLEDHMARTGLATVPNYWDNPMVVCRENSDTRVFQLLPPCEFYVFIIPFEMEGDTTEIPGGLPSVYQKALGQREQKIQIWQKTVKEAHLTKDQRKQFQVLVENKFYEWLINTGHRQQLDSLVPPAAGSKQAAG

SEQ ID NO: 87241 - protein, 148 aa, Homo sapiens
  Payload ID: 17453
  Gene Symbol: TBCCD1
  Gene Name: TBCC domain containing 1
  ENSP ID: ENSP00000407506
MDQSRVLLWVKAEPFIVGALQVPPPSKFSLHYLRKISTYVQIRATEGAYPRLYWSTWRHIACGKLQLAKDLAWLYFEIFDSLSMKTPEERLEWSEVLSNCMSEEEVEKQRNQLNKVSLRTSLIGEEWPSPRNKSQSPDLTEKSNCHNK

SEQ ID NO: 87242 - protein, 557 aa, Homo sapiens; identical to SEQ ID NO: 87238
  Payload ID: 17453
  Gene Symbol: TBCCD1
  Gene Name: TBCC domain containing 1
  Uniprot ID: Q9NVR7
  ENSP ID: ENSP00000411253

SEQ ID NO: 87243 - protein, 615 aa, Homo sapiens
  Payload ID: 17454
  Gene Symbol: TBKBP1
  Gene Name: TBK1 binding protein 1
  Uniprot ID: A7MCY6
  ENSP ID: ENSP00000354777
MESMFEDDISILTQEALGPSEVWLDSPGDPSLGGDMCSASHFALITAYGDIKERLGGLERENATLRRRLKVYEIKYPLISDFGEEHGFSLYEIKDGSLLEVEKVSLQQRLNQFQHELQKNKEQEEQLGEMIQAYEKLCVEKSDLETELREMRALVETHLRQICGLEQQLRQQQGLQDAAFSNLSPPPAPAPPCTDLDLHYLALRGGSGLSHAGWPGSTPSVSDLERRRLEEALEAAQGEARGAQLREEQLQAECERLQGELKQLQETRAQDLASNQSERDMAWVKRVGDDQVNLALAYTELTEELGRLRELSSLQGRILRTLLQEQARSGGQRHSPLSQRHSPAPQCPSPSPPARAAPPCPPCQSPVPQRRSPVPPCPSPQQRRSPASPSCPSPVPQRRSPVPPSCQSPSPQRRSPVPPSCPAPQPRPPPPPPPGERTLAERAYAKPPSHHVKAGFQGRRSYSELAEGAAYAGASPPWLQAEAATLPKPRAYGSELYGPGRPLSPRRAFEGIRLRFEKQPSEEDEWAVPTSPPSPEVGTIRCASFCAGFPIPESPAATAYAHAEHAQSWPSINLLMETVGSDIRSCPLCQLGFPVGYPDDALIKHIDSHLENSKI

SEQ ID NO: 87244 - protein, 208 aa, Homo sapiens
  Payload ID: 17454
  Gene Symbol: TBKBP1
  Gene Name: TBK1 binding protein 1
  ENSP ID: ENSP00000446365
MESMFEDDISILTQEALGPSEVWLDSPGDPSLGGDMCSASHFALITAYGDIKERLGGLERENATLRRRLKVYEIKYPLISDFGEEHGFSLYEIKDGSLLEVEKVSLQQRLNQFQHELQKNKEQEEQLGEMIQAYEKLCVEKSDLETELREMRALVETHLRQICGLEQQLRQQQGLQDAAFSNLSPPPAPAPPCTDLDLHYLALRGGSG

SEQ ID NO: 87245 - protein, 195 aa, Homo sapiens
  Payload ID: 17454
  Gene Symbol: TBKBP1
  Gene Name: TBK1 binding protein 1
  ENSP ID: ENSP00000462339
MESMFEDDISILTQEALGPSEVWLDSPGDPSLGGDMCSASHFALITAYGDIKERLGGLERENATLRRRLKVYEIKYPLISDFGEEHGFSLYEIKDGSLLEVEKVSLQQRLNQFQHELQKNKEQEEQLGEMIQAYEKLCVEKSDLETELREMRALVETHLRQICGLEQQLRQQQGLQDAAFSNLSPPPAPAPPCTD

SEQ ID NO: 87246 - protein, 222 aa, Homo sapiens
  Payload ID: 17454
  Gene Symbol: TBKBP1
  Gene Name: TBK1 binding protein 1
  Uniprot ID: A7MCY6
  ENSP ID: ENSP00000484395
MESMFEDDISILTQEALGPSEVWLDSPGDPSLGGDMCSASHFALITAYGDIKERLGGLERENATLRRRLKVYEIKYPLISDFGEEHGFSLYEIKDGSLLEVEKVSLQQRLNQFQHELQKNKEQEEQLGEMIQAYEKLCVEKSDLETELREMRALVETHLRQICGLEQQLRQQQGLQDAAFSNLSPRRARAVLAVHQLADGDGGLRHPQLPPLPAGFPCRVPG

SEQ ID NO: 87247 - protein, 398 aa, Homo sapiens
  Payload ID: 17455
  Gene Symbol: TBX1
  Gene Name: T-box 1
  Uniprot ID: O43435
  ENSP ID: ENSP00000331176
MHFSTVTRDMEAFTASSLSSLGAAGGFPGAASPGADPYGPREPPPPPPRYDPCAAAAPGAPGPPPPPHAYPFAPAAGAATSAAAEPEGPGASCAAAAKAPVKKNAKVAGVSVQLEMKALWDEFNQLGTEMIVTKAGRRMFPTFQVKLFGMDPMADYMLLMDFVPVDDKRYRYAFHSSSWLVAGKADPATPGRVHYHPDSPAKGAQWMKQIVSFDKLKLTNNLLDDNGHIILNSMHRYQPRFHVVYVDPRKDSEKYAEENFKTFVFEETRFTAVTAYQNHRITQLKIASNPFAKGFRDCDPEDWPRNHRPGALPLMSAFARSRNPVASPTQPSGTEKGGHVLKDKEVKAETSRNTPEREVELLRDAGGCVNLGLPCPAECQPFNTQGLVAGRTAGDRLC

SEQ ID NO: 87248 - protein, 495 aa, Homo sapiens
  Payload ID: 17455
  Gene Symbol: TBX1
  Gene Name: T-box 1
  Uniprot ID: O43435
  ENSP ID: ENSP00000331791
MHFSTVTRDMEAFTASSLSSLGAAGGFPGAASPGADPYGPREPPPPPPRYDPCAAAAPGAPGPPPPPHAYPFAPAAGAATSAAAEPEGPGASCAAAAKAPVKKNAKVAGVSVQLEMKALWDEFNQLGTEMIVTKAGRRMFPTFQVKLFGMDPMADYMLLMDFVPVDDKRYRYAFHSSSWLVAGKADPATPGRVHYHPDSPAKGAQWMKQIVSFDKLKLTNNLLDDNGHIILNSMHRYQPRFHVVYVDPRKDSEKYAEENFKTFVFEETRFTAVTAYQNHRITQLKIASNPFAKGFRDCDPEDWPRNHRPGALPLMSAFARSRNPVASPTQPSGTEKDAAEARREFQRDAGGPAVLGDPAHPPQLLARVLSPSLPGAGGAGGLVPLPGAPGGRPSPPNPELRLEAPGASEPLHHHPYKYPAAAYDHYLGAKSRPAPYPLPGLRGHGYHPHAHPHHHHHPVSPAAAAAAAAAAAAAAANMYSSAGAAPPGSYDYCPR

SEQ ID NO: 87249 - protein, 372 aa, Homo sapiens
  Payload ID: 17455
  Gene Symbol: TBX1
  Gene Name: T-box 1
  Uniprot ID: O43435
  ENSP ID: ENSP00000352483
MHFSTVTRDMEAFTASSLSSLGAAGGFPGAASPGADPYGPREPPPPPPRYDPCAAAAPGAPGPPPPPHAYPFAPAAGAATSAAAEPEGPGASCAAAAKAPVKKNAKVAGVSVQLEMKALWDEFNQLGTEMIVTKAGRRMFPTFQVKLFGMDPMADYMLLMDFVPVDDKRYRYAFHSSSWLVAGKADPATPGRVHYHPDSPAKGAQWMKQIVSFDKLKLTNNLLDDNGHIILNSMHRYQPRFHVVYVDPRKDSEKYAEENFKTFVFEETRFTAVTAYQNHRITQLKIASNPFAKGFRDCDPEDWPRNHRPGALPLMSAFARSRNPVASPTQPSGTEKGLVTEGSGLQPGLLDVLLKPPSKKSESLRPPHCKDT

SEQ ID NO: 87250 - protein, 372 aa, Homo sapiens; identical to SEQ ID NO: 87249
  Payload ID: 17455
  Gene Symbol: TBX1
  Gene Name: T-box 1
  Uniprot ID: O43435
  ENSP ID: ENSP00000477982

SEQ ID NO: 87251 - protein, 385 aa, Homo sapiens
  Payload ID: 17456
  Gene Symbol: TBX10
  Gene Name: T-box 10
  Uniprot ID: O75333
  ENSP ID: ENSP00000335191
MAAFLSAGLGILAPSETYPLPTTSSGWEPRLGSPFPSGPCTSSTGAQAVAEPTGQGPKNPRVSRVTVQLEMKPLWEEFNQLGTEMIVTKAGRRMFPPFQVKILGMDSLADYALLMDFIPLDDKRYRYAFHSSAWLVAGKADPATPGRVHFHPDSPAKGAQWMRQIVSFDKLKLTNNLLDDNGHIILNSMHRYQPRFHVVFVDPRKDSERYAQENFKSFIFTETQFTAVTAYQNHRITQLKIASNPFAKGFRESDLDSWPVAPRPLLSVPARSHSSLSPCVLKGATDREKDPNKASASTSKTPAWLHHQLLPPPEVLLAPATYRPVTYQSLYSGAPSHLGIPRTRPAPYPLPNIRADRDQGGLPLPAGLGLLSPTVVCLGPGQDSQ

SEQ ID NO: 87252 - protein, 496 aa, Homo sapiens
  Payload ID: 17457
  Gene Symbol: TBX15
  Gene Name: T-box 15
  Uniprot ID: Q96SF7
  ENSP ID: ENSP00000207157
MSSMEEIQVELQCADLWKRFHDIGTEMIITKAGRRMFPAMRVKITGLDPHQQYYIAMDIVPVDNKRYRYVYHSSKWMVAGNADSPVPPRVYIHPDSLASGDTWMRQVVSFDKLKLTNNELDDQGHIILHSMHKYQPRVHVIRKDFSSDLSPTKPVPVGDGVKTFNFPETVFTTVTAYQNQQITRLKIDRNPFAKGFRDSGRNRTGLEAIMETYAFWRPPVRTLTFEDFTTMQKQQGGSTGTSPTTSSTGTPSPSASSHLLSPSCSPPTFHLAPNTFNVGCRESQLCNLNLSDYPPCARSNMAALQSYPGLSDSGYNRLQSGTTSATQPSETFMPQRTPSLISGIPTPPSLPGNSKMEAYGGQLGSFPTSQFQYVMQAGNAASSSSSPHMFGGSHMQQSSYNAFSLHNPYNLYGYNFPTSPRLAASPEKLSASQSTLLCSSPSNGAFGERQYLPSGMEHSMHMISPSPNNQQATNTCDGRQYGAVPGSSSQMSVHMV

SEQ ID NO: 87253 - protein, 602 aa, Homo sapiens
  Payload ID: 17457
  Gene Symbol: TBX15
  Gene Name: T-box 15
  Uniprot ID: Q96SF7
  ENSP ID: ENSP00000358437
MSERRRSAVALSSRAHAFSVEALIGSNKKRKLRDWEEKGLDLSMEALSPAGPLGDTEDAAAHGLEPHPDSEQSTGSDSEVLTERTSCSFSTHTDLASGAAGPVPAAMSSMEEIQVELQCADLWKRFHDIGTEMIITKAGRRMFPAMRVKITGLDPHQQYYIAMDIVPVDNKRYRYVYHSSKWMVAGNADSPVPPRVYIHPDSLASGDTWMRQVVSFDKLKLTNNELDDQGHIILHSMHKYQPRVHVIRKDFSSDLSPTKPVPVGDGVKTFNFPETVFTTVTAYQNQQITRLKIDRNPFAKGFRDSGRNRTGLEAIMETYAFWRPPVRTLTFEDFTTMQKQQGGSTGTSPTTSSTGTPSPSASSHLLSPSCSPPTFHLAPNTFNVGCRESQLCNLNLSDYPPCARSNMAALQSYPGLSDSGYNRLQSGTTSATQPSETFMPQRTPSLISGIPTPPSLPGNSKMEAYGGQLGSFPTSQFQYVMQAGNAASSSSSPHMFGGSHMQQSSYNAFSLHNPYNLYGYNFPTSPRLAASPEKLSASQSTLLCSSPSNGAFGERQYLPSGMEHSMHMISPSPNNQQATNTCDGRQYGAVPGSSSQMSVHMV

SEQ ID NO: 87254 - protein, 330 aa, Homo sapiens
  Payload ID: 17457
  Gene Symbol: TBX15
  Gene Name: T-box 15
  ENSP ID: ENSP00000398625
GRNRTGLEAIMETYAFWRPPVRTLTFEDFTTMQKQQASKKTSQGYTVNQHSSETDAIELYERRVWLMERRGSTGTSPTTSSTGTPSPSASSHLLSPSCSPPTFHLAPNTFNVGCRESQLCNLNLSDYPPCARSNMAALQSYPGLSDSGYNRLQSGTTSATQPSETFMPQRTPSLISGIPTPPSLPGNSKMEAYGGQLGSFPTSQFQYVMQAGNAASSSSSPHMFGGSHMQQSSYNAFSLHNPYNLYGYNFPTSPRLAASPEKLSASQSTLLCSSPSNGAFGERQYLPSGMEHSMHMISPSPNNQQATNTCDGRQYGAVPGSSSQMSVHMV

SEQ ID NO: 87255 - protein, 607 aa, Homo sapiens
  Payload ID: 17458
  Gene Symbol: TBX18
  Gene Name: T-box 18
  Uniprot ID: O95935
  ENSP ID: ENSP00000358677
MAEKRRGSPCSMLSLKAHAFSVEALIGAEKQQQLQKKRRKLGAEEAAGAVDDGGCSRGGGAGEKGSSEGDEGAALPPPAGATSGPARSGADLERGAAGGCEDGFQQGASPLASPGGSPKGSPARSLARPGTPLPSPQAPRVDLQGAELWKRFHEIGTEMIITKAGRRMFPAMRVKISGLDPHQQYYIAMDIVPVDNKRYRYVYHSSKWMVAGNADSPVPPRVYIHPDSPASGETWMRQVISFDKLKLTNNELDDQGHIILHSMHKYQPRVHVIRKDCGDDLSPIKPVPSGEGVKAFSFPETVFTTVTAYQNQQITRLKIDRNPFAKGFRDSGRNRMGLEALVESYAFWRPSLRTLTFEDIPGIPKQGNASSSTLLQGTGNGVPATHPHLLSGSSCSSPAFHLGPNTSQLCSLAPADYSACARSGLTLNRYSTSLAETYNRLTNQAGETFAPPRTPSYVGVSSSTSVNMSMGGTDGDTFSCPQTSLSMQISGMSPQLQYIMPSPSSNAFATNQTHQGSYNTFRLHSPCALYGYNFSTSPKLAASPEKIVSSQGSFLGSSPSGTMTDRQMLPPVEGVHLLSSGGQQSFFDSRTLGSLTLSSSQVSAHMV

SEQ ID NO: 87256 - protein, 176 aa, Homo sapiens
  Payload ID: 17458
  Gene Symbol: TBX18
  Gene Name: T-box 18
  ENSP ID: ENSP00000475498
MIITKAGRRMFPAMRVKISGLDPHQQYYIAMDIVPVDNKRYRYVYHSSKWMVAGNADSPVPPRVYIHPDSPASGETWMRQVISFDKLKLTNNELDDQGHIILHSMHKYQPRVHVIRKDCGDDLSPIKPVPSGEGVKAFSFPETVFTTVTAYQNQQITRLKIDRNPFAKGFRDSGRN

SEQ ID NO: 87257 - protein, 232 aa, Homo sapiens
  Payload ID: 17458
  Gene Symbol: TBX18
  Gene Name: T-box 18
  ENSP ID: ENSP00000475873
MIITKAGRRMFPAMRVKISGLDPHQQYYIAMDIVPVDNKRYRYVYHSSKWMVAGNADSPVPPRVYIHPDSPASGETWMRQVISFDKLKLTNNELDDQGHIILHSMHKYQPRVHVIRKDCGDDLSPIKPVPSGEGVKAFSFPETVFTTVTAYQNQQITRLKIDRNPFAKGFRDSGRNRMGLEALVESYAFWRPSLRTLTFEDIPGIPKQEYRDLKTDYIFPERDNLVSRETKL

SEQ ID NO: 87258 - protein, 32 aa, Homo sapiens
  Payload ID: 17458
  Gene Symbol: TBX18
  Gene Name: T-box 18
  ENSP ID: ENSP00000476137
MIITKAGRRMFPAMRVKISGLDPHQQYYIAMD

SEQ ID NO: 87259 - protein, 448 aa, Homo sapiens
  Payload ID: 17459
  Gene Symbol: TBX19
  Gene Name: T-box 19
  Uniprot ID: O60806
  ENSP ID: ENSP00000356795
MAMSELGTRKPSDGTVSHLLNVVESELQAGREKGDPTEKQLQIILEDAPLWQRFKEVTNEMIVTKNGRRMFPVLKISVTGLDPNAMYSLLLDFVPTDSHRWKYVNGEWVPAGKPEVSSHSCVYIHPDSPNFGAHWMKAPISFSKVKLTNKLNGGGQIMLNSLHKYEPQVHIVRVGSAHRMVTNCSFPETQFIAVTAYQNEEITALKIKYNPFAKAFLDAKERNHLRDVPEAISESQHVTYSHLGGWIFSNPDGVCTAGNSNYQYAAPLPLPAPHTHHGCEHYSGLRGHRQAPYPSAYMHRNHSPSVNLIESSSNNLQVFSGPDSWTSLSSTPHASILSVPHTNGPINPGPSPYPCLWTISNGAGGPSGPGPEVHASTPGAFLLGNPAVTSPPSVLSTQAPTSAGVEVLGEPSLTSIAVSTWTAVASHPFAGWGGPGAGGHHSPSSLDG

SEQ ID NO: 87260 - protein, 281 aa, Homo sapiens
  Payload ID: 17459
  Gene Symbol: TBX19
  Gene Name: T-box 19
  ENSP ID: ENSP00000390731
  MOD_RES (1)..(1): Any amino acid
XKERELNWFYRRQRVLFAHVYPTFTNTSCLCKCKITALKIKYNPFAKAFLDAKERNHLRDVPEAISESQHVTYSHLGGWIFSNPDGVCTAGNSNYQYAAPLPLPAPHTHHGCEHYSGLRGHRQAPYPSAYMHRNHSPSVNLIESSSNNLQVFSGPDSWTSLSSTPHASILSVPHTNGPINPGPSPYPCLWTISNGAGGPSGPGPEVHASTPGAFLLGNPAVTSPPSVLSTQAPTSAGVEVLGEPSLTSIAVSTWTAVASHPFAGWGGPGAGGHHSPSSLDG

SEQ ID NO: 87261 - protein, 318 aa, Homo sapiens
  Payload ID: 17459
  Gene Symbol: TBX19
  Gene Name: T-box 19
  ENSP ID: ENSP00000397540
  MOD_RES (1)..(1): Any amino acid
XRMFPVLKISVTGLDPNAMYSLLLDFVPTDSHRWKYVNGEWVPAGKPEVSSHSCVYIHPDSPNFGAHWMKAPISFSKVKLTNKLNGGGQIMLNSLHKYEPQVHIVRVGSAHRMVTNCSFPETQFIAVTAYQNEEITALKIKYNPFAKAFLDAKERNHLRDVPEAISESQHVTYSHLNLIESSSNNLQVFSGPDSWTSLSSTPHASILSVPHTNGPINPGPSPYPCLWTISNGAGGPSGPGPEVHASTPGAFLLGNPAVTSPPSVLSTQAPTSAGVEVLGEPSLTSIAVSTWTAVASHPFAGWGGPGAGGHHSPSSLDG

SEQ ID NO: 87262 - protein, 712 aa, Homo sapiens
  Payload ID: 17460
  Gene Symbol: TBX2
  Gene Name: T-box 2
  Uniprot ID: Q13207
  ENSP ID: ENSP00000240328
MREPALAASAMAYHPFHAPRPADFPMSAFLAAAQPSFFPALALPPGALAKPLPDPGLAGAAAAAAAAAAAAEAGLHVSALGPHPPAAHLRSLKSLEPEDEVEDDPKVTLEAKELWDQFHKLGTEMVITKSGRRMFPPFKVRVSGLDKKAKYILLMDIVAADDCRYKFHNSRWMVAGKADPEMPKRMYIHPDSPATGEQWMAKPVAFHKLKLTNNISDKHGFTILNSMHKYQPRFHIVRANDILKLPYSTFRTYVFPETDFIAVTAYQNDKITQLKIDNNPFAKGFRDTGNGRREKRKQLTLPSLRLYEEHCKPERDGAESDASSCDPPPAREPPTSPGAAPSPLRLHRARAEEKSCAADSDPEPERLSEERAGAPLGRSPAPDSASPTRLTEPERARERRSPERGKEPAESGGDGPFGLRSLEKERAEARRKDEGRKEAAEGKEQGLAPLVVQTDSASPLGAGHLPGLAFSSHLHGQQFFGPLGAGQPLFLHPGQFTMGPGAFSAMGMGHLLASVAGGGNGGGGGPGTAAGLDAGGLGPAASAASTAAPFPFHLSQHMLASQGIPMPTFGGLFPYPYTYMAAAAAAASALPATSAAAAAAAAAGSLSRSPFLGSARPRLRFSPYQIPVTIPPSTSLLTTGLASEGSKAAGGNSREPSPLPELALRKVGAPSRGALSPSGSAKEAANELQSIQRLVSGLESQRALSPGRESPK

SEQ ID NO: 87263 - protein, 146 aa, Homo sapiens
  Payload ID: 17460
  Gene Symbol: TBX2
  Gene Name: T-box 2
  ENSP ID: ENSP00000404781
MREPALAASAMAYHPFHAPRPADFPMSAFLAAAQPSFFPALALPPGALAKPLPDPGLAGAAAAAAAAAAAAEAGLHVSALGPHPPAAHLRSLKSLEPEDEVEDDPKVTLEAKELWDQFHKLGTEMVITKSGRCESAAWTRRPSISC

SEQ ID NO: 87264 - protein, 447 aa, Homo sapiens
  Payload ID: 17461
  Gene Symbol: TBX20
  Gene Name: T-box 20
  Uniprot ID: Q9UMR3
  ENSP ID: ENSP00000386170
MEFTASPKPQLSSRANAFSIAALMSSGGSKEKEATENTIKPLEQFVEKSSCAQPLGELTSLDAHGEFGGGSGSSPSSSSLCTEPLIPTTPIIPSEEMAKIACSLETKELWDKFHELGTEMIITKSGRRMFPTIRVSFSGVDPEAKYIVLMDIVPVDNKRYRYAYHRSSWLVAGKADPPLPARLYVHPDSPFTGEQLLKQMVSFEKVKLTNNELDQHGHIILNSMHKYQPRVHIIKKKDHTASLLNLKSEEFRTFIFPETVFTAVTAYQNQLITKLKIDSNPFAKGFRDSSRLTDIERESVESLIQKHSYARSPIRTYGGEEDVLGDESQTTPNRGSAFTTSDNLSLSSWVSSSSSFPGFQHPQSLTALGTSTASIATPIPHPIQGSLPPYSRLGMPLTPSAIASSMQGSGPTFPSFHMPRYHHYFQQGPYAAIQGLRHSSAVMTPFV

SEQ ID NO: 87265 - protein, 535 aa, Homo sapiens
  Payload ID: 17462
  Gene Symbol: TBX21
  Gene Name: T-box 21
  Uniprot ID: Q9UL17
  ENSP ID: ENSP00000177694
MGIVEPGCGDMLTGTEPMPGSDEGRAPGADPQHRYFYPEPGAQDADERRGGGSLGSPYPGGALVPAPPSRFLGAYAYPPRPQAAGFPGAGESFPPPADAEGYQPGEGYAAPDPRAGLYPGPREDYALPAGLEVSGKLRVALNNHLLWSKFNQHQTEMIITKQGRRMFPFLSFTVAGLEPTSHYRMFVDVVLVDQHHWRYQSGKWVQCGKAEGSMPGNRLYVHPDSPNTGAHWMRQEVSFGKLKLTNNKGASNNVTQMIVLQSLHKYQPRLHIVEVNDGEPEAACNASNTHIFTFQETQFIAVTAYQNAEITQLKIDNNPFAKGFRENFESMYTSVDTSIPSPPGPNCQFLGGDHYSPLLPNQYPVPSRFYPDLPGQAKDVVPQAYWLGAPRDHSYEAEFRAVSMKPAFLPSAPGPTMSYYRGQEVLAPGAGWPVAPQYPPKMGPASWFRPMRTLPMEPGPGGSEGRGPEDQGPPLVWTEIAPIRPESSDSGLGEGDSKRRRVSPYPSSGDSSSPAGAPSPFDKEAEGQFYNYFPN

SEQ ID NO: 87266 - protein, 520 aa, Homo sapiens
  Payload ID: 17463
  Gene Symbol: TBX22
  Gene Name: T-box 22
  Uniprot ID: Q9Y458
  ENSP ID: ENSP00000362390
MALSSRARAFSVEALVGRPSKRKLQDPIQAEQPELREKKGGEEEEERRSSAAGKSEPLEKQPKTEPSTSASSGCGSDSGYGNSSESLEEKDIQMELQGSELWKRFHDIGTEMIITKAGRRMFPSVRVKVKGLDPGKQYHVAIDVVPVDSKRYRYVYHSSQWMVAGNTDHLCIIPRFYVHPDSPCSGETWMRQIISFDRMKLTNNEMDDKGHIILQSMHKYKPRVHVIEQGSSVDLSQIQSLPTEGVKTFSFKETEFTTVTAYQNQQITKLKIERNPFAKGFRDTGRNRGVLDGLLETYPWRPSFTLDFKTFGADTQSGSSGSSPVTSSGGAPSPLNSLLSPLCFSPMFHLPTSSLGMPCPEAYLPNVNLPLCYKICPTNFWQQQPLVLPAPERLASSNSSQSLAPLMMEVPMLSSLGVTNSKSGSSEDSSDQYLQAPNSTNQMLYGLQSPGNIFLPNSITPEALSCSFHPSYDFYRYNFSMPSRLISGSNHLKVNDDSQVSFGEGKCNHVHWYPAINHYL

SEQ ID NO: 87267 - protein, 520 aa, Homo sapiens; identical to SEQ ID NO: 87266
  Payload ID: 17463
  Gene Symbol: TBX22
  Gene Name: T-box 22
  Uniprot ID: Q9Y458
  ENSP ID: ENSP00000362393

SEQ ID NO: 87268 - protein, 520 aa, Homo sapiens; identical to SEQ ID NO: 87266
  Payload ID: 17463
  Gene Symbol: TBX22
  Gene Name: T-box 22
  Uniprot ID: Q9Y458
  ENSP ID: ENSP00000479825

SEQ ID NO: 87269 - protein, 127 aa, Homo sapiens
  Payload ID: 17463
  Gene Symbol: TBX22
  Gene Name: T-box 22
  ENSP ID: ENSP00000485704
MALSSRARAFSVEALVGRPSKRKLQDPIQAEQPELREKKGGEEEEERRSSAAGKSEPLEKQPKTEPSTSASSGCGSDSGYGNSSESLEEKDIQMELQGSELWKRFHDIGTEMIITKAGGCSPLFGSR

SEQ ID NO: 87270 - protein, 71 aa, Homo sapiens
  Payload ID: 17463
  Gene Symbol: TBX22
  Gene Name: T-box 22
  ENSP ID: ENSP00000485926
  MOD_RES (1)..(1): Any amino acid
XKTEPSTSASSGCGSDSGYGNSSESLEEKDIQMELQGSELWKRFHDIGTEMIITKAGRFGSAQAVHKGHTH

SEQ ID NO: 87271 - protein, 520 aa, Homo sapiens; identical to SEQ ID NO: 87266
  Payload ID: 17463
  Gene Symbol: TBX22
  Gene Name: T-box 22
  Uniprot ID: Q9Y458
  ENSP ID: ENSP00000487295

SEQ ID NO: 87272 - protein, 127 aa, Homo sapiens; identical to SEQ ID NO: 87269
  Payload ID: 17463
  Gene Symbol: TBX22
  Gene Name: T-box 22
  ENSP ID: ENSP00000487527

SEQ ID NO: 87273 - protein, 743 aa, Homo sapiens
  Payload ID: 17464
  Gene Symbol: TBX3
  Gene Name: T-box 3
  Uniprot ID: O15119
  ENSP ID: ENSP00000257566
MSLSMRDPVIPGTSMAYHPFLPHRAPDFAMSAVLGHQPPFFPALTLPPNGAAALSLPGALAKPIMDQLVGAAETGIPFSSLGPQAHLRPLKTMEPEEEVEDDPKVHLEAKELWDQFHKRGTEMVITKSGRRMFPPFKVRCSGLDKKAKYILLMDIIAADDCRYKFHNSRWMVAGKADPEMPKRMYIHPDSPATGEQWMSKVVTFHKLKLTNNISDKHGFTLAFPSDHATWQGNYSFGTQTILNSMHKYQPRFHIVRANDILKLPYSTFRTYLFPETEFIAVTAYQNDKITQLKIDNNPFAKGFRDTGNGRREKRKQLTLQSMRVFDERHKKENGTSDESSSEQAAFNCFAQASSPAASTVGTSNLKDLCPSEGESDAEAESKEEHGPEACDAAKISTTTSEEPCRDKGSPAVKAHLFAAERPRDSGRLDKASPDSRHSPATISSSTRGLGAEERRSPVREGTAPAKVEEARALPGKEAFAPLTVQTDAAAAHLAQGPLPGLGFAPGLAGQQFFNGHPLFLHPSQFAMGGAFSSMAAAGMGPLLATVSGASTGVSGLDSTAMASAAAAQGLSGASAATLPFHLQQHVLASQGLAMSPFGSLFPYPYTYMAAAAAASSAAASSSVHRHPFLNLNTMRPRLRYSPYSIPVPVPDGSSLLTTALPSMAAAAGPLDGKVAALAASPASVAVDSGSELNSRSSTLSSSSMSLSPKLCAEKEAATSELQSIQRLVSGLEAKPDRSRSASP

SEQ ID NO: 87274 - protein, 723 aa, Homo sapiens
  Payload ID: 17464
  Gene Symbol: TBX3
  Gene Name: T-box 3
  Uniprot ID: O15119
  ENSP ID: ENSP00000257567
MSLSMRDPVIPGTSMAYHPFLPHRAPDFAMSAVLGHQPPFFPALTLPPNGAAALSLPGALAKPIMDQLVGAAETGIPFSSLGPQAHLRPLKTMEPEEEVEDDPKVHLEAKELWDQFHKRGTEMVITKSGRRMFPPFKVRCSGLDKKAKYILLMDIIAADDCRYKFHNSRWMVAGKADPEMPKRMYIHPDSPATGEQWMSKVVTFHKLKLTNNISDKHGFTILNSMHKYQPRFHIVRANDILKLPYSTFRTYLFPETEFIAVTAYQNDKITQLKIDNNPFAKGFRDTGNGRREKRKQLTLQSMRVFDERHKKENGTSDESSSEQAAFNCFAQASSPAASTVGTSNLKDLCPSEGESDAEAESKEEHGPEACDAAKISTTTSEEPCRDKGSPAVKAHLFAAERPRDSGRLDKASPDSRHSPATISSSTRGLGAEERRSPVREGTAPAKVEEARALPGKEAFAPLTVQTDAAAAHLAQGPLPGLGFAPGLAGQQFFNGHPLFLHPSQFAMGGAFSSMAAAGMGPLLATVSGASTGVSGLDSTAMASAAAAQGLSGASAATLPFHLQQHVLASQGLAMSPFGSLFPYPYTYMAAAAAASSAAASSSVHRHPFLNLNTMRPRLRYSPYSIPVPVPDGSSLLTTALPSMAAAAGPLDGKVAALAASPASVAVDSGSELNSRSSTLSSSSMSLSPKLCAEKEAATSELQSIQRLVSGLEAKPDRSRSASP

SEQ ID NO: 87275 - protein, 722 aa, Homo sapiens
  Payload ID: 17464
  Gene Symbol: TBX3
  Gene Name: T-box 3
  ENSP ID: ENSP00000480048
MSLSMRDPVIPGTSMAYHPFLPHRAPDFAMSAVLGHQPPFFPALTLPPNGAAALSLPGALAKPIMDQLVGAAETGIPFSSLGPQAHLRPLKTMEPEEEVEDDPKVHLEAKELWDQFHKRGTEMVITKSGRRMFPPFKVRCSGLDKKAKYILLMDIIAADDCRYKFHNSRWMVAGKADPEMPKRMYIHPDSPATGEQWMSKVVTFHKLKLTNNISDKHGFTILNSMHKYQPRFHIVRANDILKLPYSTFRTYLFPETEFIAVTAYQNDKITQLKIDNNPFAKGFRDTGNGRREKRKQLTLQSMRVFDERHKKENGTSDESSSEQAAFNCFAQASSPAASTVGTSNLKDLCPSEGESDAEAESKEEHGPEACDAAKISTTTSEEPCRDKGSPAVKAHLFAAERPRDSGRLDKASPDSRHSPATISSSTRGLGAEERRSPVREGTAPAKVEEARALPGKEAFAPLTVQTDAAAAHLAQGPLPGLGFAPGLAGQQFFNGHPLFLHPSQFAMGGAFSSMAAAGMGPLLATVSGASTGVSGLDSTAMASAAAAQGLSGASAATLPFHLQQHVLASQGLAMSPFGSLFPYPYTYMAAAAAASLRQPPARCTAPLLNLNTMRPRLRYSPYSIPVPVPDGSSLLTTALPSMAAAAGPLDGKVAALAASPASVAVDSGSELNSRSSTLSSSSMSLSPKLCAEKEAATSELQSIQRLVSGLEAKPDRSRSASP

SEQ ID NO: 87276 - protein, 545 aa, Homo sapiens
  Payload ID: 17465
  Gene Symbol: TBX4
  Gene Name: T-box 4
  Uniprot ID: P57082
  ENSP ID: ENSP00000240335
MLQDKGLSESEEAFRAPGPALGEASAANAPEPALAAPGLSGAALGSPPGPGADVVAAAAAEQTIENIKVGLHEKELWKKFHEAGTEMIITKAGRRMFPSYKVKVTGMNPKTKYILLIDIVPADDHRYKFCDNKWMVAGKAEPAMPGRLYVHPDSPATGAHWMRQLVSFQKLKLTNNHLDPFGHIILNSMHKYQPRLHIVKADENNAFGSKNTAFCTHVFPETSFISVTSYQNHKITQLKIENNPFAKGFRGSDDSDLRVARLQSKEYPVISKSIMRQRLISPQLSATPDVGPLLGTHQALQHYQHENGAHSQLAEPQDLPLSTFPTQRDSSLFYHCLKRRDGTRHLDLPCKRSYLEAPSSVGEDHYFRSPPPYDQQMLSPSYCSEVTPREACMYSGSGPEIAGVSGVDDLPPPPLSCNMWTSVSPYTSYSVQTMETVPYQPFPTHFTATTMMPRLPTLSAQSSQPPGNAHFSVYNQLSQSQVRERGPSASFPRERGLPQGCERKPPSPHLNAANEFLYSQTFSLSRESSLQYHSGMGTVENWTDG

SEQ ID NO: 87277 - protein, 546 aa, Homo sapiens
  Payload ID: 17465
  Gene Symbol: TBX4
  Gene Name: T-box 4
  Uniprot ID: P57082
  ENSP ID: ENSP00000377435
MLQDKGLSESEEAFRAPGPALGEASAANAPEPALAAPGLSGAALGSPPGPGADVVAAAAAEQTIENIKVGLHEKELWKKFHEAGTEMIITKAGRRMFPSYKVKVTGMNPKTKYILLIDIVPADDHRYKFCDNKWMVAGKAEPAMPGRLYVHPDSPATGAHWMRQLVSFQKLKLTNNHLDPFGHIILNSMHKYQPRLHIVKADENNAFGSKNTAFCTHVFPETSFISVTSYQNHKITQLKIENNPFAKGFRGSDDSDLRVARLQSKEYPVISKSIMRQRLISPQLSATPDVGPLLGTHQALQHYQHENGAHSQLAEPQDLPLSTFPTQRDSSLFYHCLKRRADGTRHLDLPCKRSYLEAPSSVGEDHYFRSPPPYDQQMLSPSYCSEVTPREACMYSGSGPEIAGVSGVDDLPPPPLSCNMWTSVSPYTSYSVQTMETVPYQPFPTHFTATTMMPRLPTLSAQSSQPPGNAHFSVYNQLSQSQVRERGPSASFPRERGLPQGCERKPPSPHLNAANEFLYSQTFSLSRESSLQYHSGMGTVENWTDG

SEQ ID NO: 87278 - protein, 135 aa, Homo sapiens
  Payload ID: 17465
  Gene Symbol: TBX4
  Gene Name: T-box 4
  ENSP ID: ENSP00000467588
MIITKAGRRMFPSYKVKVTGMNPKTKYILLIDIVPADDHRYKFCDNKWMVAGKAEPAMPGRLYVHPDSPATGAHWMRQLVSFQKLKLTNNHLDPFGHIILNSMHKYQPRLHIVKADENNAFGSKNTAFCTHVFPE

SEQ ID NO: 87279 - protein, 518 aa, Homo sapiens
  Payload ID: 17466
  Gene Symbol: TBX5
  Gene Name: T-box 5
  Uniprot ID: Q99593
  ENSP ID: ENSP00000309913
MADADEGFGLAHTPLEPDAKDLPCDSKPESALGAPSKSPSSPQAAFTQQGMEGIKVFLHERELWLKFHEVGTEMIITKAGRRMFPSYKVKVTGLNPKTKYILLMDIVPADDHRYKFADNKWSVTGKAEPAMPGRLYVHPDSPATGAHWMRQLVSFQKLKLTNNHLDPFGHIILNSMHKYQPRLHIVKADENNGFGSKNTAFCTHVFPETAFIAVTSYQNHKITQLKIENNPFAKGFRGSDDMELHRMSRMQSKEYPVVPRSTVRQKVASNHSPFSSESRALSTSSNLGSQYQCENGVSGPSQDLLPPPNPYPLPQEHSQIYHCTKRKEEECSTTDHPYKKPYMETSPSEEDSFYRSSYPQQQGLGASYRTESAQRQACMYASSAPPSEPVPSLEDISCNTWPSMPSYSSCTVTTVQPMDRLPYQHFSAHFTSGPLVPRLAGMANHGSPQLGEGMFQHQTSVAHQPVVRQCGPQTGLQSPGTLQPPEFLYSHGVPRTLSPHQYHSVHGVGMVPEWSDNS

SEQ ID NO: 87280 - protein, 468 aa, Homo sapiens
  Payload ID: 17466
  Gene Symbol: TBX5
  Gene Name: T-box 5
  Uniprot ID: Q99593
  ENSP ID: ENSP00000337723
MEGIKVFLHERELWLKFHEVGTEMIITKAGRRMFPSYKVKVTGLNPKTKYILLMDIVPADDHRYKFADNKWSVTGKAEPAMPGRLYVHPDSPATGAHWMRQLVSFQKLKLTNNHLDPFGHIILNSMHKYQPRLHIVKADENNGFGSKNTAFCTHVFPETAFIAVTSYQNHKITQLKIENNPFAKGFRGSDDMELHRMSRMQSKEYPVVPRSTVRQKVASNHSPFSSESRALSTSSNLGSQYQCENGVSGPSQDLLPPPNPYPLPQEHSQIYHCTKRKEEECSTTDHPYKKPYMETSPSEEDSFYRSSYPQQQGLGASYRTESAQRQACMYASSAPPSEPVPSLEDISCNTWPSMPSYSSCTVTTVQPMDRLPYQHFSAHFTSGPLVPRLAGMANHGSPQLGEGMFQHQTSVAHQPVVRQCGPQTGLQSPGTLQPPEFLYSHGVPRTLSPHQYHSVHGVGMVPEWSDNS

SEQ ID NO: 87281 - protein, 518 aa, Homo sapiens; identical to SEQ ID NO: 87279
  Payload ID: 17466
  Gene Symbol: TBX5
  Gene Name: T-box 5
  Uniprot ID: Q99593
  ENSP ID: ENSP00000384152

SEQ ID NO: 87282 - protein, 349 aa, Homo sapiens
  Payload ID: 17466
  Gene Symbol: TBX5
  Gene Name: T-box 5
  Uniprot ID: Q99593
  ENSP ID: ENSP00000433292
MADADEGFGLAHTPLEPDAKDLPCDSKPESALGAPSKSPSSPQAAFTQQGMEGIKVFLHERELWLKFHEVGTEMIITKAGRRMFPSYKVKVTGLNPKTKYILLMDIVPADDHRYKFADNKWSVTGKAEPAMPGRLYVHPDSPATGAHWMRQLVSFQKLKLTNNHLDPFGHIILNSMHKYQPRLHIVKADENNGFGSKNTAFCTHVFPETAFIAVTSYQNHKITQLKIENNPFAKGFRGSDDMELHRMSRMQSKEYPVVPRSTVRQKVASNHSPFSSESRALSTSSNLGSQYQCENGVSGPSQDLLPPPNPYPLPQEHSQIYHCTKRKGECDHPWSICFLSYLFLSLGWG

SEQ ID NO: 87283 - protein, 436 aa, Homo sapiens
  Payload ID: 17467
  Gene Symbol: TBX6
  Gene Name: T-box 6
  Uniprot ID: O95947
  ENSP ID: ENSP00000279386
MYHPRELYPSLGAGYRLGPAQPGADSSFPPALAEGYRYPELDTPKLDCFLSGMEAAPRTLAAHPPLPLLPPAMGTEPAPSAPEALHSLPGVSLSLENRELWKEFSSVGTEMIITKAGRRMFPACRVSVTGLDPEARYLFLLDVIPVDGARYRWQGRRWEPSGKAEPRLPDRVYIHPDSPATGAHWMRQPVSFHRVKLTNSTLDPHGHLILHSMHKYQPRIHLVRAAQLCSQHWGGMASFRFPETTFISVTAYQNPQITQLKIAANPFAKGFRENGRNCKRERDARVKRKLRGPEPAATEAYGSGDTPGGPCDSTLGGDIRESDPEQAPAPGEATAAPAPLCGGPSAEAYLLHPAAFHGAPSHLPTRSPSFPEAPDSGRSAPYSAAFLELPHGSGGSGYPAAPPAVPFAPHFLQGGPFPLPYTAPGGYLDVGSKPMY

SEQ ID NO: 87284 - protein, 436 aa, Homo sapiens; identical to SEQ ID NO: 87283
  Payload ID: 17467
  Gene Symbol: TBX6
  Gene Name: T-box 6
  Uniprot ID: O95947
  ENSP ID: ENSP00000378650

SEQ ID NO: 87285 - protein, 295 aa, Homo sapiens
  Payload ID: 17467
  Gene Symbol: TBX6
  Gene Name: T-box 6
  Uniprot ID: O95947
  ENSP ID: ENSP00000460425
MYHPRELYPSLGAGYRLGPAQPGADSSFPPALAEGYRYPELDTPKLDCFLSGMEAAPRTLAAHPPLPLLPPAMGTEPAPSAPEALHSLPGVSLSLENRELWKEFSSVGTEMIITKAGRRMFPACRVSVTGLDPEARYLFLLDVIPVDGARYRWQGRRWEPSGKAEPRLPDRVYIHPDSPATGAHWMRQPVSFHRVKLTNSTLDPHGHLILHSMHKYQPRIHLVRAAQLCSQHWGGMASFRFPETTFISVTAYQNPQITQLKIAANPFAKGFRENGRNCKRWELFIHLFMHSTNVY

SEQ ID NO: 87286 - protein, 295 aa, Homo sapiens; identical to SEQ ID NO: 87285
  Payload ID: 17467
  Gene Symbol: TBX6
  Gene Name: T-box 6
  Uniprot ID: O95947
  ENSP ID: ENSP00000461223

SEQ ID NO: 87287 - protein, 436 aa, Homo sapiens
  Payload ID: 17467
  Gene Symbol: TBX6
  Gene Name: T-box 6
  ENSP ID: ENSP00000485762
MYHPRELYPSLGAGYRLGPAQPGADSSFPPALAEGYRYPELDTPKLDCFLSGMEAAPRTLAAHPPLPLLPPAMGTEPAPSAPEALHSLPGVSLSLENRELWKEFSSVGTEMIITKAGRRMFPACRVSVTGLDPEARYLFLLDVIPVDGARYRWQGRRWEPSGKAEPRLPDRVYIHPDSPATGAHWMRQPVSFHRVKLTNSTLDPHGHLILHSMHKYQPRIHLVRAAQLCSQHWGGMASFRFPETTFISVTAYQNPQVSDPAGGGGPLPRPSSSSPPLFPRERDARVKRKLRGPEPAATEAYGSGDTPGGPCDSTLGGDIRESDPEQAPAPGEATAAPAPLCGGPSAEAYLLHPAAFHGAPSHLPTRSPSFPEAPDSGRSAPYSAAFLELPHGSGGSGYPAAPPAVPFAPHFLQGGPFPLPYTAPGGYLDVGSKPMY

SEQ ID NO: 87288 - protein, 682 aa, Homo sapiens
  Payload ID: 17468
  Gene Symbol: TBR1
  Gene Name: T-box, brain, 1
  Uniprot ID: Q16650
  ENSP ID: ENSP00000374205
MQLEHCLSPSIMLSKKFLNVSSSYPHSGGSELVLHDHPIISTTDNLERSSPLKKITRGMTNQSDTDNFPDSKDSPGDVQRSKLSPVLDGVSELRHSFDGSAADRYLLSQSSQPQSAATAPSAMFPYPGQHGPAHPAFSIGSPSRYMAHHPVITNGAYNSLLSNSSPQGYPTAGYPYPQQYGHSYQGAPFYQFSSTQPGLVPGKAQVYLCNRPLWLKFHRHQTEMIITKQGRRMFPFLSFNISGLDPTAHYNIFVDVILADPNHWRFQGGKWVPCGKADTNVQGNRVYMHPDSPNTGAHWMRQEISFGKLKLTNNKGASNNNGQMVVLQSLHKYQPRLHVVEVNEDGTEDTSQPGRVQTFTFPETQFIAVTAYQNTDITQLKIDHNPFAKGFRDNYDTIYTGCDMDRLTPSPNDSPRSQIVPGARYAMAGSFLQDQFVSNYAKARFHPGAGAGPGPGTDRSVPHTNGLLSPQQAEDPGAPSPQRWFVTPANNRLDFAASAYDTATDFAGNAATLLSYAAAGVKALPLQAAGCTGRPLGYYADPSGWGARSPPQYCGTKSGSVLPCWPNSAAAAARMAGANPYLGEEAEGLAAERSPLPPGAAEDAKPKDLSDSSWIETPSSIKSIDSSDSGIYEQAKRRRISPADTPVSESSSPLKSEVLAQRDCEKNCAKDISGYYGFYSHS

SEQ ID NO: 87289 - protein, 395 aa, Homo sapiens
  Payload ID: 17468
  Gene Symbol: TBR1
  Gene Name: T-box, brain, 1
  Uniprot ID: Q16650
  ENSP ID: ENSP00000387023
MHPDSPNTGAHWMRQEISFGKLKLTNNKGASNNNGQMVVLQSLHKYQPRLHVVEVNEDGTEDTSQPGRVQTFTFPETQFIAVTAYQNTDITQLKIDHNPFAKGFRDNYDTIYTGCDMDRLTPSPNDSPRSQIVPGARYAMAGSFLQDQFVSNYAKARFHPGAGAGPGPGTDRSVPHTNGLLSPQQAEDPGAPSPQRWFVTPANNRLDFAASAYDTATDFAGNAATLLSYAAAGVKALPLQAAGCTGRPLGYYADPSGWGARSPPQYCGTKSGSVLPCWPNSAAAAARMAGANPYLGEEAEGLAAERSPLPPGAAEDAKPKDLSDSSWIETPSSIKSIDSSDSGIYEQAKRRRISPADTPVSESSSPLKSEVLAQRDCEKNCAKDISGYYGFYSHS

SEQ ID NO: 87290 - protein, 232 aa, Homo sapiens
  Payload ID: 17468
  Gene Symbol: TBR1
  Gene Name: T-box, brain, 1
  ENSP ID: ENSP00000393934
FQGGKWVPCGKADTNVQGNRVYMHPDSPNTGAHWMRQEISFGKLKLTNNKGASNNNGQMVVLQSLHKYQPRLHVVEVNEDGTEDTSQPGRVQTFTFPETQFIAVTAYQNTDITQLKIDHNPFAKGFRDNYDTIYTGCDMDRLTPSPNDSPRSQIVPGARYAMAGSFLQDQFQAEDPGAPSPQRWFVTPANNRLDFAASAYDTATDFAGNAATLLSYAAAGVKALPLQAAGCT

SEQ ID NO: 87291 - protein, 186 aa, Homo sapiens
  Payload ID: 17469
  Gene Symbol: TBPL1
  Gene Name: TBP-like 1
  Uniprot ID: P62380
  ENSP ID: ENSP00000237264
MDADSDVALDILITNVVCVFRTRCHLNLRKIALEGANVIYKRDVGKVLMKLRKPRITATIWSSGKIICTGATSEEEAKFGARRLARSLQKLGFQVIFTDFKVVNVLAVCNMPFEIRLPEFTKNNRPHASYEPELHPAVCYRIKSLRATLQIFSTGSITVTGPNVKAVATAVEQIYPFVFESRKEIL

SEQ ID NO: 87292 - protein, 91 aa, Homo sapiens
  Payload ID: 17469
  Gene Symbol: TBPL1
  Gene Name: TBP-like 1
  ENSP ID: ENSP00000356843
MDADSDVALDILITNVVCVFRTRCHLNLRKIALEGANVIYKRDVGKVLMKLRKPRITATIWSSGKIICTGATSEEEAKFGARRLARSLQKL

SEQ ID NO: 87293 - protein, 163 aa, Homo sapiens
  Payload ID: 17469
  Gene Symbol: TBPL1
  Gene Name: TBP-like 1
  ENSP ID: ENSP00000356845
MDADSDVALDILITNVVCVFRTRCHLNLRKIALEGANVIYKRDVGKVLMKLRKPRITATIWSSGKIICTGATSEEEAKFGARRLARSLQKLGFQVIFTDFKVVNVLAVCNMPFEIRLPEFTKNNRPHASYEPELHPAVCYRIKSLRATLQIFSTGSITVTGIL

SEQ ID NO: 87294 - protein, 45 aa, Homo sapiens
  Payload ID: 17469
  Gene Symbol: TBPL1
  Gene Name: TBP-like 1
  ENSP ID: ENSP00000398186
MDADSDVALDILITNVVCVFRTRCHLNLRKIALEGANVIYKRDVG

SEQ ID NO: 87295 - protein, 128 aa, Homo sapiens
  Payload ID: 17469
  Gene Symbol: TBPL1
  Gene Name: TBP-like 1
  ENSP ID: ENSP00000402864
MDADSDVALDILITNVVCVFRTRCHLNLRKIALEGANVIYKRDVGKVLMKLRKPRITATIWSSGKIICTGATSEEEAKFGARRLARSLQKLGFQVIFTDFKVVNVLAVCNMPFEIRLPEFTKNNRPHA

SEQ ID NO: 87296 - protein, 186 aa, Homo sapiens; identical to SEQ ID NO: 87291
  Payload ID: 17469
  Gene Symbol: TBPL1
  Gene Name: TBP-like 1
  Uniprot ID: P62380
  ENSP ID: ENSP00000478795

SEQ ID NO: 87297 - protein, 657 aa, Homo sapiens
  Payload ID: 17470
  Gene Symbol: TIPARP
  Gene Name: TCDD-inducible poly(ADP-ribose) polymerase
  Uniprot ID: Q7Z3E1
  ENSP ID: ENSP00000295924
MEMETTEPEPDCVVQPPSPPDDFSCQMRLSEKITPLKTCFKKKDQKRLGTGTLRSLRPILNTLLESGSLDGVFRSRNQSTDENSLHEPMMKKAMEINSSCPPAENNMSVLIPDRTNVGDQIPEAHPSTEAPERVVPIQDHSFPSETLSGTVADSTPAHFQTDLLHPVSSDVPTSPDCLDKVIDYVPGIFQENSFTIQYILDTSDKLSTELFQDKSEEASLDLVFELVNQLQYHTHQENGIEICMDFLQGTCIYGRDCLKHHTVLPYHWQIKRTTTQKWQSVFNDSQEHLERFYCNPENDRMRMKYGGQEFWADLNAMNVYETTEFDQLRRLSTPPSSNVNSIYHTVWKFFCRDHFGWREYPESVIRLIEEANSRGLKEVRFMMWNNHYILHNSFFRREIKRRPLFRSCFILLPYLQTLGGVPTQAPPPLEATSSSQIICPDGVTSANFYPETWVYMHPSQDFIQVPVSAEDKSYRIIYNLFHKTVPEFKYRILQILRVQNQFLWEKYKRKKEYMNRKMFGRDRIINERHLFHGTSQDVVDGICKHNFDPRVCGKHATMFGQGSYFAKKASYSHNFSKKSSKGVHFMFLAKVLTGRYTMGSHGMRRPPPVNPGSVTSDLYDSCVDNFFEPQIFVIFNDDQSYPYFVIQYEEVSNTVSI

SEQ ID NO: 87298 - protein, 657 aa, Homo sapiens; identical to SEQ ID NO: 87297
  Payload ID: 17470
  Gene Symbol: TIPARP
  Gene Name: TCDD-inducible poly(ADP-ribose) polymerase
  Uniprot ID: Q7Z3E1
  ENSP ID: ENSP00000418757

SEQ ID NO: 87299 - protein, 654 aa, Homo sapiens
  Payload ID: 17470
  Gene Symbol: TIPARP
  Gene Name: TCDD-inducible poly(ADP-ribose) polymerase
  ENSP ID: ENSP00000418829
MEMETTEPEPDCVVQPPSPPDDFSCQMRLSEKITPLKTCFKKKDQKRLGTGTLRSLRPILNTLLESGSLDGVFRSRNQSTDENSLHEPMMKKAMEINSSCPPAENNMSVLIPDRTNVGDQIPEAHPSTEAPERVVPIQDHSFPSETLSGTVADSTPAHFQTDLLHPVSSDVPTSPDCLDKVIDYVPGIFQENSFTIQYILDTSDKLSTELFQDKSEEASLDLVFELVNQLQYHTHQENGIEICMDFLQGTCIYGRDCLKHHTVLPYHWQIKRTTTQKWQSVFNDSQEHLERFYCNPENDRMRMKYGGQEFWADLNAMNVYETTEFDQLRRLSTPPSSNVNSIYHTVWKFFCRDHFGWREYPESVIRLIEEANSRGLKEVRFMMWNNHYILHNSFFRREIKRRPLFRSCFILLPYLQTLGGVPTQAPPPLEATSSSQIICPDGVTSANFYPETWVYMHPSQDFIQVPVSAEDKSYRIIYNLFHKTVPEFKYRILQILRVQNQFLWEKYKRKKEYMNRKMFGRDRIINERHLFHGTSQDVVDGICKHNFDPRVCGKHATMFGQGSYFAKKASYSHNFSKKSSKGVHFMFLAKVLTGRYTMGSHGMRRPPPVNPGSVTSDLYDSCVDNFFEPQIFVIFNDDQSYPYFVIQYEEVSNT

SEQ ID NO: 87300 - protein, 506 aa, Homo sapiens
  Payload ID: 17470
  Gene Symbol: TIPARP
  Gene Name: TCDD-inducible poly(ADP-ribose) polymerase
  ENSP ID: ENSP00000419982
MEMETTEPEPDCVVQPPSPPDDFSCQMRLSEKITPLKTCFKKKDQKRLGTGTLRSLRPILNTLLESGSLDGVFRSRNQSTDENSLHEPMMKKAMEINSSCPPAENNMSVLIPDRTNVGDQIPEAHPSTEAPERVVPIQDHSFPSETLSGTVADSTPAHFQTDLLHPVSSDVPTSPDCLDKVIDYVPGIFQENSFTIQYILDTSDKLSTELFQDKSEEASLDLVFELVNQLQYHTHQENGIEICMDFLQGTCIYGRDCLKHHTVLPYHWQIKRTTTQKWQSVFNDSQEHLERFYCNPENDRMRMKYGGQEFWADLNAMNVYETTEFDQLRRLSTPPSSNVNSIYHTVWKFFCRDHFGWREYPESVIRLIEEANSRGLKEVRFMMWNNHYILHNSFFRREIKRRPLFRSCFILLPYLQTLGGVPTQAPPPLEATSSSQIICPDGVTSANFYPETWVYMHPSQDFIQVPVSAEDKSYRIIYNLFHKTVPEFKYRILQILRVQNQFLWEK

SEQ ID NO: 87301 - protein, 360 aa, Homo sapiens
  Payload ID: 17470
  Gene Symbol: TIPARP
  Gene Name: TCDD-inducible poly(ADP-ribose) polymerase
  ENSP ID: ENSP00000420141
  MOD_RES (1)..(1): Any amino acid
XTNKLEQPRGQEFWADLNAMNVYETTEFDQLRRLSTPPSSNVNSIYHTVWKFFCRDHFGWREYPESVIRLIEEANSRGLKEVRFMMWNNHYILHNSFFRREIKRRPLFRSCFILLPYLQTLGGVPTQAPPPLEATSSSQIICPDGVTSANFYPETWVYMHPSQDFIQVPVSAEDKSYRIIYNLFHKTVPEFKYRILQILRVQNQFLWEKYKRKKEYMNRKMFGRDRIINERHLFHGTSQDVVDGICKHNFDPRVCGKHATMFGQGSYFAKKASYSHNFSKKSSKGVHFMFLAKVLTGRYTMGSHGMRRPPPVNPGSVTSDLYDSCVDNFFEPQIFVIFNDDQSYPYFVIQYEEVSNTVSI

SEQ ID NO: 87302 - protein, 657 aa, Homo sapiens; identical to SEQ ID NO: 87297
  Payload ID: 17470
  Gene Symbol: TIPARP
  Gene Name: TCDD-inducible poly(ADP-ribose) polymerase
  Uniprot ID: Q7Z3E1
  ENSP ID: ENSP00000420612

SEQ ID NO: 87303 - protein, 657 aa, Homo sapiens; identical to SEQ ID NO: 87297
  Payload ID: 17470
  Gene Symbol: TIPARP
  Gene Name: TCDD-inducible poly(ADP-ribose) polymerase
  Uniprot ID: Q7Z3E1
  ENSP ID: ENSP00000438345

SEQ ID NO: 87304 - protein, 553 aa, Homo sapiens
  Payload ID: 17471
  Gene Symbol: TAGAP
  Gene Name: T-cell activation RhoGTPase activating protein
  Uniprot ID: Q8N103
  ENSP ID: ENSP00000322650
MGALEMQDEEDRIEALKQVADKLPRPNLLLLKHLVYVLHLISKNSEVNRMDSSNLAICIGPNMLTLENDQSLSFEAQKDLNNKVKTLVEFLIDNCFEIFGENIPVHSSITSDDSLEHTDSSDVSTLQNDSAYDSNDPDVESNSSSGISSPSRQPQVPMATAAGLDSAGPQDAREVSPEPIVSTVARLKSSLAQPDRRYSEPSMPSSQECLESRVTNQTLTKSEGDFPVPRVGSRLESEEAEDPFPEEVFPAVQGKTKRPVDLKIKNLAPGSVLPRALVLKAFSSSSLDASSDSSPVASPSSPKRNFFSRHQSFTTKTEKGKPSREIKKHSMSFTFAPHKKVLTKNLSAGSGKSQDFTRDHVPRGVRKESQLAGRIVQENGCETHNQTARGFCLRPHALSVDDVFQGADWERPGSPPSYEEAMQGPAARLVASESQTVGSMTVGSMRARMLEAHCLLPPLPPAHHVEDSRHRGSKEPLPGHGLSPLPERWKQSRTVHASGDSLGHVSGPGRPELLPLRTVSESVQRNKRDCLVRRCSQPVFEADQFQYAKESYI

SEQ ID NO: 87305 - protein, 266 aa, Homo sapiens
  Payload ID: 17471
  Gene Symbol: TAGAP
  Gene Name: T-cell activation RhoGTPase activating protein
  Uniprot ID: Q8N103
  ENSP ID: ENSP00000340217
MKLRSSHNASKTLNANNMETLIECQSEGDIKEHPLLASCESEDSICQLIEVKKRKKVLSWPFLMRRLSPASDFSGALETDLKASLFDQPLSIICGDSDTLPRPIQDILTILCLKGPSTEGIFRRAANEKARKELKEELNSGDAVDLERLPVHLLAVVFKDFLRSIPRKLLSSDLFEEWMGALEMQDEEDRIEALKQVADKLPRPNLLLLKHLVYVLHLISKNSEVNRMDSSNLAICIGPNMLTLENDQSLSFEAQKDLNNKVCSAY

SEQ ID NO: 87306 - protein, 731 aa, Homo sapiens
  Payload ID: 17471
  Gene Symbol: TAGAP
  Gene Name: T-cell activation RhoGTPase activating protein
  Uniprot ID: Q8N103
  ENSP ID: ENSP00000356033
MKLRSSHNASKTLNANNMETLIECQSEGDIKEHPLLASCESEDSICQLIEVKKRKKVLSWPFLMRRLSPASDFSGALETDLKASLFDQPLSIICGDSDTLPRPIQDILTILCLKGPSTEGIFRRAANEKARKELKEELNSGDAVDLERLPVHLLAVVFKDFLRSIPRKLLSSDLFEEWMGALEMQDEEDRIEALKQVADKLPRPNLLLLKHLVYVLHLISKNSEVNRMDSSNLAICIGPNMLTLENDQSLSFEAQKDLNNKVKTLVEFLIDNCFEIFGENIPVHSSITSDDSLEHTDSSDVSTLQNDSAYDSNDPDVESNSSSGISSPSRQPQVPMATAAGLDSAGPQDAREVSPEPIVSTVARLKSSLAQPDRRYSEPSMPSSQECLESRVTNQTLTKSEGDFPVPRVGSRLESEEAEDPFPEEVFPAVQGKTKRPVDLKIKNLAPGSVLPRALVLKAFSSSSLDASSDSSPVASPSSPKRNFFSRHQSFTTKTEKGKPSREIKKHSMSFTFAPHKKVLTKNLSAGSGKSQDFTRDHVPRGVRKESQLAGRIVQENGCETHNQTARGFCLRPHALSVDDVFQGADWERPGSPPSYEEAMQGPAARLVASESQTVGSMTVGSMRARMLEAHCLLPPLPPAHHVEDSRHRGSKEPLPGHGLSPLPERWKQSRTVHASGDSLGHVSGPGRPELLPLRTVSESVQRNKRDCLVRRCSQPVFEADQFQYAKESYI

SEQ ID NO: 87307 - protein, 331 aa, Homo sapiens
  Payload ID: 17472
  Gene Symbol: TAL1
  Gene Name: T-cell acute lymphocytic leukemia 1
  Uniprot ID: P17542
  ENSP ID: ENSP00000294339
MTERPPSEAARSDPQLEGRDAAEASMAPPHLVLLNGVAKETSRAAAAEPPVIELGARGGPGGGPAGGGGAARDLKGRDAATAEARHRVPTTELCRPPGPAPAPAPASVTAELPGDGRMVQLSPPALAAPAAPGRALLYSLSQPLASLGSGFFGEPDAFPMFTTNNRVKRRPSPYEMEITDGPHTKVVRRIFTNSRERWRQQNVNGAFAELRKLIPTHPPDKKLSKNEILRLAMKYINFLAKLLNDQEEEGTQRAKTGKDPVVGAGGGGGGGGGGAPPDDLLQDVLSPNSSCGSSLDGAASPDSYTEEPAPKHTARSLHPAMLPAADGAGPR

SEQ ID NO: 87308 - protein, 331 aa, Homo sapiens; identical to SEQ ID NO: 87307
  Payload ID: 17472
  Gene Symbol: TAL1
  Gene Name: T-cell acute lymphocytic leukemia 1
  Uniprot ID: P17542
  ENSP ID: ENSP00000360951

SEQ ID NO: 87309 - protein, 108 aa, Homo sapiens
  Payload ID: 17473
  Gene Symbol: TAL2
  Gene Name: T-cell acute lymphocytic leukemia 2
  Uniprot ID: Q16559
  ENSP ID: ENSP00000334547
MTRKIFTNTRERWRQQNVNSAFAKLRKLIPTHPPDKKLSKNETLRLAMRYINFLVKVLGEQSLQQTGVAAQGNILGLFPQGPHLPGLEDRTLLENYQVPSPGPSHHIP

SEQ ID NO: 87310 - protein, 378 aa, Homo sapiens
  Payload ID: 17474
  Gene Symbol: TIMD4
  Gene Name: T-cell immunoglobulin and mucin domain containing 4
  Uniprot ID: Q96H15
  ENSP ID: ENSP00000274532
MSKEPLILWLMIEFWWLYLTPVTSETVVTEVLGHRVTLPCLYSSWSHNSNSMCWGKDQCPYSGCKEALIRTDGMRVTSRKSAKYRLQGTIPRGDVSLTILNPSESDSGVYCCRIEVPGWFNDVKINVRLNLQRASTTTHRTATTTTRRTTTTSPTTTRQMTTTPAALPTTVVTTPDLTTGTPLQMTTIAVFTTANTCLSLTPSTLPEEATGLLTPEPSKEGPILTAESETVLPSDSWSSVESTSADTVLLTSKESKVWDLPSTSHVSMWKTSDSVSSPQPGASDTAVPEQNKTTKTGQMDGIPMSMKNEMPISQLLMIIAPSLGFVLFALFVAFLLRGKLMETYCSQKHTRLDYIGDSKNVLNDVQHGREDEDGLFTL

SEQ ID NO: 87311 - protein, 80 aa, Homo sapiens
  Payload ID: 17474
  Gene Symbol: TIMD4
  Gene Name: T-cell immunoglobulin and mucin domain containing 4
  ENSP ID: ENSP00000385882
MDGIPMSMKNEMPISQLLMIIAPSLGFVLFALFVAFLLRGKLMETYCSQKHTRLDYIGDSKNVLNDVQHGREDEDGLFTL

SEQ ID NO: 87312 - protein, 350 aa, Homo sapiens
  Payload ID: 17474
  Gene Symbol: TIMD4
  Gene Name: T-cell immunoglobulin and mucin domain containing 4
  Uniprot ID: Q96H15
  ENSP ID: ENSP00000385973
MSKEPLILWLMIEFWWLYLTPVTSETVVTEVLGHRVTLPCLYSSWSHNSNSMCWGKDQCPYSGCKEALIRTDGMRVTSRKSAKYRLQGTIPRGDVSLTILNPSESDSGVYCCRIEVPGWFNDVKINVRLNLQRASTTTHRTATTTTRRTTTTSPTTTRQMTTTPAALPTTVVTTPDLTTGTPLQMTTIAVFTTANTCLSLTPSTLPEEATGLLTPEPSKEGPILTAESETVLPSDSWSSVESTSADTVLLTSKASDTAVPEQNKTTKTGQMDGIPMSMKNEMPISQLLMIIAPSLGFVLFALFVAFLLRGKLMETYCSQKHTRLDYIGDSKNVLNDVQHGREDEDGLFTL

SEQ ID NO: 87313 - protein, 330 aa, Homo sapiens
  Payload ID: 17475
  Gene Symbol: TLX1
  Gene Name: T-cell leukemia homeobox 1
  Uniprot ID: P31314
  ENSP ID: ENSP00000359215
MEHLGPHHLHPGHAEPISFGIDQILNSPDQGGCMGPASRLQDGEYGLGCLVGGAYTYGGGGSAAATGAGGAGAYGTGGPGGPGGPAGGGGACSMGPLTGSYNVNMALAGGPGPGGGGGSSGGAGALSAAGVIRVPAHRPLAGAVAHPQPLATGLPTVPSVPAMPGVNNLTGLTFPWMESNRRYTKDRFTGHPYQNRTPPKKKKPRTSFTRLQICELEKRFHRQKYLASAERAALAKALKMTDAQVKTWFQNRRTKWRRQTAEEREAERQQANRILLQLQQEAFQKSLAQPLPADPLCVHNSSLFALQNLQPWSDDSTKITSVTSVASACE

SEQ ID NO: 87314 - protein, 156 aa, Homo sapiens
  Payload ID: 17475
  Gene Symbol: TLX1
  Gene Name: T-cell leukemia homeobox 1
  ENSP ID: ENSP00000434358
AAATGAGGAGAYGTGGPGGPGGPAGGGGACSMGPLTGSYNVNMALAGGPGPGGGGGSSGGAGALSAAGVIRVPAHRPLAGAVAHPQPLATGLPTVPSVPAMPGVNNLTGLTFPWMESNRRYTKDRFTVALSPFTVTRRIGHPYQNRTPPKKKKPRT

SEQ ID NO: 87315 - protein, 257 aa, Homo sapiens
  Payload ID: 17475
  Gene Symbol: TLX1
  Gene Name: T-cell leukemia homeobox 1
  Uniprot ID: P31314
  ENSP ID: ENSP00000434914
MEHLGPHHLHPGHAEPISFGIDQILNSPDQGGCMGPASRLQDGEYGLGCLVGGAYTYGGGGSAAATGAGGAGAYGTGGPGGPGGPAGGGGACSMGPLTGSYNVNMALAGGPGPGGGGGSSGGAGALSAAGVIRVPAHRPLAGAVAHPQPLATGLPTVPSVPAMPGVNNLTGLTFPWMESNRRYTKDRFTGHPYQNRTPPKKKKPRTSFTRLQICELEKRFHRQKYLASAERAALAKALKMTDAQVKTWFQNRRTKWR

SEQ ID NO: 87316 - protein, 284 aa, Homo sapiens
  Payload ID: 17476
  Gene Symbol: TLX2
  Gene Name: T-cell leukemia homeobox 2
  Uniprot ID: O43763
  ENSP ID: ENSP00000233638
MEPGMLGPHNLPHHEPISFGIDQILSGPETPGGGLGLGRGGQGHGENGAFSGGYHGASGYGPAGSLAPLPGSSGVGPGGVIRVPAHRPLPVPPPAGGAPAVPGPSGLGGAGGLAGLTFPWMDSGRRFAKDRLTAALSPFSGTRRIGHPYQNRTPPKRKKPRTSFSRSQVLELERRFLRQKYLASAERAALAKALRMTDAQVKTWFQNRRTKWRRQTAEEREAERHRAGRLLLHLQQDALPRPLRPPLPPDPLCLHNSSLFALQNLQPWAEDNKVASVSGLASVV

SEQ ID NO: 87317 - protein, 235 aa, Homo sapiens
  Payload ID: 17476
  Gene Symbol: TLX2
  Gene Name: T-cell leukemia homeobox 2
  ENSP ID: ENSP00000482690
MEARCALALLWDAPHRPPLPKPDPSEAEEAAHVLLPLTGAGVGAALPAPEVPGLCGEGGAGQGLAHDRRTGQNVVPEPTHQVAAPDGGGARGRAAPRGPAAPASAAGRVATAAAAAAAPGPSLPAQLVALRAAEPAALGRGQQSGFSVRARLGGVSDARPIGVERRARSGGARGCLRPWSSGSRAREERQALRLSSRAPPPPAGSQASVAQMHGQLRGGLSRHFSLHCRYALAGT

SEQ ID NO: 87318 - protein, 291 aa, Homo sapiens
  Payload ID: 17477
  Gene Symbol: TLX3
  Gene Name: T-cell leukemia homeobox 3
  Uniprot ID: O43711
  ENSP ID: ENSP00000296921
MEAPASAQTPHPHEPISFGIDQILNSPDQDSAPAPRGPDGASYLGGPPGGRPGATYPSLPASFAGLGAPFEDAGSYSVNLSLAPAGVIRVPAHRPLPGAVPPPLPSALPAMPSVPTVSSLGGLNFPWMESSRRFVKDRFTAAAALTPFTVTRRIGHPYQNRTPPKRKKPRTSFSRVQICELEKRFHRQKYLASAERAALAKSLKMTDAQVKTWFQNRRTKWRRQTAEEREAERQQASRLMLQLQHDAFQKSLNDSIQPDPLCLHNSSLFALQNLQPWEEDSSKVPAVTSLV

SEQ ID NO: 87319 - protein, 103 aa, Homo sapiens
  Payload ID: 17478
  Gene Symbol: TCTA
  Gene Name: T-cell leukemia translocation altered
  Uniprot ID: P57738
  ENSP ID: ENSP00000273590
MAESWSGQALQALPATVLGALGSEFLREWEAQDMRVTLFKLLLLWLVLSLLGIQLAWGFYGNTVTGLYHRPGLGGQNGSTPDGSTHFPSWEMAANEPLKTHRE

SEQ ID NO: 87320 - protein, 114 aa, Homo sapiens
  Payload ID: 17479
  Gene Symbol: TCL1A
  Gene Name: T-cell leukemia/lymphoma 1A
  Uniprot ID: P56279
  ENSP ID: ENSP00000385036
MAECPTLGEAVTDHPDRLWAWEKFVYLDEKQHAWLPLTIEIKDRLQLRVLLRREDVVLGRPMTPTQIGPSLLPIMWQLYPDGRYRSSDSSFWRLVYHIKIDGVEDMLLELLPDD

SEQ ID NO: 87321 - protein, 114 aa, Homo sapiens; identical to SEQ ID NO: 87320
  Payload ID: 17479
  Gene Symbol: TCL1A
  Gene Name: T-cell leukemia/lymphoma 1A
  Uniprot ID: P56279
  ENSP ID: ENSP00000450496

SEQ ID NO: 87322 - protein, 114 aa, Homo sapiens; identical to SEQ ID NO: 87320
  Payload ID: 17479
  Gene Symbol: TCL1A
  Gene Name: T-cell leukemia/lymphoma 1A
  Uniprot ID: P56279
  ENSP ID: ENSP00000450701

SEQ ID NO: 87323 - protein, 46 aa, Homo sapiens
  Payload ID: 17479
  Gene Symbol: TCL1A
  Gene Name: T-cell leukemia/lymphoma 1A
  ENSP ID: ENSP00000450997
MAECPTLGEAVTDHPDRLWAWEKFVYLDEKQHAWLPLTIEIQGLAL

SEQ ID NO: 87324 - protein, 46 aa, Homo sapiens; identical to SEQ ID NO: 87323
  Payload ID: 17479
  Gene Symbol: TCL1A
  Gene Name: T-cell leukemia/lymphoma 1A
  ENSP ID: ENSP00000451322

SEQ ID NO: 87325 - protein, 114 aa, Homo sapiens; identical to SEQ ID NO: 87320
  Payload ID: 17479
  Gene Symbol: TCL1A
  Gene Name: T-cell leukemia/lymphoma 1A
  Uniprot ID: P56279
  ENSP ID: ENSP00000451506

SEQ ID NO: 87326 - protein, 46 aa, Homo sapiens; identical to SEQ ID NO: 87323
  Payload ID: 17479
  Gene Symbol: TCL1A
  Gene Name: T-cell leukemia/lymphoma 1A
  ENSP ID: ENSP00000451973

SEQ ID NO: 87327 - protein, 53 aa, Homo sapiens
  Payload ID: 17479
  Gene Symbol: TCL1A
  Gene Name: T-cell leukemia/lymphoma 1A
  ENSP ID: ENSP00000452028
MTPTQIGPSLLPIMWQLYPDGRYRSSDSSFWRLVYHIKIDGVEDMLLELLPDD

SEQ ID NO: 87328 - protein, 128 aa, Homo sapiens
  Payload ID: 17480
  Gene Symbol: TCL1B
  Gene Name: T-cell leukemia/lymphoma 1B
  Uniprot ID: O95988
  ENSP ID: ENSP00000343223
MASEASVRLGVPPGRLWIQRPGIYEDEEGRTWVTVVVRFNPSRREWARASQGSRYEPSITVHLWQMAVHTRELLSSGQMPFSQLPAVWQLYPGRKYRAADSSFWEIADHGQIDSMEQLVLTYQPERKD

SEQ ID NO: 87329 - protein, 1591 aa, Homo sapiens
  Payload ID: 17481
  Gene Symbol: TIAM1
  Gene Name: T-cell lymphoma invasion and metastasis 1
  Uniprot ID: Q13009
  ENSP ID: ENSP00000286827
MGNAESQHVEHEFYGEKHASLGRKHTSRSLRLSHKTRRTRHASSGKVIHRNSEVSTRSSSTPSIPQSLAENGLEPFSQDGTLEDFGSPIWVDRVDMGLRPVSYTDSSVTPSVDSSIVLTAASVQSMPDTEESRLYGDDATYLAEGGRRQHSYTSNGPTFMETASFKKKRSKSADIWREDSLEFSLSDLSQEHLTSNEEILGSAEEKDCEEARGMETRASPRQLSTCQRANSLGDLYAQKNSGVTANGGPGSKFAGYCRNLVSDIPNLANHKMPPAAAEETPPYSNYNTLPCRKSHCLSEGATNPQISHSNSMQGRRAKTTQDVNAGEGSEFADSGIEGATTDTDLLSRRSNATNSSYSPTTGRAFVGSDSGSSSTGDAARQGVYENFRRELEMSTTNSESLEEAGSAHSDEQSSGTLSSPGQSDILLTAAQGTVRKAGALAVKNFLVHKKNKKVESATRRKWKHYWVSLKGCTLFFYESDGRSGIDHNSIPKHAVWVENSIVQAVPEHPKKDFVFCLSNSLGDAFLFQTTSQTELENWITAIHSACATAVARHHHKEDTLRLLKSEIKKLEQKIDMDEKMKKMGEMQLSSVTDSKKKKTILDQIFVWEQNLEQFQMDLFRFRCYLASLQGGELPNPKRLLAFASRPTKVAMGRLGIFSVSSFHALVAARTGETGVRRRTQAMSRSASKRRSRFSSLWGLDTTSKKKQGRPSINQVFGEGTEAVKKSLEGIFDDIVPDGKREKEVVLPNVHQHNPDCDIWVHEYFTPSWFCLPNNQPALTVVRPGDTARDTLELICKTHQLDHSAHYLRLKFLIENKMQLYVPQPEEDIYELLYKEIEICPKVTQSIHIEKSDTAADTYGFSLSSVEEDGIRRLYVNSVKETGLASKKGLKAGDEILEINNRAADALNSSMLKDFLSQPSLGLLVRTYPELEEGVELLESPPHRVDGPADLGESPLAFLTSNPGHSLCSEQGSSAETAPEETEGPDLESSDETDHSSKSTEQVAAFCRSLHEMNPSDQSPSPQDSTGPQLATMRQLSDADKLRKVICELLETERTYVKDLNCLMERYLKPLQKETFLTQDELDVLFGNLTEMVEFQVEFLKTLEDGVRLVPDLEKLEKVDQFKKVLFSLGGSFLYYADRFKLYSAFCASHTKVPKVLVKAKTDTAFKAFLDAQNPKQQHSSTLESYLIKPIQRILKYPLLLRELFALTDAESEEHYHLDVAIKTMNKVASHINEMQKIHEEFGAVFDQLIAEQTGEKKEVADLSMGDLLLHTTVIWLNPPASLGKWKKEPELAAFVFKTAVVLVYKDGSKQKKKLVGSHRLSIYEDWDPFRFRHMIPTEALQVRALASADAEANAVCEIVHVKSESEGRPERVFHLCCSSPESRKDFLKAVHSILRDKHRRQLLKTESLPSSQQYVPFGGKRLCALKGARPAMSRAVSAPSKSLGRRRRRLARNRFTIDSDAVSASSPEKESQQPPGGGDTDRWVEEQFDLAQYEEQDDIKETDILSDDDEFCESVKGASVDRDLQERLQATSISQRERGRKTLDSHASRMAQLKKQAALSGINGGLESASEEVIWVRREDFAPSRKLNTEI

SEQ ID NO: 87330 - protein, 225 aa, Homo sapiens
  Payload ID: 17481
  Gene Symbol: TIAM1
  Gene Name: T-cell lymphoma invasion and metastasis 1
  ENSP ID: ENSP00000388217
MGNAESQHVEHEFYGEKHASLGRKHTSRSLRLSHKTRRTRHASSGKVIHRNSEVSTRSSSTPSIPQSLAENGLEPFSQDGTLEDFGSPIWVDRVDMGLRPVSYTDSSVTPSVDSSIVLTAASVQSMPDTEESRLYGDDATYLAEGGRRQHSYTSNGPTFMETASFKKKRSKSADIWREDSLEFSLSDLSQEHLTSNEEILGSAEEKDCEEARGMETRASPRQLST

SEQ ID NO: 87331 - protein, 132 aa, Homo sapiens
  Payload ID: 17481
  Gene Symbol: TIAM1
  Gene Name: T-cell lymphoma invasion and metastasis 1
  ENSP ID: ENSP00000393384
  MOD_RES (1)..(1): Any amino acid
XSADAEANAVCEIVHVKSESEGRPERVFHLCCSSPESRKDFLKAVHSILRDKHRRQLLKTESLPSSQQYVPFGGKRLCALKGARPAMSRADGKRKQRLLIVAFTGSSATHPSENTRKSGAWRGCHCLLYIRS

SEQ ID NO: 87332 - protein, 1531 aa, Homo sapiens
  Payload ID: 17481
  Gene Symbol: TIAM1
  Gene Name: T-cell lymphoma invasion and metastasis 1
  Uniprot ID: Q13009
  ENSP ID: ENSP00000441570
MGNAESQHVEHEFYGEKHASLGRKHTSRSLRLSHKTRRTRHASSGKVIHRNSEVSTRSSSTPSIPQSLAENGLEPFSQDGTLEDFGSPIWVDRVDMGLRPVSYTDSSVTPSVDSSIVLTAASVQSMPDTEESRLYGDDATYLAEGGRRQHSYTSNGPTFMETASFKKKRSKSADIWREDSLEFSLSDLSQEHLTSNEEILGSAEEKDCEEARGMETRASPRQLSTCQRANSLGDLYAQKNSGVTANGGPGSKFAGYCRNLVSDIPNLANHKMPPAAAEETPPYSNYNTLPCRKSHCLSEGATNPQISHSNSMQGRRAKTTQDVNAGEGSEFADSGIEGATTDTDLLSRRSNATNSSYSPTTGRAFVGSDSGSSSTGDAARQGVYENFRRELEMSTTNSESLEEAGSAHSDEQSSGTLSSPGQSDILLTAAQGTVRKAGALAVKNFLVHKKNKKVESATRRKWKHYWVSLKGCTLFFYESDGRSGIDHNSIPKHAVWVENSIVQAVPEHPKKDFVFCLSNSLGDAFLFQTTSQTELENWITAIHSACATAVARHHHKEDTLRLLKSEIKKLEQKIDMDEKMKKMGEMQLSSVTDSKKKKTILDQIFVWEQNLEQFQMDLFRFRCYLASLQGGELPNPKRLLAFASRPTKVAMGRLGIFSVSSFHALVAARTGETGVRRRTQAMSRSASKRRSRFSSLWGLDTTSKKKQGRPSINQREKEVVLPNVHQHNPDCDIWVHEYFTPSWFCLPNNQPALTVVRPGDTARDTLELICKLYKEIEICPKVTQSIHIEKSDTAADTYGFSLSSVEEDGIRRLYVNSVKETGLASKKGLKAGDEILEINNRAADALNSSMLKDFLSQPSLGLLVRTYPELEEGVELLESPPHRVDGPADLGESPLAFLTSNPGHSLCSEQGSSAETAPEETEGPDLESSDETDHSSKSTEQVAAFCRSLHEMNPSDQSPSPQDSTGPQLATMRQLSDADKLRKVICELLETERTYVKDLNCLMERYLKPLQKETFLTQDELDVLFGNLTEMVEFQVEFLKTLEDGVRLVPDLEKLEKVDQFKKVLFSLGGSFLYYADRFKLYSAFCASHTKVPKVLVKAKTDTAFKAFLDAQNPKQQHSSTLESYLIKPIQRILKYPLLLRELFALTDAESEEHYHLDVAIKTMNKVASHINEMQKIHEEFGAVFDQLIAEQTGEKKEVADLSMGDLLLHTTVIWLNPPASLGKWKKEPELAAFVFKTAVVLVYKDGSKQKKKLVGSHRLSIYEDWDPFRFRHMIPTEALQVRALASADAEANAVCEIVHVKSESEGRPERVFHLCCSSPESRKDFLKAVHSILRDKHRRQLLKTESLPSSQQYVPFGGKRLCALKGARPAMSRAVSAPSKSLGRRRRRLARNRFTIDSDAVSASSPEKESQQPPGGGDTDRWVEEQFDLAQYEEQDDIKETDILSDDDEFCESVKGASVDRDLQERLQATSISQRERGRKTLDSHASRMAQLKKQAALSGINGGLESASEEVIWVRREDFAPSRKLNTEI

SEQ ID NO: 87333 - protein, 626 aa, Homo sapiens
  Payload ID: 17482
  Gene Symbol: TIAM2
  Gene Name: T-cell lymphoma invasion and metastasis 2
  Uniprot ID: Q8IVF5
  ENSP ID: ENSP00000275246
MEGPRENQDPPPRSLARHLSDADRLRKVIQELVDTEKSYVKDLSCLFELYLEPLQNETFLTQDEMESLFGSLPEMLEFQKVFLETLEDGISASSDFNTLETPSQFRKLLFSLGGSFLYYADHFKLYSGFCANHIKVQKVLERAKTDKAFKAFLDARNPTKQHSSTLESYLIKPVQRVLKYPLLLKELVSLTDQESEEHYHLTEALKAMEKVASHINEMQKIYEDYGTVFDQLVAEQSGTEKEVTELSMGELLMHSTVSWLNPFLSLGKARKDLELTVFVFKRAVILVYKENCKLKKKLPSNSRPAHNSTDLDPFKFRWLIPISALQVRLGNPAGTENNSIWELIHTKSEIEGRPETIFQLCCSDSESKTNIVKVIRSILRENFRRHIKCELPLEKTCKDRLVPLKNRVPVSAKLASSRSLKVLKNSSSNEWTGETGKGTLLDSDEGSLSSGTQSSGCPTAEGRQDSKSTSPGKYPHPGLADFADNLIKESDILSDEDDDHRQTVKQGSPTKDIEIQFQRLRISEDPDVHPEAEQQPGPESGEGQKGGEQPKLVRGHFCPIKRKANSTKRDRGTLLKAQIRHQSLDSQSENATIDLNSVLEREFSVQSLTSVVSEECFYETESHGKS

SEQ ID NO: 87334 - protein, 1701 aa, Homo sapiens
  Payload ID: 17482
  Gene Symbol: TIAM2
  Gene Name: T-cell lymphoma invasion and metastasis 2
  Uniprot ID: Q8IVF5
  ENSP ID: ENSP00000327315
MGNSDSQYTLQGSKNHSNTITGAKQIPCSLKIRGIHAKEEKSLHGWGHGSNGAGYKSRSLARSCLSHFKSNQPYASRLGGPTCKVSRGVAYSTHRTNAPGKDFQGISAAFSTENGFHSVGHELADNHITSRDCNGHLLNCYGRNESIASTPPGEDRKSPRVLIKTLGKLDGCLRVEFHNGGNPSKVPAEDCSEPVQLLRYSPTLASETSPVPEARRGSSADSLPSHRPSPTDSRLRSSKGSSLSSESSWYDSPWGNAGELSEAEGSFLAPGMPDPSLHASFPPGDAKKPFNQSSSLSSLRELYKDANLGSLSPSGIRLSDEYMGTHASLSNRVSFASDIDVPSRVAHGDPIQYSSFTLPCRKPKAFVEDTAKKDSLKARMRRISDWTGSLSRKKRKLQEPRSKEGSDYFDSRSDGLNTDVQGSSQASAFLWSGGSTQILSQRSESTHAIGSDPLRQNIYENFMRELEMSRTNTENIETSTETAESSSESLSSLEQLDLLFEKEQGVVRKAGWLFFKPLVTVQKERKLELVARRKWKQYWVTLKGCTLLFYETYGKNSMDQSSAPRCALFAEDSIVQSVPEHPKKENVFCLSNSFGDVYLFQATSQTDLENWVTAVHSACASLFAKKHGKEDTLRLLKNQTKNLLQKIDMDSKMKKMAELQLSVVSDPKNRKAIENQIQQWEQNLEKFHMDLFRMRCYLASLQGGELPNPKSLLAAASRPSKLALGRLGILSVSSFHALVCSRDDSALRKRTLSLTQRGRNKKGIFSSLKGLDTLARKGKEKRPSITQVDELLHIYGSTVDGVPRDNAWEIQTYVHFQDNHGVTVGIKPEHRVEDILTLACKMRQLEPSHYGLQLRKLVDDNVEYCIPAPYEYMQQQVYDEIEVFPLNVYDVQLTKTGSVCDFGFAVTAQVDERQHLSRIFISDVLPDGLAYGEGLRKGNEIMTLNGEAVSDLDLKQMEALFSEKSVGLTLIARPPDTKATLCTSWSDSDLFSRDQKSLLPPPNQSQLLEEFLDNFKKNTANDFSNVPDITTGLKRSQTDGTLDQVSHREKMEQTFRSAEQITALCRSFNDSQANGMEGPRENQDPPPRSLARHLSDADRLRKVIQELVDTEKSYVKDLSCLFELYLEPLQNETFLTQDEMESLFGSLPEMLEFQKVFLETLEDGISASSDFNTLETPSQFRKLLFSLGGSFLYYADHFKLYSGFCANHIKVQKVLERAKTDKAFKAFLDARNPTKQHSSTLESYLIKPVQRVLKYPLLLKELVSLTDQESEEHYHLTEALKAMEKVASHINEMQKIYEDYGTVFDQLVAEQSGTEKEVTELSMGELLMHSTVSWLNPFLSLGKARKDLELTVFVFKRAVILVYKENCKLKKKLPSNSRPAHNSTDLDPFKFRWLIPISALQVRLGNPAGTENNSIWELIHTKSEIEGRPETIFQLCCSDSESKTNIVKVIRSILRENFRRHIKCELPLEKTCKDRLVPLKNRVPVSAKLASSRSLKVLKNSSSNEWTGETGKGTLLDSDEGSLSSGTQSSGCPTAEGRQDSKSTSPGKYPHPGLADFADNLIKESDILSDEDDDHRQTVKQGSPTKDIEIQFQRLRISEDPDVHPEAEQQPGPESGEGQKGGEQPKLVRGHFCPIKRKANSTKRDRGTLLKAQIRHQSLDSQSENATIDLNSVLEREFSVQSLTSVVSEECFYETESHGKS

SEQ ID NO: 87335 - protein, 1725 aa, Homo sapiens
  Payload ID: 17482
  Gene Symbol: TIAM2
  Gene Name: T-cell lymphoma invasion and metastasis 2
  Uniprot ID: Q8IVF5
  ENSP ID: ENSP00000353528
MGNSDSQYTLQGSKNHSNTITGAKQIPCSLKIRGIHAKEEKSLHGWGHGSNGAGYKSRSLARSCLSHFKSNQPYASRLGGPTCKVSRGVAYSTHRTNAPGKDFQGISAAFSTENGFHSVGHELADNHITSRDCNGHLLNCYGRNESIASTPPGEDRKSPRVLIKTLGKLDGCLRVEFHNGGNPSKVPAEDCSEPVQLLRYSPTLASETSPVPEARRGSSADSLPSHRPSPTDSRLRSSKGSSLSSESSWYDSPWGNAGELSEAEGSFLAPGMPDPSLHASFPPGDAKKPFNQSSSLSSLRELYKDANLGSLSPSGIRLSDEYMGTHASLSNRVSFASDIDVPSRVAHGDPIQYSSFTLPCRKPKAFVEDTAKKDSLKARMRRISDWTGSLSRKKRKLQEPRSKEGSDYFDSRSDGLNTDVQGSSQASAFLWSGGSTQILSQRSESTHAIGSDPLRQNIYENFMRELEMSRTNTENIETSTETAESSSESLSSLEQLDLLFEKEQGVVRKAGWLFFKPLVTVQKERKLELVARRKWKQYWVTLKGCTLLFYETYGKNSMDQSSAPRCALFAEDSIVQSVPEHPKKENVFCLSNSFGDVYLFQATSQTDLENWVTAVHSACASLFAKKHGKEDTLRLLKNQTKNLLQKIDMDSKMKKMAELQLSVVSDPKNRKAIENQIQQWEQNLEKFHMDLFRMRCYLASLQGGELPNPKSLLAAASRPSKLALGRLGILSVSSFHALVCSRDDSALRKRTLSLTQRGRNKKGIFSSLKGLDTLARKGKEKRPSITQIFDSSGSHGFSGTQLPQNSSNSSEVDELLHIYGSTVDGVPRDNAWEIQTYVHFQDNHGVTVGIKPEHRVEDILTLACKMRQLEPSHYGLQLRKLVDDNVEYCIPAPYEYMQQQVYDEIEVFPLNVYDVQLTKTGSVCDFGFAVTAQVDERQHLSRIFISDVLPDGLAYGEGLRKGNEIMTLNGEAVSDLDLKQMEALFSEKSVGLTLIARPPDTKATLCTSWSDSDLFSRDQKSLLPPPNQSQLLEEFLDNFKKNTANDFSNVPDITTGLKRSQTDGTLDQVSHREKMEQTFRSAEQITALCRSFNDSQANGMEGPRENQDPPPRSLARHLSDADRLRKVIQELVDTEKSYVKDLSCLFELYLEPLQNETFLTQDEMESLFGSLPEMLEFQKVFLETLEDGISASSDFNTLETPSQFRKLLFSLGGSFLYYADHFKLYSGFCANHIKVQKVLERAKTDKAFKAFLDARNPTKQHSSTLESYLIKPVQRVLKYPLLLKELVSLTDQESEEHYHLTEALKAMEKVASHINEMQKIYEDYGTVFDQLVAEQSGTEKEVTELSMGELLMHSTVSWLNPFLSLGKARKDLELTVFVFKRAVILVYKENCKLKKKLPSNSRPAHNSTDLDPFKFRWLIPISALQVRLGNPAGTENNSIWELIHTKSEIEGRPETIFQLCCSDSESKTNIVKVIRSILRENFRRHIKCELPLEKTCKDRLVPLKNRVPVSAKLASSRSLKVLKNSSSNEWTGETGKGTLLDSDEGSLSSGTQSSGCPTAEGRQDSKSTSPGKYPHPGLADFADNLIKESDILSDEDDDHRQTVKQGSPTKDIEIQFQRLRISEDPDVHPEAEQQPGPESGEGQKGGEQPKLVRGHFCPIKRKANSTKRDRGTLLKAQIRHQSLDSQSENATIDLNSVLEREFSVQSLTSVVSEECFYETESHGKS

SEQ ID NO: 87336 - protein, 1013 aa, Homo sapiens
  Payload ID: 17482
  Gene Symbol: TIAM2
  Gene Name: T-cell lymphoma invasion and metastasis 2
  Uniprot ID: Q8IVF5
  ENSP ID: ENSP00000407183
MDLFRMRCYLASLQGGELPNPKSLLAAASRPSKLALGRLGILSVSSFHALVCSRDDSALRKRTLSLTQRGRNKKGIFSSLKGLDTLARKGKEKRPSITQVDELLHIYGSTVDGVPRDNAWEIQTYVHFQDNHGVTVGIKPEHRVEDILTLACKMRQLEPSHYGLQLRKLVDDNVEYCIPAPYEYMQQQVYDEIEVFPLNVYDVQLTKTGSVCDFGFAVTAQVDERQHLSRIFISDVLPDGLAYGEGLRKGNEIMTLNGEAVSDLDLKQMEALFSEKSVGLTLIARPPDTKATLCTSWSDSDLFSRDQKSLLPPPNQSQLLEEFLDNFKKNTANDFSNVPDITTGLKRSQTDGTLDQVSHREKMEQTFRSAEQITALCRSFNDSQANGMEGPRENQDPPPRSLARHLSDADRLRKVIQELVDTEKSYVKDLSCLFELYLEPLQNETFLTQDEMESLFGSLPEMLEFQKVFLETLEDGISASSDFNTLETPSQFRKLLFSLGGSFLYYADHFKLYSGFCANHIKVQKVLERAKTDKAFKAFLDARNPTKQHSSTLESYLIKPVQRVLKYPLLLKELVSLTDQESEEHYHLTEALKAMEKVASHINEMQKIYEDYGTVFDQLVAEQSGTEKEVTELSMGELLMHSTVSWLNPFLSLGKARKDLELTVFVFKRAVILVYKENCKLKKKLPSNSRPAHNSTDLDPFKFRWLIPISALQVRLGNPAGTENNSIWELIHTKSEIEGRPETIFQLCCSDSESKTNIVKVIRSILRENFRRHIKCELPLEKTCKDRLVPLKNRVPVSAKLASSRSLKVLKNSSSNEWTGETGKGTLLDSDEGSLSSGTQSSGCPTAEGRQDSKSTSPGKYPHPGLADFADNLIKESDILSDEDDDHRQTVKQGSPTKDIEIQFQRLRISEDPDVHPEAEQQPGPESGEGQKGGEQPKLVRGHFCPIKRKANSTKRDRGTLLKAQIRHQSLDSQSENATIDLNSVLEREFSVQSLTSVVSEECFYETESHGKS

SEQ ID NO: 87337 - protein, 156 aa, Homo sapiens
  Payload ID: 17482
  Gene Symbol: TIAM2
  Gene Name: T-cell lymphoma invasion and metastasis 2
  ENSP ID: ENSP00000431269
MYSMSFNDSQANGMEGPRENQDPPPRSLARHLSDADRLRKVIQELVDTEKSYVKDLSCLFELYLEPLQNETFLTQDEMESLFGSLPEMLEFQKVFLETLEDGISASSDFNTLETPSQFRKLLFSLGGSFLYYADHFKLYSGFCANHIKVQKVLERA

SEQ ID NO: 87338 - protein, 1730 aa, Homo sapiens
  Payload ID: 17482
  Gene Symbol: TIAM2
  Gene Name: T-cell lymphoma invasion and metastasis 2
  Uniprot ID: Q8IVF5
  ENSP ID: ENSP00000433348
MGNSDSQYTLQGSKNHSNTITGAKQIPCSLKIRGIHAKEEKSLHGWGHGSNGAGYKSRSLARSCLSHFKSNQPYASRLGGPTCKVSRGVAYSTHRTNAPGKDFQGISAAFSTENGFHSVGHELADNHITSRDCNGHLLNCYGRNESIASTPPGEDRKSPRVLIKTLGKLDGCLRVEFHNGGNPSKVPAEDCSEPVQLLRYSPTLASETSPVPEARRGSSADSLPSHRPSPTDSRLRSSKGSSLSSESSWYDSPWGNAGELSEAEGSFLAPGMPDPSLHASFPPGDAKKPFNQSSSLSSLRELYKDANLGSLSPSGIRLSDEYMGTHASLSNRVSFASDIDVPSRVAHGDPIQYSSFTLPCRKPKAFVEDTAKKDSLKARMRRISDWTGSLSRKKRKLQEPRSKEGSDYFDSRSDGLNTDVQGSSQASAFLWSGGSTQILSQRSESTHAIGSDPLRQNIYENFMRELEMSRTNTENIETSTETAESSSESLSSLEQLDLLFEKEQGVVRKAGWLFFKPLVTVQKERKLELVARRKWKQYWVTLKGCTLLFYETYGKNSMDQSSAPRCALFAEDSIVQSVPEHPKKENVFCLSNSFGDVYLFQATSQTDLENWVTAVHSACASLFAKKHGKEDTLRLLKNQTKNLLQKIDMDSKMKKMAELQLSVVSDPKNRKAIENQIQQWEQNLEKFHMDLFRMRCYLASLQGGELPNPKSLLAAASRPSKLALGRLGILSVSSFHALVCSRDDSALRKRTLSLTQRGRNKKGIFSSLKGLDTLARKGKEKRPSITQVDELLHIYGSTVDGVPRDNAWEIQTYVHFQDNHGVTVGIKPEHRVEDILTLACKMRQLEPSHYGLQLRKLVDDNVEYCIPAPYEYMQQQVYDEIEVFPLNVYDVQLTKTGSVCDFGFAVTAQVDERQHLSRIFISDVLPDGLAYGEGLRKGNEIMTLNGEAVSDLDLKQMEALFSEKSVGLTLIARPPDTKATLCTSWSDSDLFSRDQKSLLPPPNQSQLLEEFLDNFKKNTANDFSNVPDITTGLKRSQTDGTLDQVSHREKMEQTFRSAEQITALCRSFNDSQANGMEGPRENQDPPPRSLARHLSDADRLRKVIQELVDTEKSYVKDLSCLFELYLEPLQNETFLTQDEMESLFGSLPEMLEFQKVFLETLEDGISASSDFNTLETPSQFRKLLFSLGGSFLYYADHFKLYSGFCANHIKVQKVLERAKTDKAFKAFLDARNPTKQHSSTLESYLIKPVQRVLKYPLLLKELVSLTDQESEEHYHLTEALKAMEKVASHINEMQKIYEDYGTVFDQLVAEQSGTEKEQPEWSSEVMDVLDPRGKLTKGTLEEPRTLVTELSMGELLMHSTVSWLNPFLSLGKARKDLELTVFVFKRAVILVYKENCKLKKKLPSNSRPAHNSTDLDPFKFRWLIPISALQVRLGNPAGTENNSIWELIHTKSEIEGRPETIFQLCCSDSESKTNIVKVIRSILRENFRRHIKCELPLEKTCKDRLVPLKNRVPVSAKLASSRSLKVLKNSSSNEWTGETGKGTLLDSDEGSLSSGTQSSGCPTAEGRQDSKSTSPGKYPHPGLADFADNLIKESDILSDEDDDHRQTVKQGSPTKDIEIQFQRLRISEDPDVHPEAEQQPGPESGEGQKGGEQPKLVRGHFCPIKRKANSTKRDRGTLLKAQIRHQSLDSQSENATIDLNSVLEREFSVQSLTSVVSEECFYETESHGKS

SEQ ID NO: 87339 - protein, 1367 aa, Homo sapiens
  Payload ID: 17482
  Gene Symbol: TIAM2
  Gene Name: T-cell lymphoma invasion and metastasis 2
  ENSP ID: ENSP00000434901
MGNSDSQYTLQGSKNHSNTITGAKQIPCSLKIRGIHAKEEKSLHGWGHGSNGAGYKSRSLARSCLSHFKSNQPYASRLGGPTCKVSRGVAYSTHRTNAPGKDFQGISAAFSTENGFHSVGHELADNHITSRDCNGHLLNCYGRNESIASTPPGEDRKSPRVLIKTLGKLDGCLRVEFHNGGNPSKVPAEDCSEPVQLLRYSPTLASETSPVPEARRGSSADSLPSHRPSPTDSRLRSSKGSSLSSESSWYDSPWGNAGELSEAEGSFLAPGMPDPSLHASFPPGDAKKPFNQSSSLSSLRELYKDANLGSLSPSGIRLSDEYMGTHASLSNRVSFASDIDVPSRVAHGDPIQYSSFTLPCRKPKAFVEDTAKKDSLKARMRRISDWTGSLSRKKRKLQEPRSKEGSDYFDSRSDGLNTDVQGSSQASAFLWSGGSTQILSQRSESTHAIGSDPLRQNIYENFMRELEMSRTNTENIETSTETAESSSESLSSLEQLDLLFEKEQGVVRKAGWLFFKPLVTVQKERKLELVARRKWKQYWVTLKGCTLLFYETYGKNSMDQSSAPRCALFAEDSIVQSVPEHPKKENVFCLSNSFGDVYLFQATSQTDLENWVTAVHSACASLFAKKHGKEDTLRLLKNQTKNLLQKIDMDSKMKKMAELQLSVVSDPKNRKAIENQIQQWEQNLEKFHMDLFRMRCYLASLQGGELPNPKSLLAAASRPSKLALGRLGILSVSSFHALVCSRDDSALRKRTLSLTQRGRNKKGIFSSLKGLDTLARKGKEKRPSITQVDELLHIYGSTVDGVPRDNAWEIQTYVHFQDNHGVTVGIKPEHRVEDILTLACKMRQLEPSHYGLQLRKLVDDNVEYCIPAPYEYMQQQVYDEIEVFPLNVYDVQLTKTGSVCDFGFAVTAQVDERQHLSRIFISDVLPDGLAYGEGLRKGNEIMTLNGEAVSDLDLKQMEALFSEKSVGLTLIARPPDTKATLCTSWSDSDLFSRDQKSLLPPPNQSQLLEEFLDNFKKNTANDFSNVPDITTGLKRSQTDGTLDQVSHREKMEQTFRSAEQITALCRSFNDSQANGMEGPRENQDPPPRSLARHLSDADRLRKVIQELVDTEKSYVKDLSCLFELYLEPLQNETFLTQDEMESLFGSLPEMLEFQKVFLETLEDGISASSDFNTLETPSQFRKLLFSLGGSFLYYADHFKLYSGFCANHIKVQKVLERAKTDKAFKAFLDARNPTKQHSSTLESYLIKPVQRVLKYPLLLKELVSLTDQESEEHYHLTEALKAMEKVASHINEMQKIYEDYGTVFDQLVAEQSGTEKEVTELSMGELLMHSTVSWLNPFLSLGKARKDLELTVFVFKRAVILVYKENC

SEQ ID NO: 87340 - protein, 1045 aa, Homo sapiens
  Payload ID: 17482
  Gene Symbol: TIAM2
  Gene Name: T-cell lymphoma invasion and metastasis 2
  ENSP ID: ENSP00000435335
MDLFRMRCYLASLQGGELPNPKSLLAAASRPSKLALGRLGILSVSSFHALVCSRDDSALRKRTLSLTQRGRNKKGIFSSLKGLDTLARKGKEKRPSITQIFDSSGSHGFSGTQLPQNSSNSSEVDELLHIYGSTVDGVPRDNAWEIQTYVHFQDNHGVTVGIKPEHRVEDILTLACKMRQLEPSHYGLQLRKLVDDNVEYCIPAPYEYMQQQVYDEIEVFPLNVYDVQLTKTGSVCDFGFAVTAQVDERQHLSRIFISDVLPDGLAYGEGLRKGNEIMTLNGEAVSDLDLKQMEALFSEKSVGLTLIARPPDTKATLCTSWSDSDLFSRDQKSLLPPPNQSQLLEEFLDNFKKNTANDFSNVPDITTGLKRSQTDGTLDQVSHREKMEQTFRSAEQITALCRSFNDSQANGMEGPRENQDPPPRSLARHLSDADRLRKVIQELVDTEKSYVKDLSCLFELYLEPLQNETFLTQDEMESLFGSLPEMLEFQKVFLETLEDGISASSDFNTLETPSQFRKLLFSLGGSFLYYADHFKLYSGFCANHIKVQKVLERAKTDKAFKAFLDARNPTKQHSSTLESYLIKPVQRVLKYPLLLKELVSLTDQESEEHYHLTEALKAMEKVASHINEMQKIYEDYGTVFDQLVAEQSGTEKEVTELSMGELLMHSTVSWLNPFLSLGKARKDLELTVFVFKRAVILVYKENCKLKKKLPSNSRPAHNSTDLDPFKFRWLIPISALQVRLGNPAGTENNSIWELIHTKSEIEGRPETIFQLCCSDSESKTNIVKVIRSILRENFRRHIKCELPLEKTCKDRLVPLKNRVPVSAKLAKCVFLTVASSRSLKVLKNSSSNEWTGETGKGTLLDSDEGSLSSGTQSSGCPTAEGRQDSKSTSPGKYPHPGLADFADNLIKESDILSDEDDDHRQTVKQGSPTKDIEIQFQRLRISEDPDVHPEAEQQPGPESGEGQKGGEQPKLVRGHFCPIKRKANSTKRDRGTLLKAQIRHQSLDSQSENATIDLNSVLEREFSVQSLTSVVSEECFYETESHGKS

SEQ ID NO: 87341 - protein, 1701 aa, Homo sapiens; identical to SEQ ID NO: 87334
  Payload ID: 17482
  Gene Symbol: TIAM2
  Gene Name: T-cell lymphoma invasion and metastasis 2
  Uniprot ID: Q8IVF5
  ENSP ID: ENSP00000437188

SEQ ID NO: 87342 - protein, 85 aa, Homo sapiens
  Payload ID: 17482
  Gene Symbol: TIAM2
  Gene Name: T-cell lymphoma invasion and metastasis 2
  ENSP ID: ENSP00000437435
MGNSDSQYTLQGSKNHSNTITGAKQIPCSLKIRGIHAKEEKSLHGWGHGSNGAGYKSRSLARSCLSHFKSNQPYASRLGGPTCKV

SEQ ID NO: 87343 - protein, 195 aa, Homo sapiens
  Payload ID: 17482
  Gene Symbol: TIAM2
  Gene Name: T-cell lymphoma invasion and metastasis 2
  ENSP ID: ENSP00000442989
MGNSDSQYTLQGSKNHSNTITGAKQIPCSLKIRGIHAKEEKSLHGWGHGSNGAGYKSRSLARSCLSHFKSNQPYASRLGGPTCKVSRGVAYSTHRTNAPGKDFQGISAAFSTENGFHSVGHELADNHITSRDCNGHLLNCYGRNESIASTPPGEDRKSPRVLIKTLGKLDGCLRVEFHNGGNPSKVPAEDCSEPV

SEQ ID NO: 87344 - protein, 53 aa, Homo sapiens
  Payload ID: 17482
  Gene Symbol: TIAM2
  Gene Name: T-cell lymphoma invasion and metastasis 2
  ENSP ID: ENSP00000443546
MGNSDSQYTLQGSKNHSNTITGAKQIPCSLKIRGIHAKEEKSLHGWGHGSNGA

SEQ ID NO: 87345 - protein, 53 aa, Homo sapiens; identical to SEQ ID NO: 87344
  Payload ID: 17482
  Gene Symbol: TIAM2
  Gene Name: T-cell lymphoma invasion and metastasis 2
  ENSP ID: ENSP00000444040

SEQ ID NO: 87346 - protein, 64 aa, Homo sapiens
  Payload ID: 17482
  Gene Symbol: TIAM2
  Gene Name: T-cell lymphoma invasion and metastasis 2
  ENSP ID: ENSP00000444897
  MOD_RES (1)..(1): Any amino acid
XFSEKSVGLTLIARPPDTKATLCTSWSDSDLFSRDQKSLLPPPNQSQLLEEFLDNFKKNTANEC

SEQ ID NO: 87347 - protein, 830 aa, Homo sapiens
  Payload ID: 17483
  Gene Symbol: TCIRG1
  Gene Name: T-cell, immune regulator 1, ATPase, H+ transporting, lysosomal V0 subunit A3
  Uniprot ID: Q13488
  ENSP ID: ENSP00000265686
MGSMFRSEEVALVQLFLPTAAAYTCVSRLGELGLVEFRDLNASVSAFQRRFVVDVRRCEELEKTFTFLQEEVRRAGLVLPPPKGRLPAPPPRDLLRIQEETERLAQELRDVRGNQQALRAQLHQLQLHAAVLRQGHEPQLAAAHTDGASERTPLLQAPGGPHQDLRVNFVAGAVEPHKAPALERLLWRACRGFLIASFRELEQPLEHPVTGEPATWMTFLISYWGEQIGQKIRKITDCFHCHVFPFLQQEEARLGALQQLQQQSQELQEVLGETERFLSQVLGRVLQLLPPGQVQVHKMKAVYLALNQCSVSTTHKCLIAEAWCSVRDLPALQEALRDSSMEEGVSAVAHRIPCRDMPPTLIRTNRFTASFQGIVDAYGVGRYQEVNPAPYTIITFPFLFAVMFGDVGHGLLMFLFALAMVLAENRPAVKAAQNEIWQTFFRGRYLLLLMGLFSIYTGFIYNECFSRATSIFPSGWSVAAMANQSGWSDAFLAQHTMLTLDPNVTGVFLGPYPFGIDPIWSLAANHLSFLNSFKMKMSVILGVVHMAFGVVLGVFNHVHFGQRHRLLLETLPELTFLLGLFGYLVFLVIYKWLCVWAARAASAPSILIHFINMFLFSHSPSNRLLYPRQEVVQATLVVLALAMVPILLLGTPLHLLHRHRRRLRRRPADRQEENKAGLLDLPDASVNGWSSDEEKAGGLDDEEEAELVPSEVLMHQAIHTIEFCLGCVSNTASYLRLWALSLAHAQLSEVLWAMVMRIGLGLGREVGVAAVVLVPIFAAFAVMTVAILLVMEGLSAFLHALRLHWVEFQNKFYSGTGYKLSPFTFAATDD

SEQ ID NO: 87348 - protein, 174 aa, Homo sapiens
  Payload ID: 17483
  Gene Symbol: TCIRG1
  Gene Name: T-cell, immune regulator 1, ATPase, H+ transporting, lysosomal V0 subunit A3
  ENSP ID: ENSP00000431174
MGSMFRSEEVALVQLFLPTAAAYTCVSRLGELGLVEFRDLNASVSAFQRRFVVDVRRCEELEKTFTFLQEEVRRAGLVLPPPKGRLPAPPPRDLLRIQEETERLAQELRDVRGNQQALRAQLHQLQLHAAVLRQGHEPQLAAAHTDGASERTPLLQAPGGPHQDLRVKASQPRG

SEQ ID NO: 87349 - protein, 290 aa, Homo sapiens
  Payload ID: 17483
  Gene Symbol: TCIRG1
  Gene Name: T-cell, immune regulator 1, ATPase, H+ transporting, lysosomal V0 subunit A3
  ENSP ID: ENSP00000431437
  MOD_RES (1)..(1): Any amino acid
XSFVAGAVEPHKAPALERLLWRACRGFLIASFRELEQPLEHPVTGEPATWMTFLISYWGEQIGQKIRKITDCFHCHVFPFLQQEEARLGALQQLQQQSQELQEVLGETERFLSQVLGRVLQLLPPGQVQVHKMKAVYLALNQCSVSTTHKCLIAEAWCSVRDLPALQEALRDSSLPGHRGCLRRGPLPGGQPRSLHHHHLPLPVCCDVRGCGPRAAHVPVRPGHGPCGEPTGCEGRAERDLADFLQGPLPAPAYGPVLHLHRLHLQRVLQSRHQHLPLGLECGRHGQPVW

SEQ ID NO: 87350 - protein, 299 aa, Homo sapiens
  Payload ID: 17483
  Gene Symbol: TCIRG1
  Gene Name: T-cell, immune regulator 1, ATPase, H+ transporting, lysosomal V0 subunit A3
  ENSP ID: ENSP00000432846
MGSMFRSEEVALVQLFLPTAAAYTCLNASVSAFQRRFVVDVRRCEELEKTFTFLQEEVRRAGLVLPPPKGRLPAPPPRDLLRIQEETERLAQELRDVRGNQQALRAQLHQLQLHAAVLRQGHEPQLAAAHTDGASERTPLLQAPGGPHQDLRVNFVAGAVEPHKAPALERLLWRACRGFLIASFRELEQPLEHPVTGEPATWMTFLISYWGEQIGQKIRKITDCFHCHVFPFLQQEEARLGALQQLQQQSQELQEVLGETERFLSQVLGRVLQLLPPGQVQVHKMKAVYLALNQCSVST

SEQ ID NO: 87351 - protein, 61 aa, Homo sapiens
  Payload ID: 17483
  Gene Symbol: TCIRG1
  Gene Name: T-cell, immune regulator 1, ATPase, H+ transporting, lysosomal V0 subunit A3
  ENSP ID: ENSP00000432957
DDEEEAELVPSEVLMHQAIHTIEFCLGCVSNTASYLRLWALSLAHARWNSRTSSTQARATS

SEQ ID NO: 87352 - protein, 614 aa, Homo sapiens
  Payload ID: 17483
  Gene Symbol: TCIRG1
  Gene Name: T-cell, immune regulator 1, ATPase, H+ transporting, lysosomal V0 subunit A3
  Uniprot ID: Q13488
  ENSP ID: ENSP00000434407
MTFLISYWGEQIGQKIRKITDCFHCHVFPFLQQEEARLGALQQLQQQSQELQEVLGETERFLSQVLGRVLQLLPPGQVQVHKMKAVYLALNQCSVSTTHKCLIAEAWCSVRDLPALQEALRDSSMEEGVSAVAHRIPCRDMPPTLIRTNRFTASFQGIVDAYGVGRYQEVNPAPYTIITFPFLFAVMFGDVGHGLLMFLFALAMVLAENRPAVKAAQNEIWQTFFRGRYLLLLMGLFSIYTGFIYNECFSRATSIFPSGWSVAAMANQSGWSDAFLAQHTMLTLDPNVTGVFLGPYPFGIDPIWSLAANHLSFLNSFKMKMSVILGVVHMAFGVVLGVFNHVHFGQRHRLLLETLPELTFLLGLFGYLVFLVIYKWLCVWAARAASAPSILIHFINMFLFSHSPSNRLLYPRQEVVQATLVVLALAMVPILLLGTPLHLLHRHRRRLRRRPADRQEENKAGLLDLPDASVNGWSSDEEKAGGLDDEEEAELVPSEVLMHQAIHTIEFCLGCVSNTASYLRLWALSLAHAQLSEVLWAMVMRIGLGLGREVGVAAVVLVPIFAAFAVMTVAILLVMEGLSAFLHALRLHWVEFQNKFYSGTGYKLSPFTFAATDD

SEQ ID NO: 87353 - protein, 217 aa, Homo sapiens
  Payload ID: 17483
  Gene Symbol: TCIRG1
  Gene Name: T-cell, immune regulator 1, ATPase, H+ transporting, lysosomal V0 subunit A3
  ENSP ID: ENSP00000435023
MGSMFRSEEVALVQLFLPTAAAYTCVSRLGELGLVEFRDLNASVSAFQRRFVVDVRRCEELEKTFTFLQEEVRRAGLVLPPPKGRLPAPPPRDLLRIQEETERLAQELRDVRGNQQALRAQLHQLQLHAAVLRQGHEPQLAAAHTDGASERTPLLQAPGGPHQDLRVNFVAGAVEPHKAPALERLLWRACRGFLIASFRELEQPLEHPVTGEPATWM

SEQ ID NO: 87354 - protein, 104 aa, Homo sapiens
  Payload ID: 17483
  Gene Symbol: TCIRG1
  Gene Name: T-cell, immune regulator 1, ATPase, H+ transporting, lysosomal V0 subunit A3
  ENSP ID: ENSP00000436082
  MOD_RES (1)..(1): Any amino acid
XALNQCSVSTTHKCLIAEAWCSVRDLPALQEALRDSSMEEGVSAVAHRIPCRDMPPTLIRTNRFTASFQGIVDAYGVGRYQEVNPDGEMEAQRGEVAGPRSHSS

SEQ ID NO: 87355 - protein, 193 aa, Homo sapiens
  Payload ID: 17484
  Gene Symbol: TFPT
  Gene Name: TCF3 (E2A) fusion partner (in childhood Leukemia)
  ENSP ID: ENSP00000375637
MELEQREGTMAAVGFEEFSAPPGSELALPPLFGGHILESELETEVEFVSGGLGGSGLRERDEEEEAARGRRRRQRELNRRKYQALGRRCREIEQVNERVLNRLHQVQRITRRLQQERRFLMRVLDSYGDDYRASQFTIVLEAMRRMSLQRKRHCPRPEGLLHPQNPAAQPPVRGPVGGRGGECHGMDAEQEMR

SEQ ID NO: 87356 - protein, 244 aa, Homo sapiens
  Payload ID: 17484
  Gene Symbol: TFPT
  Gene Name: TCF3 (E2A) fusion partner (in childhood Leukemia)
  ENSP ID: ENSP00000375638
MAAVGFEEFSAPPGSELALPPLFGGHILESELETEVEFVSGGLGGSGLRERDEEEEAARGRRRRQRELNRRKYQALGRRCREIEQVNERVLNRLHQVQRITRRLQQERRFLMRVLDSYGDDYRASQFTIVLEDEGSQGTDAPTPGNAENEPPEKETLSPPRRTPAPPEPGSPAPGEGPSGRKRRRVPRDGRRAGNALTPELAPVQIKVEEDFGFEADEALDSSWVSRGPDKLLPYPTLASPASD

SEQ ID NO: 87357 - protein, 253 aa, Homo sapiens
  Payload ID: 17484
  Gene Symbol: TFPT
  Gene Name: TCF3 (E2A) fusion partner (in childhood Leukemia)
  Uniprot ID: P0C1Z6
  ENSP ID: ENSP00000375639
MELEQREGTMAAVGFEEFSAPPGSELALPPLFGGHILESELETEVEFVSGGLGGSGLRERDEEEEAARGRRRRQRELNRRKYQALGRRCREIEQVNERVLNRLHQVQRITRRLQQERRFLMRVLDSYGDDYRASQFTIVLEDEGSQGTDAPTPGNAENEPPEKETLSPPRRTPAPPEPGSPAPGEGPSGRKRRRVPRDGRRAGNALTPELAPVQIKVEEDFGFEADEALDSSWVSRGPDKLLPYPTLASPASD

SEQ ID NO: 87358 - protein, 105 aa, Homo sapiens
  Payload ID: 17484
  Gene Symbol: TFPT
  Gene Name: TCF3 (E2A) fusion partner (in childhood Leukemia)
  ENSP ID: ENSP00000395180
MELEQREGTMAAVGFEEFSAPPGSELALPPLFGGHILESELETEVEFVSGGLGGSGLRERDEEEEAARGRRRRQRELNRRKYQALGRRCREIEQVPHESAGLLRG

SEQ ID NO: 87359 - protein, 253 aa, Homo sapiens; identical to SEQ ID NO: 87357
  Payload ID: 17484
  Gene Symbol: TFPT
  Gene Name: TCF3 (E2A) fusion partner (in childhood Leukemia)
  ENSP ID: ENSP00000477775

SEQ ID NO: 87360 - protein, 253 aa, Homo sapiens; identical to SEQ ID NO: 87357
  Payload ID: 17484
  Gene Symbol: TFPT
  Gene Name: TCF3 (E2A) fusion partner (in childhood Leukemia)
  Uniprot ID: P0C1Z6
  ENSP ID: ENSP00000480169

SEQ ID NO: 87361 - protein, 253 aa, Homo sapiens; identical to SEQ ID NO: 87357
  Payload ID: 17484
  Gene Symbol: TFPT
  Gene Name: TCF3 (E2A) fusion partner (in childhood Leukemia)
  ENSP ID: ENSP00000480353

SEQ ID NO: 87362 - protein, 253 aa, Homo sapiens; identical to SEQ ID NO: 87357
  Payload ID: 17484
  Gene Symbol: TFPT
  Gene Name: TCF3 (E2A) fusion partner (in childhood Leukemia)
  ENSP ID: ENSP00000481443

SEQ ID NO: 87363 - protein, 253 aa, Homo sapiens; identical to SEQ ID NO: 87357
  Payload ID: 17484
  Gene Symbol: TFPT
  Gene Name: TCF3 (E2A) fusion partner (in childhood Leukemia)
  ENSP ID: ENSP00000482185

SEQ ID NO: 87364 - protein, 105 aa, Homo sapiens; identical to SEQ ID NO: 87358
  Payload ID: 17484
  Gene Symbol: TFPT
  Gene Name: TCF3 (E2A) fusion partner (in childhood Leukemia)
  ENSP ID: ENSP00000482618

SEQ ID NO: 87365 - protein, 253 aa, Homo sapiens; identical to SEQ ID NO: 87357
  Payload ID: 17484
  Gene Symbol: TFPT
  Gene Name: TCF3 (E2A) fusion partner (in childhood Leukemia)
  ENSP ID: ENSP00000482785

SEQ ID NO: 87366 - protein, 145 aa, Homo sapiens
  Payload ID: 17484
  Gene Symbol: TFPT
  Gene Name: TCF3 (E2A) fusion partner (in childhood Leukemia)
  ENSP ID: ENSP00000482931
MELEQREGTMAAVGFEEFSAPPGSELALPPLFGGHILESELETEVEFVSGGLGGSGLRERDEEEEAARGRRRRQRELNRRKYQALGRRCREIEQVNERVLNRLHQVQRITRRLQQERRFLMRVLDSYGDDYRASQFTIVLEQEMR

SEQ ID NO: 87367 - protein, 253 aa, Homo sapiens; identical to SEQ ID NO: 87357
  Payload ID: 17484
  Gene Symbol: TFPT
  Gene Name: TCF3 (E2A) fusion partner (in childhood Leukemia)
  ENSP ID: ENSP00000483417

SEQ ID NO: 87368 - protein, 193 aa, Homo sapiens; identical to SEQ ID NO: 87355
  Payload ID: 17484
  Gene Symbol: TFPT
  Gene Name: TCF3 (E2A) fusion partner (in childhood Leukemia)
  ENSP ID: ENSP00000483835

SEQ ID NO: 87369 - protein, 253 aa, Homo sapiens; identical to SEQ ID NO: 87357
  Payload ID: 17484
  Gene Symbol: TFPT
  Gene Name: TCF3 (E2A) fusion partner (in childhood Leukemia)
  ENSP ID: ENSP00000483971

SEQ ID NO: 87370 - protein, 244 aa, Homo sapiens; identical to SEQ ID NO: 87356
  Payload ID: 17484
  Gene Symbol: TFPT
  Gene Name: TCF3 (E2A) fusion partner (in childhood Leukemia)
  ENSP ID: ENSP00000484338

SEQ ID NO: 87371 - protein, 253 aa, Homo sapiens; identical to SEQ ID NO: 87357
  Payload ID: 17484
  Gene Symbol: TFPT
  Gene Name: TCF3 (E2A) fusion partner (in childhood Leukemia)
  ENSP ID: ENSP00000484685

SEQ ID NO: 87372 - protein, 556 aa, Homo sapiens
  Payload ID: 17485
  Gene Symbol: TCP1
  Gene Name: t-complex 1
  Uniprot ID: P17987
  ENSP ID: ENSP00000317334
MEGPLSVFGDRSTGETIRSQNVMAAASIANIVKSSLGPVGLDKMLVDDIGDVTITNDGATILKLLEVEHPAAKVLCELADLQDKEVGDGTTSVVIIAAELLKNADELVKQKIHPTSVISGYRLACKEAVRYINENLIVNTDELGRDCLINAAKTSMSSKIIGINGDFFANMVVDAVLAIKYTDIRGQPRYPVNSVNILKAHGRSQMESMLISGYALNCVVGSQGMPKRIVNAKIACLDFSLQKTKMKLGVQVVITDPEKLDQIRQRESDITKERIQKILATGANVILTTGGIDDMCLKYFVEAGAMAVRRVLKRDLKRIAKASGATILSTLANLEGEETFEAAMLGQAEEVVQERICDDELILIKNTKARTSASIILRGANDFMCDEMERSLHDALCVVKRVLESKSVVPGGGAVEAALSIYLENYATSMGSREQLAIAEFARSLLVIPNTLAVNAAQDSTDLVAKLRAFHNEAQVNPERKNLKWIGLDLSNGKPRDNKQAGVFEPTIVKVKSLKFATEAAITILRIDDLIKLHPESKDDKHGSYEDAVHSGALND

SEQ ID NO: 87373 - protein, 401 aa, Homo sapiens
  Payload ID: 17485
  Gene Symbol: TCP1
  Gene Name: t-complex 1
  ENSP ID: ENSP00000376008
MSSKIIGINGDFFANMVVDAVLAIKYTDIRGQPRYPVNSVNILKAHGRSQMESMLISGYALNCVVGSQGMPKRIVNAKIACLDFSLQKTKMKLGVQVVITDPEKLDQIRQRESDITKERIQKILATGANVILTTGGIDDMCLKYFVEAGAMAVRRVLKRDLKRIAKASGATILSTLANLEGEETFEAAMLGQAEEVVQERICDDELILIKNTKARTSASIILRGANDFMCDEMERSLHDALCVVKRVLESKSVVPGGGAVEAALSIYLENYATSMGSREQLAIAEFARSLLVIPNTLAVNAAQDSTDLVAKLRAFHNEAQVNPERKNLKWIGLDLSNGKPRDNKQAGVFEPTIVKVKSLKFATEAAITILRIDDLIKLHPESKDDKHGSYEDAVHSGALND

SEQ ID NO: 87374 - protein, 433 aa, Homo sapiens
  Payload ID: 17485
  Gene Symbol: TCP1
  Gene Name: t-complex 1
  ENSP ID: ENSP00000390159
MEGPLSVFGDRSTGETIRSQNVMAAASIANIVKSSLGPVGLDKMLVDDIGDVTITNDGATILKLLEVEHPAAKVLCELADLQDKEVGDGTTSVVIIAAELLKNADELVKQKIHPTSVISGYRLACKEAVRYINENLIVNTDELGRDCLINAAKTSMSSKIIGINGDFFANMVVDAVLAIKYTDIRGQPRYPVNSVNILKAHGRSQMESMLISGYALNCVVGSQGMPKRIVNAKIACLDFSLQKTKMKLGVQVVITDPEKLDQIRQRESDITKERIQKILATGANVILTTGGIDDMCLKYFVEAGAMAVRRVLKRDLKRIAKASGATILSTLANLEGEETFEAAMLGQAEEVVQERICDDELILIKNTKARTSASIILRGANDFMCDEMERSLHDALCVVKRVLESKSVVPGGGAVEAALSIYLENYATSMDWS

SEQ ID NO: 87375 - protein, 111 aa, Homo sapiens
  Payload ID: 17485
  Gene Symbol: TCP1
  Gene Name: t-complex 1
  ENSP ID: ENSP00000437840
MAAASIANIVKSSLGPVGLDKMLVDDIGDVTITNDGATILKLLEVEHPAAKVLCELADLQDKEVGDGTTSVVIIAAELLKNADELVKQKIHPTSVISGYRLACKEAVRYIN

SEQ ID NO: 87376 - protein, 332 aa, Homo sapiens
  Payload ID: 17485
  Gene Symbol: TCP1
  Gene Name: t-complex 1
  ENSP ID: ENSP00000439447
MPKRIVNAKIACLDFSLQKTKMKLGVQVVITDPEKLDQIRQRESDITKERIQKILATGANVILTTGGIDDMCLKYFVEAGAMAVRRVLKRDLKRIAKASGATILSTLANLEGEETFEAAMLGQAEEVVQERICDDELILIKNTKARTSASIILRGANDFMCDEMERSLHDALCVVKRVLESKSVVPGGGAVEAALSIYLENYATSMGSREQLAIAEFARSLLVIPNTLAVNAAQDSTDLVAKLRAFHNEAQVNPERKNLKWIGLDLSNGKPRDNKQAGVFEPTIVKVKSLKFATEAAITILRIDDLIKLHPESKDDKHGSYEDAVHSGALND

SEQ ID NO: 87377 - protein, 136 aa, Homo sapiens
  Payload ID: 17485
  Gene Symbol: TCP1
  Gene Name: t-complex 1
  ENSP ID: ENSP00000439671
MAAASIANIVKSSLGPVGLDKMLVDDIGDVTITNDGATILKLLEVEHPAAKVLCELADLQDKEVGDGTTSVVIIAAELLKNADELVKQKIHPTSVISGYRLACKEAVRYINENLIVNTDELGRDCLINAAKTSMSS

SEQ ID NO: 87378 - protein, 65 aa, Homo sapiens
  Payload ID: 17485
  Gene Symbol: TCP1
  Gene Name: t-complex 1
  ENSP ID: ENSP00000440617
MEGPLSVFGDRSTGETIRSQNVMAAASIANIVKSSLGPVGLDKMLVDDIGWFIFFPANFLGCNHY

SEQ ID NO: 87379 - protein, 221 aa, Homo sapiens
  Payload ID: 17485
  Gene Symbol: TCP1
  Gene Name: t-complex 1
  ENSP ID: ENSP00000441345
MEGPLSVFGDRSTGETIRSQNGMPKRIVNAKIACLDFSLQKTKMKLGVQVVITDPEKLDQIRQRESDITKERIQKILATGANVILTTGGIDDMCLKYFVEAGAMAVRRVLKRDLKRIAKASGATILSTLANLEGEETFEAAMLGQAEEVVQERICDDELILIKNTKARTSASIILRGANDFMCDEMERSLHDALCVVKRVLESKSVVPGGGAVEAALSIYL

SEQ ID NO: 87380 - protein, 59 aa, Homo sapiens
  Payload ID: 17485
  Gene Symbol: TCP1
  Gene Name: t-complex 1
  ENSP ID: ENSP00000442185
MELLQWEAVRYINENLIVNTDELGRDCLINAAKTSMSSKIIGINGDFFANMVVDAVLAI

SEQ ID NO: 87381 - protein, 91 aa, Homo sapiens
  Payload ID: 17485
  Gene Symbol: TCP1
  Gene Name: t-complex 1
  ENSP ID: ENSP00000442856
MAAASIANIVKSSLGPVGLDKMLVDDIGDVTITNDGATILKLLEVEHPAAKVLCELADLQDKEVGDGTTSVVIIAAELLKNADELVKQKIH

SEQ ID NO: 87382 - protein, 100 aa, Homo sapiens
  Payload ID: 17485
  Gene Symbol: TCP1
  Gene Name: t-complex 1
  ENSP ID: ENSP00000444423
MEGPLSVFGDRSTGETIRSQNVMAAASIANIVKSSLGPVGLDKMLVDDIGDVTITNDGATILKLLEVEHPAAKVLCELADLQDKEVGDGTTSVGSSALYQ

SEQ ID NO: 87383 - protein, 298 aa, Homo sapiens
  Payload ID: 17486
  Gene Symbol: TCP10
  Gene Name: t-complex 10
  Uniprot ID: Q12799
  ENSP ID: ENSP00000355792
MEKTPAAAEVPREDSNAGEMPSLQQQITSLHQELGRQQSLWADIHRKLQSHMDALRKQNRELREELRGLQRQQWEAGKKPAASPHAGRESHTLALEPAFGKISHLSADEDTTPKYAGRKSQSATLLGQRWSSNHLAPPKPMSLKTERINSGKTPPQEDREKSPPGRRQDRSPAPTGRPTPGAERRGVSEDGKIMHPSSRSPQNSGGRKSPVQASQATTLQEQTAAARGADRSSSVLGSSEGGFLSRVQADEFASSAPDSAERQKNSTPMAPKKSCFPTGRWNISRMDRKRPYFLMGQS

SEQ ID NO: 87384 - protein, 326 aa, Homo sapiens
  Payload ID: 17486
  Gene Symbol: TCP10
  Gene Name: t-complex 10
  ENSP ID: ENSP00000380929
MEKTPAAAEVPREDSNAGEMPSLQQQITSLHQELGRQQSLWADIHRKLQSHMDALRKQNRELREELRGLQRQQWEAGKKPAASPHAGRESHTLALEPAFGKISHLSADEDTTPKYAGRKSQSATLLGQRWSSNHLAPPKPMSLKTERINSGKTPPQEDREKSPPGRRQDRSPAPTGRPTPGAERRGVSEDGKIMHPSSRSPQNSGGRKSPVQASQATTLQEQTAAARGADRSSSVLGSSEGGFLSRVQADEFASSAPDSAERQNLPVNPPSSLEIAQAMDTKMKKEEVQEEKRHPKGKADDCRRSGFPSEFPGALHAAPSRQDMGP

SEQ ID NO: 87385 - protein, 95 aa, Homo sapiens
  Payload ID: 17486
  Gene Symbol: TCP10
  Gene Name: t-complex 10
  ENSP ID: ENSP00000423829
MEKTPAAAEVPREDSNAGEMPSLQQQITSLHQELGRQQSLWADIHRKLQSHMDALRKQNRELREELRGLQRQQWEAGKKPAASPHAGRESHTLVP

SEQ ID NO: 87386 - protein, 207 aa, Homo sapiens
  Payload ID: 17486
  Gene Symbol: TCP10
  Gene Name: t-complex 10
  ENSP ID: ENSP00000426065
GTRPRCSGPSRSDWRGPGEVMRSVSGAEGRGLPQTEGVTSLGPRTLGYPLGGAGKKKLSQGCEDRGPLPTSTETVPIPAGKEQPGIRLLALEPAFGKISHLSADEDTTPKYAGRKSQSATLLGQRWSSNHLAPPKPMSLKTERINSGKTPPQEDREKSPPGRRQDRSPAPTGRPTPGAERRGVSEDGKVTSETWVTLHWQHGKFRFR

SEQ ID NO: 87387 - protein, 107 aa, Homo sapiens
  Payload ID: 17486
  Gene Symbol: TCP10
  Gene Name: t-complex 10
  ENSP ID: ENSP00000427675
MEKTPAAAEVPREDSNAGEMPSLQQQITSLHQELGRQQSLWADIHRKLQSHMDALRKQNRELREELRGLQRQQWEAGKKPAASPHAGRESHTLVPKAHLCFCIICVV

SEQ ID NO: 87388 - protein, 352 aa, Homo sapiens
  Payload ID: 17486
  Gene Symbol: TCP10
  Gene Name: t-complex 10
  ENSP ID: ENSP00000484621
MLEGQLEAGPKEGTHPEDPCPGAGAAMEKTPAAAEVPREDSNAGEMPSLQQQITSLHQELGRQQSLWADIHRKLQSHMDALRKQNRELREELRGLQRQQWEAGKKPAASPHAGRESHTLALEPAFGKISHLSADEDTTPKYAGRKSQSATLLGQRWSSNHLAPPKPMSLKTERINSGKTPPQEDREKSPPGRRQDRSPAPTGRPTPGAERRGVSEDGKIMHPSSRSPQNSGGRKSPVQASQATTLQEQTAAARGADRSSSVLGSSEGGFLSRVQADEFASSAPDSAERQNLPVNPPSSLEIAQAMDTKMKKEEVQEEKRHPKGKADDCRRSGFPSEFPGALHAAPSRQDMGP

SEQ ID NO: 87389 - protein, 215 aa, Homo sapiens
  Payload ID: 17487
  Gene Symbol: TCP10L
  Gene Name: t-complex 10-like
  Uniprot ID: Q8TDR4
  ENSP ID: ENSP00000300258
MLAGQLEARDPKEGTHPEDPCPGAGAVMEKTAVAAEVLTEDCNTGEMPPLQQQIIRLHQELGRQKSLWADVHGKLRSHIDALREQNMELREKLRALQLQRWKARKKSAASPHAGQESHTLALEPAFGKISPLSADEETIPKYAGHKNQSATLLGQRSSSNNSAPPKPMSLKIERISSWKTPPQENRDKNLSRRRQDRRATPTGRPTPCAERRGGV

SEQ ID NO: 87390 - protein, 191 aa, Homo sapiens
  Payload ID: 17487
  Gene Symbol: TCP10L
  Gene Name: t-complex 10-like
  ENSP ID: ENSP00000463050
MLAGQLEARDPKEGTHPEDPCPGAGAVMEKTAVAAEVLTEDCNTGEMPPLQQQIIRLHQELGRQKSLWADVHGKLRSHIDALREQNMELREKLRALQLQRWKARKKSAASPHAGQESHTLALEPAFGKISPLSADEETIPKYAGHKNQSATLLGQRSSSNNSAPPKPMSLKIERISSWKTPPQENRDKNLS

SEQ ID NO: 87391 - protein, 129 aa, Homo sapiens
  Payload ID: 17487
  Gene Symbol: TCP10L
  Gene Name: t-complex 10-like
  ENSP ID: ENSP00000476481
MELREKLRALQLQRWKARKKSAASPHAGQESHTLALEPAFGKISPLSADEETIPKYAGHKNQSATLLGQRSSSNNSAPPKPMSLKIERISSWKTPPQENRDKNLSRRRQDRRATPTGRPTPCAERRGGV

SEQ ID NO: 87392 - protein, 108 aa, Homo sapiens
  Payload ID: 17487
  Gene Symbol: TCP10L
  Gene Name: t-complex 10-like
  ENSP ID: ENSP00000476697
MELREKLRALQLQRWKARKKSAASPHAGQESHTLALEPAFGKISPLSADEETIPKYAGHKNQSATLLGQRSSSNNSAPPKLLFRTFSQPVCLFLSQLCVTLILRKQIS

SEQ ID NO: 87393 - protein, 307 aa, Homo sapiens
  Payload ID: 17488
  Gene Symbol: TCP10L2
  Gene Name: t-complex 10-like 2
  ENSP ID: ENSP00000283507
MLEGQLEAREPKEGTHPEDPCPGAGAAMEKTPAAAEVPREDSNAGEMPSLQQQITSLHQELGRQQSLWADIHRKLQSHMDALRKQNRELREELRGLQRQQWEAGKKPAASPHAGRESHTLALEPAFGKISPLSADEETTPKYAGRKSQSATLLGQRWSSNHLAPPKPMSLKTERINSGKTPPQEDREKSPPGRRQDRSPAPTGRPTPGAERREVSEDGKIMHPSSRSLQNSGGRKSPVQASQAATLQEQTAAAGVADRSSSVLGSSEGGFLSRVQAEEFASSSPDSAERQKNSTPMAPKKSCFPMGQ

SEQ ID NO: 87394 - protein, 353 aa, Homo sapiens
  Payload ID: 17488
  Gene Symbol: TCP10L2
  Gene Name: t-complex 10-like 2
  Uniprot ID: B9ZVM9
  ENSP ID: ENSP00000355797
MLEGQLEAREPKEGTHPEDPCPGAGAAMEKTPAAAEVPREDSNAGEMPSLQQQITSLHQELGRQQSLWADIHRKLQSHMDALRKQNRELREELRGLQRQQWEAGKKPAASPHAGRESHTLALEPAFGKISPLSADEETTPKYAGRKSQSATLLGQRWSSNHLAPPKPMSLKTERINSGKTPPQEDREKSPPGRRQDRSPAPTGRPTPGAERREVSEDGKIMHPSSRSLQNSGGRKSPVQASQAATLQEQTAAAGVADRSSSVLGSSEGGFLSRVQAEEFASSSPDSAERQNLPVNPPSSLEIAQAMDTKMKKEEVQEEKRHPNGKADDCRRSGFPSEFPGALHAAPSRQDMGP

SEQ ID NO: 87395 - protein, 44 aa, Homo sapiens
  Payload ID: 17488
  Gene Symbol: TCP10L2
  Gene Name: t-complex 10-like 2
  ENSP ID: ENSP00000440886
MLEGQLEAREPKEGTHPEDPCPGAGAAMEKTPAAAEVPREDSNA

SEQ ID NO: 87396 - protein, 407 aa, Homo sapiens
  Payload ID: 17489
  Gene Symbol: TCP11X2
  Gene Name: t-complex 11 family, X-linked 2
  Uniprot ID: Q5H9J9
  ENSP ID: ENSP00000392879
MYNAFWNHLKEQLLSTPPDFTCALELLKDVKENRLRNEIEEALDTDLLKQEAEHGALDVPHLSNYILNLMALLCAPVRDEAIQKLETIRDPVQLLRGILRVLGLMKMDMVNYTIQSFRPYLQEHSIQYEQAKFQELLDKQPSLLDYTTKWLTKAATDITTLCPSSPDSPSSSCSMACSLPSGAGNNSEPPSPTMVLYQGYLNLLLWDLENVEFPETLLMDRIRLQELAFQLHQLTVLASVLLVARSFSGEVLFRSPEFVDRLKCTTKALTEEFISRPEETMLSVSEQVSQEVHQGLKDMGLTTLSSENTASLLGQLQNITKKENCIRSIVDQWIRFFLKCCLLHGMQESLLHFPGGLILIEKELAELGWKFLNLMHHNQQVFGPYYAEILKHIIHPAQAQETDVEPN

SEQ ID NO: 87397 - protein, 122 aa, Homo sapiens
  Payload ID: 17489
  Gene Symbol: TCP11X2
  Gene Name: t-complex 11 family, X-linked 2
  ENSP ID: ENSP00000404462
MPKTEETVLQNDPSVAENGAPEPKTPGQSQKSKSFCLDDQSPDLIETVNEVSKLSISHEIVVNQDFYVEETILPPNSVEGRFAEAMYNAFWNHLKEQLLSTPPDFTCALELLKDVKENPGDE

SEQ ID NO: 87398 - protein, 441 aa, Homo sapiens
  Payload ID: 17490
  Gene Symbol: TCP11
  Gene Name: t-complex 11, testis-specific
  Uniprot ID: Q8WWU5
  ENSP ID: ENSP00000244645
MAPKGILGSFPTAMNLSLEGKVKETVHNAFWDHLKEQLSATPPDFSCALELLKEIKEILLSLLLPRQNRLRIEIEEALDMDLLKQEAEHGALKVLYLSKYVLNMMALLCAPVRDEAVQKLENITDPVWLLRGIFQVLGRMKMDMVNYTIQSLQPHLQEHSIQYERAKFQELLNKQPSLLNHTTKWLTQAAGDLTMSPPTCPDTSDSSSVAGPSPNEAANNPEPLSPTMVLCQGFLNLLLWDLENEEFPETLLMDRTRLQELKSQLHQLTVMASVLLVASSFSGSVLFGSPQFVDKLKRITKSLLEDFHSRPEEAILTVSEQVSQEIHQSLKNMGLVALSSDNTASLMGQLQNIAKKENCVCSVIDQRIHLFLKCCLVLGVQRSLLDLPGGLTLIEAELAELGQKFVNLTHHNQQVFGPYYTEILKTLISPAQALETKVESV

SEQ ID NO: 87399 - protein, 516 aa, Homo sapiens
  Payload ID: 17490
  Gene Symbol: TCP11
  Gene Name: t-complex 11, testis-specific
  Uniprot ID: Q8WWU5
  ENSP ID: ENSP00000308708
MTRGGGGGDTISKMPDVKESVPPKYPGDSEGRSCKPETSGPPQEDKSGSEDPPPFLSVTGLTETVNEVSKLSNKIGMNCDYYMEEKVLPPSSLEGKVKETVHNAFWDHLKEQLSATPPDFSCALELLKEIKEILLSLLLPRQNRLRIEIEEALDMDLLKQEAEHGALKVLYLSKYVLNMMALLCAPVRDEAVQKLENITDPVWLLRGIFQVLGRMKMDMVNYTIQSLQPHLQEHSIQYERAKFQELLNKQPSLLNHTTKWLTQAAGDLTMSPPTCPDTSDSSSVAGPSPNEAANNPEPLSPTMVLCQGFLNLLLWDLENEEFPETLLMDRTRLQELKSQLHQLTVMASVLLVASSFSGSVLFGSPQFVDKLKRITKSLLEDFHSRPEEAILTVSEQVSQEIHQSLKNMGLVALSSDNTASLMGQLQNIAKKENCVCSVIDQRIHLFLKCCLVLGVQRSLLDLPGGLTLIEAELAELGQKFVNLTHHNQQVFGPYYTEILKTLISPAQALETKVESV

SEQ ID NO: 87400 - protein, 470 aa, Homo sapiens
  Payload ID: 17490
  Gene Symbol: TCP11
  Gene Name: t-complex 11, testis-specific
  Uniprot ID: Q8WWU5
  ENSP ID: ENSP00000363085
MTRGGGGGVLSVTGLTETVNEVSKLSNKIGMNCDYYMEEKVLPPSSLEGKVKETVHNAFWDHLKEQLSATPPDFSCALELLKEIKEILLSLLLPRQNRLRIEIEEALDMDLLKQEAEHGALKVLYLSKYVLNMMALLCAPVRDEAVQKLENITDPVWLLRGIFQVLGRMKMDMVNYTIQSLQPHLQEHSIQYERAKFQELLNKQPSLLNHTTKWLTQAAGDLTMSPPTCPDTSDSSSVAGPSPNEAANNPEPLSPTMVLCQGFLNLLLWDLENEEFPETLLMDRTRLQELKSQLHQLTVMASVLLVASSFSGSVLFGSPQFVDKLKRITKSLLEDFHSRPEEAILTVSEQVSQEIHQSLKNMGLVALSSDNTASLMGQLQNIAKKENCVCSVIDQRIHLFLKCCLVLGVQRSLLDLPGGLTLIEAELAELGQKFVNLTHHNQQVFGPYYTEILKTLISPAQALETKVESV

SEQ ID NO: 87401 - protein, 441 aa, Homo sapiens; identical to SEQ ID NO: 87398
  Payload ID: 17490
  Gene Symbol: TCP11
  Gene Name: t-complex 11, testis-specific
  Uniprot ID: Q8WWU5
  ENSP ID: ENSP00000363091

SEQ ID NO: 87402 - protein, 54 aa, Homo sapiens
  Payload ID: 17490
  Gene Symbol: TCP11
  Gene Name: t-complex 11, testis-specific
  ENSP ID: ENSP00000399012
MTRGGGGGDTISKMPDVKESVPPKYPGDSEGRSCKPETSGPPQEDKSGSEDPPP

SEQ ID NO: 87403 - protein, 465 aa, Homo sapiens
  Payload ID: 17490
  Gene Symbol: TCP11
  Gene Name: t-complex 11, testis-specific
  Uniprot ID: Q8WWU5
  ENSP ID: ENSP00000402816
MTRGGGGGGLTETVNEVSKLSNKIGMNCDYYMEEKVLPPSSLEGKVKETVHNAFWDHLKEQLSATPPDFSCALELLKEIKEILLSLLLPRQNRLRIEIEEALDMDLLKQEAEHGALKVLYLSKYVLNMMALLCAPVRDEAVQKLENITDPVWLLRGIFQVLGRMKMDMVNYTIQSLQPHLQEHSIQYERAKFQELLNKQPSLLNHTTKWLTQAAGDLTMSPPTCPDTSDSSSVAGPSPNEAANNPEPLSPTMVLCQGFLNLLLWDLENEEFPETLLMDRTRLQELKSQLHQLTVMASVLLVASSFSGSVLFGSPQFVDKLKRITKSLLEDFHSRPEEAILTVSEQVSQEIHQSLKNMGLVALSSDNTASLMGQLQNIAKKENCVCSVIDQRIHLFLKCCLVLGVQRSLLDLPGGLTLIEAELAELGQKFVNLTHHNQQVFGPYYTEILKTLISPAQALETKVESV

SEQ ID NO: 87404 - protein, 511 aa, Homo sapiens
  Payload ID: 17490
  Gene Symbol: TCP11
  Gene Name: t-complex 11, testis-specific
  Uniprot ID: Q8WWU5
  ENSP ID: ENSP00000404479
MTRGGGGGDTISKMPDVKESVPPKYPGDSEGRSCKPETSGPPQEDKSGSEDPPPCLTETVNEVSKLSNKIGMNCDYYMEEKVLPPSSLEGKVKETVHNAFWDHLKEQLSATPPDFSCALELLKEIKEILLSLLLPRQNRLRIEIEEALDMDLLKQEAEHGALKVLYLSKYVLNMMALLCAPVRDEAVQKLENITDPVWLLRGIFQVLGRMKMDMVNYTIQSLQPHLQEHSIQYERAKFQELLNKQPSLLNHTTKWLTQAAGDLTMSPPTCPDTSDSSSVAGPSPNEAANNPEPLSPTMVLCQGFLNLLLWDLENEEFPETLLMDRTRLQELKSQLHQLTVMASVLLVASSFSGSVLFGSPQFVDKLKRITKSLLEDFHSRPEEAILTVSEQVSQEIHQSLKNMGLVALSSDNTASLMGQLQNIAKKENCVCSVIDQRIHLFLKCCLVLGVQRSLLDLPGGLTLIEAELAELGQKFVNLTHHNQQVFGPYYTEILKTLISPAQALETKVESV

SEQ ID NO: 87405 - protein, 440 aa, Homo sapiens
  Payload ID: 17490
  Gene Symbol: TCP11
  Gene Name: t-complex 11, testis-specific
  Uniprot ID: Q8WWU5
  ENSP ID: ENSP00000415320
MNCDYYMEEKVLPPSSLEGKVKETVHNAFWDHLKEQLSATPPDFSCALELLKEIKEILLSLLLPRQNRLRIEIEEALDMDLLKQEAEHGALKVLYLSKYVLNMMALLCAPVRDEAVQKLENITDPVWLLRGIFQVLGRMKMDMVNYTIQSLQPHLQEHSIQYERAKFQELLNKQPSLLNHTTKWLTQAAGDLTMSPPTCPDTSDSSSVAGPSPNEAANNPEPLSPTMVLCQGFLNLLLWDLENEEFPETLLMDRTRLQELKSQLHQLTVMASVLLVASSFSGSVLFGSPQFVDKLKRITKSLLEDFHSRPEEAILTVSEQVSQEIHQSLKNMGLVALSSDNTASLMGQLQNIAKKENCVCSVIDQRIHLFLKCCLVLGVQRSLLDLPGGLTLIEAELAELGQKFVNLTHHNQQVFGPYYTEILKTLISPAQALETKVESV

SEQ ID NO: 87406 - protein, 43 aa, Homo sapiens
  Payload ID: 17490
  Gene Symbol: TCP11
  Gene Name: t-complex 11, testis-specific
  ENSP ID: ENSP00000415562
MTRGGGGGVWKARSRRQCTMPFGTILKSNYQQLPLTSAVLLNF

SEQ ID NO: 87407 - protein, 221 aa, Homo sapiens
  Payload ID: 17490
  Gene Symbol: TCP11
  Gene Name: t-complex 11, testis-specific
  ENSP ID: ENSP00000421103
MDLLKQEAEHGALKVLYLSKYVLNMMALLCAPVRDEAVQKLENITDPVWLLRGIFQVLGRMKMDMVNYTIQSLQPHLQEHSIQYERAKFQELLNKQPSLLNHTTKWLTQAAGDLTMSPPTCPDTSDSSSVAGPSPNEAANNPEPLSPTMVLCQGFLNLLLWDLENEEFPETLLMDRTRLQELKSQLHQLTVMASVLLVASSFSGSVLFGSPQFVDKLKRIT

SEQ ID NO: 87408 - protein, 69 aa, Homo sapiens
  Payload ID: 17490
  Gene Symbol: TCP11
  Gene Name: t-complex 11, testis-specific
  ENSP ID: ENSP00000421333
MNCDYYMEEKVLPPSSLEGKVKETVHNAFWDHLKEQLSATPPDFSCALELLKEIKEILLSLLLPRQNRL

SEQ ID NO: 87409 - protein, 41 aa, Homo sapiens
  Payload ID: 17490
  Gene Symbol: TCP11
  Gene Name: t-complex 11, testis-specific
  ENSP ID: ENSP00000421349
MPDVKESVPPKYPGDSEGRSCKPETSGPPQEDKSGSEDPPP

SEQ ID NO: 87410 - protein, 74 aa, Homo sapiens
  Payload ID: 17490
  Gene Symbol: TCP11
  Gene Name: t-complex 11, testis-specific
  ENSP ID: ENSP00000421386
MTRGGGGGDTISKMPDVKESVPPKYPGDSEGRSCKPETSGPPQEDKSGSEDPPPCPRAEVFKEFLVLEKEVTQA

SEQ ID NO: 87411 - protein, 54 aa, Homo sapiens; identical to SEQ ID NO: 87402
  Payload ID: 17490
  Gene Symbol: TCP11
  Gene Name: t-complex 11, testis-specific
  ENSP ID: ENSP00000421916

SEQ ID NO: 87412 - protein, 245 aa, Homo sapiens
  Payload ID: 17490
  Gene Symbol: TCP11
  Gene Name: t-complex 11, testis-specific
  ENSP ID: ENSP00000422105
  MOD_RES (1)..(1): Any amino acid
XGIFQVLGRMKMDMVNYTIQSLQPHLQEHSIQYERAKFQELLNKQPSLLNHTTKWLTQAAGDLTMSPPTCPDTSDSSSVAGPSPNEAANNPEPLSPTMVLCQGFLNLLLWDLENEEFPETLLMDRTRLQELKSQLHQLTVMASVLLVASSFSGSVLFGSPQFVDKLKRITKSLLEDFHSRPEEAILTVSEQVSQEIHQSLKNMGLVALSSDNTASLMGQLQNIAKKENCVCSVIAQALETKVESV

SEQ ID NO: 87413 - protein, 89 aa, Homo sapiens
  Payload ID: 17490
  Gene Symbol: TCP11
  Gene Name: t-complex 11, testis-specific
  ENSP ID: ENSP00000422259
MTRGGGGGDTISKMPDVKESVPPKYPGDSEGRSCKPETSGPPQEDKSGSEDPPPFWKARSRRQCTMPFGTILKSNYQQLPLTSAVLLNF

SEQ ID NO: 87414 - protein, 103 aa, Homo sapiens
  Payload ID: 17490
  Gene Symbol: TCP11
  Gene Name: t-complex 11, testis-specific
  ENSP ID: ENSP00000422774
MAPKGILGSFPTAMNLSLEGKVKETVHNAFWDHLKEQLSATPPDFSCALELLKEIKEILLSLLLPRQNRLRIEIEEALDMDLLKQEAEHGALKVLYLSKYVLN

SEQ ID NO: 87415 - protein, 80 aa, Homo sapiens
  Payload ID: 17490
  Gene Symbol: TCP11
  Gene Name: t-complex 11, testis-specific
  ENSP ID: ENSP00000422940
MTRGGGGGDTISKMPDVKESVPPKYPGDSEGRSCKPETSGPPQEDKSGSEDPPPSSTMINSWPIFVHLHLLHILEPNNFL

SEQ ID NO: 87416 - protein, 84 aa, Homo sapiens
  Payload ID: 17490
  Gene Symbol: TCP11
  Gene Name: t-complex 11, testis-specific
  ENSP ID: ENSP00000423183
MNCDYYMEEKVLPPSSLEGKVKETVHNAFWDHLKEQLSATPPDFSCALELLKEIKEILLSLLLPRQNRLRIEIEEALDMDLLKQ

SEQ ID NO: 87417 - protein, 54 aa, Homo sapiens; identical to SEQ ID NO: 87402
  Payload ID: 17490
  Gene Symbol: TCP11
  Gene Name: t-complex 11, testis-specific
  ENSP ID: ENSP00000423293

SEQ ID NO: 87418 - protein, 43 aa, Homo sapiens; identical to SEQ ID NO: 87406
  Payload ID: 17490
  Gene Symbol: TCP11
  Gene Name: t-complex 11, testis-specific
  ENSP ID: ENSP00000424209

SEQ ID NO: 87419 - protein, 54 aa, Homo sapiens; identical to SEQ ID NO: 87402
  Payload ID: 17490
  Gene Symbol: TCP11
  Gene Name: t-complex 11, testis-specific
  ENSP ID: ENSP00000424332

SEQ ID NO: 87420 - protein, 35 aa, Homo sapiens
  Payload ID: 17490
  Gene Symbol: TCP11
  Gene Name: t-complex 11, testis-specific
  ENSP ID: ENSP00000425849
MTRGGGGGDTISKMPDVKESVPPKYPGDSEGRERN

SEQ ID NO: 87421 - protein, 503 aa, Homo sapiens
  Payload ID: 17490
  Gene Symbol: TCP11
  Gene Name: t-complex 11, testis-specific
  Uniprot ID: Q8WWU5
  ENSP ID: ENSP00000425995
MPDVKESVPPKYPGDSEGRSCKPETSGPPQEDKSGSEDPPPFLSVTGLTETVNEVSKLSNKIGMNCDYYMEEKVLPPSSLEGKVKETVHNAFWDHLKEQLSATPPDFSCALELLKEIKEILLSLLLPRQNRLRIEIEEALDMDLLKQEAEHGALKVLYLSKYVLNMMALLCAPVRDEAVQKLENITDPVWLLRGIFQVLGRMKMDMVNYTIQSLQPHLQEHSIQYERAKFQELLNKQPSLLNHTTKWLTQAAGDLTMSPPTCPDTSDSSSVAGPSPNEAANNPEPLSPTMVLCQGFLNLLLWDLENEEFPETLLMDRTRLQELKSQLHQLTVMASVLLVASSFSGSVLFGSPQFVDKLKRITKSLLEDFHSRPEEAILTVSEQVSQEIHQSLKNMGLVALSSDNTASLMGQLQNIAKKENCVCSVIDQRIHLFLKCCLVLGVQRSLLDLPGGLTLIEAELAELGQKFVNLTHHNQQVFGPYYTEILKTLISPAQALETKVESV

SEQ ID NO: 87422 - protein, 440 aa, Homo sapiens; identical to SEQ ID NO: 87405
  Payload ID: 17490
  Gene Symbol: TCP11
  Gene Name: t-complex 11, testis-specific
  Uniprot ID: Q8WWU5
  ENSP ID: ENSP00000478603

SEQ ID NO: 87423 - protein, 509 aa, Homo sapiens
  Payload ID: 17491
  Gene Symbol: TCP11L1
  Gene Name: t-complex 11, testis-specific-like 1
  Uniprot ID: Q9NUJ3
  ENSP ID: ENSP00000335595
MSENLDKSNVNEAGKSKSNDSEEGLEDAVEGADEALQKAIKSDSSSPQRVQRPHSSPPRFVTVEELLETARGVTNMALAHEIVVNGDFQIKPVELPENSLKKRVKEIVHKAFWDCLSVQLSEDPPAYDHAIKLVGEIKETLLSFLLPGHTRLRNQITEVLDLDLIKQEAENGALDISKLAEFIIGMMGTLCAPARDEEVKKLKDIKEIVPLFREIFSVLDLMKVDMANFAISSIRPHLMQQSVEYERKKFQEILERQPNSLDFVTQWLEEASEDLMTQKYKHALPVGGMAAGSGDMPRLSPVAVQNYAYLKLLKWDHLQRPFPETVLMDQSRFHELQLQLEQLTILGAVLLVTFSMAAPGISSQADFAEKLKMIVKILLTDMHLPSFHLKDVLTTIGEKVCLEVSSCLSLCGSSPFTTDKETVLKGQIQAVASPDDPIRRIMESRILTFLETYLASGHQKPLPTVPGGLSPVQRELEEVAIKFARLVNYNKMVFCPYYDAILSKILVRS

SEQ ID NO: 87424 - protein, 509 aa, Homo sapiens; identical to SEQ ID NO: 87423
  Payload ID: 17491
  Gene Symbol: TCP11L1
  Gene Name: t-complex 11, testis-specific-like 1
  Uniprot ID: Q9NUJ3
  ENSP ID: ENSP00000395070

SEQ ID NO: 87425 - protein, 154 aa, Homo sapiens
  Payload ID: 17491
  Gene Symbol: TCP11L1
  Gene Name: t-complex 11, testis-specific-like 1
  ENSP ID: ENSP00000431200
MSENLDKSNVNEAGKSKSNDSEEGLEDAVEGADEALQKAIKSDSSSPQRVQRPHSSPPRFVTVEELLETARGVTNMALAHEIVVNGDFQIKPVELPENRVSLCCPGWSVVALSRLTATSGQADLELLTSGELPASASKSAGITGLEEESKGDCT

SEQ ID NO: 87426 - protein, 509 aa, Homo sapiens; identical to SEQ ID NO: 87423
  Payload ID: 17491
  Gene Symbol: TCP11L1
  Gene Name: t-complex 11, testis-specific-like 1
  Uniprot ID: Q9NUJ3
  ENSP ID: ENSP00000433067

SEQ ID NO: 87427 - protein, 595 aa, Homo sapiens
  Payload ID: 17491
  Gene Symbol: TCP11L1
  Gene Name: t-complex 11, testis-specific-like 1
  ENSP ID: ENSP00000435667
MSENLDKSNVNEAGKSKSNDSEEGLEDAVEGADEALQKAIKSDSSSPQRVQRPHSSPPRFVTVEELLETARGVTNMALAHEIVVNGDFQIKPVELPENSLKKRVKEIVHKAFWDCLSVQLSEDPPAYDHAIKLVGEIKETLLSFLLPGHTRLRNQITEVLDLDLIKQEAENGALDISKLAEFIIGMMGTLCAPARDEEVKKLKDIKEIVPLFREIFSVLDLMKVDMANFAISSIRPHLMQQSVEYERKKFQEILERQPNSLDFVTQWLEEASEDLMTQKYKHALPVGGMAAGSGDMPRLSPVAVQNYAYLKLLKWDHLQRPFPETVLMDQSRFHELQLQLEQLTILGAVLLVTFSMAAPGISSQADFAEKLKMIVKILLTDMHLPSFHLKDVLTTIGEKVCLEVSSCLSLCGSSPFTTDKETVLKGQIQAVASPDDPIRRIMESRILTFLETYLASGHQKPLPTVPGGLSPVQRELEEVAIKFARLVNYNKMVFCPYYDAILRKRWISFGNFFGSSNTDMSPWNCRTDYPMSLHIRFPKNHVIEAPMTIQLCFQEPCNKALSLLNIPLEAKGILDRSFLQRRLKPYRIRFCCRAL

SEQ ID NO: 87428 - protein, 54 aa, Homo sapiens
  Payload ID: 17491
  Gene Symbol: TCP11L1
  Gene Name: t-complex 11, testis-specific-like 1
  ENSP ID: ENSP00000435870
MSENLDKSNVNEAGKSKSNDSEEGLEDAVEGADEALQKAIKSDSSSPQRVQRPH

SEQ ID NO: 87429 - protein, 144 aa, Homo sapiens
  Payload ID: 17491
  Gene Symbol: TCP11L1
  Gene Name: t-complex 11, testis-specific-like 1
  ENSP ID: ENSP00000436428
MSENLDKSNVNEAGKSKSNDSEEGLEDAVEGADEALQKAIKSDSSSPQRVQRPHSSPPRFVTVEELLETARGVTNMALAHEIVVNGDFQIKPVELPENSLKKRVKEIVHKAFWDCLSVQLSEDPPAYDHAIKLVGEIKETLLSF

SEQ ID NO: 87430 - protein, 158 aa, Homo sapiens
  Payload ID: 17491
  Gene Symbol: TCP11L1
  Gene Name: t-complex 11, testis-specific-like 1
  ENSP ID: ENSP00000436471
  MOD_RES (1)..(1): Any amino acid
XSFHLKDVLTTIGEKVCLEVSSCLSLCGSSPFTTDKETVLKGQIQAVASPDDPIRRIMESRILTFLETYLASGHQKPLPTVPGGLSPVQRELEEVAIKFARLVNYNKMVFCPYYDAILISPELFNVDHRINTTSLINSSDSCYSLIFCIRSYSFPEIG

SEQ ID NO: 87431 - protein, 106 aa, Homo sapiens
  Payload ID: 17491
  Gene Symbol: TCP11L1
  Gene Name: t-complex 11, testis-specific-like 1
  ENSP ID: ENSP00000473628
MSENLDKSNVNEAGKSKSNDSEEGLEDAVEGADEALQKAIKSDSSSPQRVQRPHSSPPRFVTVEELLETARGVTNMALAHEIVVNGDFQIKPVELPENSLKKRVKE

SEQ ID NO: 87432 - protein, 519 aa, Homo sapiens
  Payload ID: 17492
  Gene Symbol: TCP11L2
  Gene Name: t-complex 11, testis-specific-like 2
  Uniprot ID: Q8N4U5
  ENSP ID: ENSP00000299045
MPFNGEKQCVGEDQPSDSDSSRFSESMASLSDYECSRQSFASDSSSKSSSPASTSPPRVVTFDEVMATARNLSNLTLAHEIAVNENFQLKQEALPEKSLAGRVKHIVHQAFWDVLDSELNADPPEFEHAIKLFEEIREILLSFLTPGGNRLRNQICEVLDTDLIRQQAEHSAVDIQGLANYVISTMGKLCAPVRDNDIRELKATGNIVEVLRQIFHVLDLMQMDMANFTIMSLRPHLQRQLVEYERTKFQEILEETPSALDQTTEWIKESVNEELFSLSESALTPGAENTSKPSLSPTLVLNNSYLKLLQWDYQKKELPETLMTDGARLQELTEKLNQLKIIACLSLITNNMVGAITGGLPELASRLTRISAVLLEGMNKETFNLKEVLNSIGIQTCVEVNKTLMERGLPTLNAEIQANLIGQFSSIEEEDNPIWSLIDKRIKLYMRRLLCLPSPQKCMPPMPGGLAVIQQELEALGSQYANIVNLNKQVYGPFYANILRKLLFNEEAMGKVDASPPTN

SEQ ID NO: 87433 - protein, 131 aa, Homo sapiens
  Payload ID: 17492
  Gene Symbol: TCP11L2
  Gene Name: t-complex 11, testis-specific-like 2
  ENSP ID: ENSP00000447174
MPFNGEKQCVGEDQPSDSDSSRFSESMASLSDYECSRQSFASDSSSKSSSPASTSPPRVVTFDEVMATARNLSNLTLAHEIAVNENFQLKQEALPEKSLAGRVKHIVHQAFWDVLDSELNADPPEFEHAIK

SEQ ID NO: 87434 - protein, 17 aa, Homo sapiens
  Payload ID: 17492
  Gene Symbol: TCP11L2
  Gene Name: t-complex 11, testis-specific-like 2
  ENSP ID: ENSP00000447416
MPFNGEKQCVGEDQPSD

SEQ ID NO: 87435 - protein, 97 aa, Homo sapiens
  Payload ID: 17492
  Gene Symbol: TCP11L2
  Gene Name: t-complex 11, testis-specific-like 2
  ENSP ID: ENSP00000447457
MPFNGEKQCVGEDQPSDSDSSRFSESMASLSDYECSRQSFASDSSSKSSSPASTSPPRVVTFDEVMATARNLSNLTLAHEIAVNENFQLKQEALPEK

SEQ ID NO: 87436 - protein, 60 aa, Homo sapiens
  Payload ID: 17492
  Gene Symbol: TCP11L2
  Gene Name: t-complex 11, testis-specific-like 2
  ENSP ID: ENSP00000448064
MPFNGEKQCVGEDQPSDSDSSRFSESMASLSDYECSRQSFASDSSSKSSSPALLYEHLTA

SEQ ID NO: 87437 - protein, 234 aa, Homo sapiens
  Payload ID: 17492
  Gene Symbol: TCP11L2
  Gene Name: t-complex 11, testis-specific-like 2
  ENSP ID: ENSP00000448629
MPFNGEKQCVGEDQPSDSDSSRFSESMASLSDYECSRQSFASDSSSKSSSPASTSPPRVVTFDEVMATARNLSNLTLAHEIAVNENFQLKQEALPEKSLAGRVKHIVHQAFWDVLDSELNADPPEFEHAIKLFEEIREILLSFLTPGGNRLRNQICEVLDTDLIRQQAEHSAVDIQGLANYVISTMGKLCAPVRDNDIRELKATGNIVEVLRQIFHVLDLMQMDMANFTIMSLR

SEQ ID NO: 87438 - protein, 266 aa, Homo sapiens
  Payload ID: 17492
  Gene Symbol: TCP11L2
  Gene Name: t-complex 11, testis-specific-like 2
  Uniprot ID: Q8N4U5
  ENSP ID: ENSP00000448952
MPFNGEKQCVGEDQPSDSDSSRFSESMASLSDYECSRQSFASDSSSKSSSPASTSPPRVVTFDEVMATARNLSNLTLAHEIAVNENFQLKQEALPEKSLAGRVKHIVHQAFWDVLDSELNADPPEFEHAIKLFEEIREILLSFLTPGGNRLRNQICEVLDTDLIRQQAEHSAVDIQGLANYVISTMGKLCAPVRDNDIRELKATGNIVEVLRQIFHVLDLMQMDMANFTIMSLRPHLQRQLVEYERTKFQEILEETPRKAEVAGAS

SEQ ID NO: 87439 - protein, 272 aa, Homo sapiens
  Payload ID: 17492
  Gene Symbol: TCP11L2
  Gene Name: t-complex 11, testis-specific-like 2
  ENSP ID: ENSP00000449123
MPFNGEKQCVGEDQPSDSDSSRFSESMASLSDYECSRQSFASDSSSKSSSPASTSPPRVVTFDEVMATARNLSNLTLAHEIAVNENFQLKQEALPEKSLAGRVKHIVHQAFWDVLDSELNADPPEFEHAIKLFEEIREILLSFLTPGGNRLRNQICEVLDTDLIRQQAEHSAVDIQGLANYVISTMGKLCAPVRDNDIRELKATGNIVEVLRQIFHVLDLMQMDMANFTIMSLRPHLQRQLVEYERTKFQEILEETPSEYNIMCIYIEIRLK

SEQ ID NO: 87440 - protein, 17 aa, Homo sapiens
  Payload ID: 17492
  Gene Symbol: TCP11L2
  Gene Name: t-complex 11, testis-specific-like 2
  ENSP ID: ENSP00000449844
MPFNGEKQCVGEDQPSD

SEQ ID NO: 87441 - protein, 198 aa, Homo sapiens
  Payload ID: 17493
  Gene Symbol: TCTE1
  Gene Name: t-complex-associated-testis-expressed 1
  ENSP ID: ENSP00000360559
MFFERHLENLLKHFIPGTTDPAVILDLLPLCRNYVRRVHVDQFLPPVQLPAQLRPGDQSDSGSEGEMEEPTVDHYQLGDLVAGLSHLEELDLVYDVKDCGMNFEWNLFLFTYRDCLSLAAAIKACHTLKDGGKQLLEGMSDNKTLLEFDLRLSDVAQESEYLIGQALYANREAARQRALNPSHFMSTITANGPENSVG

SEQ ID NO: 87442 - protein, 501 aa, Homo sapiens
  Payload ID: 17493
  Gene Symbol: TCTE1
  Gene Name: t-complex-associated-testis-expressed 1
  Uniprot ID: Q5JU00
  ENSP ID: ENSP00000360560
MQDTVTTSALLDPSHSSVSTQDNSSTGGHTSSTSPQLSKPSITPVPAKSRNPHPRANIRRMRRIIAEDPEWSLAIVPLLTELCIQHIIRNFQKNPILKQMLPEHQQKVLNHLSPDLPLAVTANLIDSENYWLRCCMHRWPVCHVAHHGGSWKRMFFERHLENLLKHFIPGTTDPAVILDLLPLCRNYVRRVHVDQFLPPVQLPAQLRPGDQSDSGSEGEMEEPTVDHYQLGDLVAGLSHLEELDLVYDVKDCGMNFEWNLFLFTYRDCLSLAAAIKACHTLKIFKLTRSKVDDDKARIIIRSLLDHPVLEELDLSQNLIGDRGARGAAKLLSHSRLRVLNLANNQVRAPGAQSLAHALAHNTNLISLNLRLNCIEDEGGQALAHALQTNKCLTTLHLGGNELSEPTATLLSQVLAINTTLTSINLSCNHIGLDGGKQLLEGMSDNKTLLEFDLRLSDVAQESEYLIGQALYANREAARQRALNPSHFMSTITANGPENSVG

SEQ ID NO: 87443 - protein, 198 aa, Homo sapiens
  Payload ID: 17494
  Gene Symbol: TCTE3
  Gene Name: t-complex-associated-testis-expressed 3
  Uniprot ID: Q8IZS6
  ENSP ID: ENSP00000355736
MEKRGRGVKSSPIQTPNQTPQQAPVTPRKERRPSMFEKEAYTQILRERLRESIHNVQYVEPPFDDSIADIGKEWKSALAKLKFANSYRMEPLKKFQAHSVETKVQQILTESLKDVKYDDKVFSHLSLELADRILLAVKEFGYHRYKFIIKVLFIQKTGQAINIASRWIWDIAWDSWVAAKHEAESYVALVLVFALYYE

SEQ ID NO: 87444 - protein, 198 aa, Homo sapiens; identical to SEQ ID NO: 87443
  Payload ID: 17494
  Gene Symbol: TCTE3
  Gene Name: t-complex-associated-testis-expressed 3
  Uniprot ID: Q8IZS6
  ENSP ID: ENSP00000478684

SEQ ID NO: 87445 - protein, 179 aa, Homo sapiens
  Payload ID: 17495
  Gene Symbol: TCTEX1D1
  Gene Name: Tctex1 domain containing 1
  Uniprot ID: Q8N7M0
  ENSP ID: ENSP00000282670
MMMSDNAKGRAAHSWKKRGSISSLSNHEFWRKEIHGRIKDSMSTVSYMEEPSQRDDISRLTVQMENTYQLGPPKHFPVVTVNHILKDVVTSYLQVEEYEPELCRQMTKTISEVIKAQVKDLMIPRYKLIVIVHIGQLNRQSILIGSRCLWDPKSDTFSSYVFRNSSLFALANVYAVYLE

SEQ ID NO: 87446 - protein, 76 aa, Homo sapiens
  Payload ID: 17495
  Gene Symbol: TCTEX1D1
  Gene Name: Tctex1 domain containing 1
  ENSP ID: ENSP00000436731
MMMSDNAKGRAAHSWKKRGSISSLSNHEFWRKEIHGRIKDSMSTVSYMEEPSQRDDISRLTVQMENTYQLAQYKGL

SEQ ID NO: 87447 - protein, 142 aa, Homo sapiens
  Payload ID: 17496
  Gene Symbol: TCTEX1D2
  Gene Name: Tctex1 domain containing 2
  Uniprot ID: Q8WW35
  ENSP ID: ENSP00000324323
MATSIGVSFSVGDGVPEAEKNAGEPENTYILRPVFQQRFRPSVVKDCIHAVLKEELANAEYSPEEMPQLTKHLSENIKDKLKEMGFDRYKMVVQVVIGEQRGEGVFMASRCFWDADTDNYTHDVFMNDSLFCVVAAFGCFYY

SEQ ID NO: 87448 - protein, 132 aa, Homo sapiens
  Payload ID: 17496
  Gene Symbol: TCTEX1D2
  Gene Name: Tctex1 domain containing 2
  ENSP ID: ENSP00000410605
MATSIGVSFSVGDGVPEAEKNAGEPENTYILRPVFQQRFRPSVVKDCIHAVLKEELANAEYSPEEMPQLTKHLSENIKDKLKEMGFDRYKMVVQVVIGEQRGEGVLLECSGMISAHCNLCLPGSSDSPASAS

SEQ ID NO: 87449 - protein, 45 aa, Homo sapiens
  Payload ID: 17496
  Gene Symbol: TCTEX1D2
  Gene Name: Tctex1 domain containing 2
  ENSP ID: ENSP00000415835
MATSIGVSFSVGDGVPEAEKNAGEPENTYILRPVFQQRRVQALCG

SEQ ID NO: 87450 - protein, 221 aa, Homo sapiens
  Payload ID: 17497
  Gene Symbol: TCTEX1D4
  Gene Name: Tctex1 domain containing 4
  Uniprot ID: Q5JR98
  ENSP ID: ENSP00000341803
MASRPLPPGRQEEENAKDSGRKPSPVRPRGCLPSIDEARPAGPGPAPASRRGSMLGLAASFSRRNSLVGPGAGPGGQRPSLGPVPPLGSRVSFSGLPLAPARWVAPSYRTEPVPGERWEAARAQRALEAALAAGLHDACYSSDEAARLVRELCEQVHVRLRELSPPRYKLVCSVVLGPRAGQGVHVVSRALWDVARDGLASVSYTNTSLFAVATVHGLYCE

SEQ ID NO: 87451 - protein, 350 aa, Homo sapiens
  Payload ID: 17498
  Gene Symbol: TGDS
  Gene Name: TDP-glucose 4,6-dehydratase
  Uniprot ID: O95455
  ENSP ID: ENSP00000261296
MSAACWEEPWGLPGGFAKRVLVTGGAGFIASHMIVSLVEDYPNYMIINLDKLDYCASLKNLETISNKQNYKFIQGDICDSHFVKLLFETEKIDIVLHFAAQTHVDLSFVRAFEFTYVNVYGTHVLVSAAHEARVEKFIYVSTDEVYGGSLDKEFDESSPKQPTNPYASSKAAAECFVQSYWEQYKFPVVITRSSNVYGPHQYPEKVIPKFISLLQHNRKCCIHGSGLQTRNFLYATDVVEAFLTVLKKGKPGEIYNIGTNFEMSVVQLAKELIQLIKETNSESEMENWVDYVNDRPTNDMRYPMKSEKIHGLGWRPKVPWKEGIKKTIEWYRENFHNWKNVEKALEPFPV

SEQ ID NO: 87452 - protein, 357 aa, Homo sapiens
  Payload ID: 17499
  Gene Symbol: TEAD1
  Gene Name: TEA domain family member 1 (SV40 transcriptional enhancer factor)
  Uniprot ID: P28347
  ENSP ID: ENSP00000334754
MERMSDSADKPIDNDAEGVWSPDIEQSFQEALAIYPPCGRRKIILSDEGKMYGRNELIARYIKLRTGKTRTRKQVSSHIQVLARRKSRDFHSKLKVTSMDQTAKDKALQHMAAMSSAQIVSATAIHNKLGLPGIPRPTFPGAPGFWPGMIQTGQPGSSQDVKPFVQQAYPIQPAVTAPIPGFEPASAPAPSVPAWQGRSIGTTKLRLVEFSAFLEQQRDPDSADLNCNIQDDAGAFYGVTSQYESSENMTVTCSTKVCSFGKQVVEKVETEYARFENGRFVYRINRSPMCEYMINFIHKLKHLPEKYMMNSVLENFTILLVVTNRDTQETLLCMACVFEVSNSEHGAQHHIYRLVKD

SEQ ID NO: 87453 - protein, 361 aa, Homo sapiens
  Payload ID: 17499
  Gene Symbol: TEAD1
  Gene Name: TEA domain family member 1 (SV40 transcriptional enhancer factor)
  ENSP ID: ENSP00000354588
MYGRNELIARYIKLRTGKTRTRKQVSSHIQVLARRKSRDFHSKLKDQTAKDKALQHMAAMSSAQIVSATAIHNKLGLPGIPRPTFPGAPGFWPGMIQTGQPGSSQDVKPFVQQAYPIQPAVTAPIPGFEPASAPAPSVPAWQGRSIGTTKLRLVEFSAFLEQQRDPDSYNKHLFVHIGHANHSYSDPLLESVDIRQIYDKFPEKKGGLKELFGKGPQNAFFLVKFWADLNCNIQDDAGAFYGVTSQYESSENMTVTCSTKVCSFGKQVVEKVETEYARFENGRFVYRINRSPMCEYMINFIHKLKHLPEKYMMNSVLENFTILLVVTNRDTQETLLCMACVFEVSNSEHGAQHHIYRLVKD

SEQ ID NO: 87454 - protein, 159 aa, Homo sapiens
  Payload ID: 17499
  Gene Symbol: TEAD1
  Gene Name: TEA domain family member 1 (SV40 transcriptional enhancer factor)
  ENSP ID: ENSP00000432587
  MOD_RES (1)..(1): Any amino acid
XDAPPPLHLCPERGQQPSAPAGPGAGAVLGRGGVAGPRDREPGREPGTEQRAGEAAPKFASDSPGAAVAPWAEVYFLEKAPGFGLENPTAKIEPSSWSGSESPAENMERMSDSADKPIDNDAEGVWSPDIEQSFQEALAIYPPCGRRKIILSDEGKMYG

SEQ ID NO: 87455 - protein, 426 aa, Homo sapiens
  Payload ID: 17499
  Gene Symbol: TEAD1
  Gene Name: TEA domain family member 1 (SV40 transcriptional enhancer factor)
  ENSP ID: ENSP00000435233
IEPSSWSGSESPAENMERMSDSADKPIDNDAEGVWSPDIEQSFQEALAIYPPCGRRKIILSDEGKMYGRNELIARYIKLRTGKTRTRKQVSSHIQVLARRKSRDFHSKLKDQTAKDKALQHMAAMSSAQIVSATAIHNKLGLPGIPRPTFPGAPGFWPGMIQTGQPGSSQDVKPFVQQAYPIQPAVTAPIPGFEPASAPAPSVPAWQGRSIGTTKLRLVEFSAFLEQQRDPDSYNKHLFVHIGHANHSYSDPLLESVDIRQIYDKFPEKKGGLKELFGKGPQNAFFLVKFWADLNCNIQDDAGAFYGVTSQYESSENMTVTCSTKVCSFGKQVVEKVETEYARFENGRFVYRINRSPMCEYMINFIHKLKHLPEKYMMNSVLENFTILLVVTNRDTQETLLCMACVFEVSNSEHGAQHHIYRLVKD

SEQ ID NO: 87456 - protein, 330 aa, Homo sapiens
  Payload ID: 17499
  Gene Symbol: TEAD1
  Gene Name: TEA domain family member 1 (SV40 transcriptional enhancer factor)
  ENSP ID: ENSP00000435393
MRYVLSWCVTVTFKDQTAKDKALQHMAAMSSAQIVSATAIHNKLGLPGIPRPTFPGAPGFWPGMIQTGQPGSSQDVKPFVQQAYPIQPAVTAPIPGFEPASAPAPSVPAWQGRSIGTTKLRLVEFSAFLEQQRDPDSYNKHLFVHIGHANHSYSDPLLESVDIRQIYDKFPEKKGGLKELFGKGPQNAFFLVKFWADLNCNIQDDAGAFYGVTSQYESSENMTVTCSTKVCSFGKQVVEKVETEYARFENGRFVYRINRSPMCEYMINFIHKLKHLPEKYMMNSVLENFTILLVVTNRDTQETLLCMACVFEVSNSEHGAQHHIYRLVKD

SEQ ID NO: 87457 - protein, 368 aa, Homo sapiens
  Payload ID: 17499
  Gene Symbol: TEAD1
  Gene Name: TEA domain family member 1 (SV40 transcriptional enhancer factor)
  ENSP ID: ENSP00000435977
IEPSSWSGSESPAENMERMSDSADKPIDNDAEGVWSPDIEQSFQEALAIYPPCGRRKIILSDEGKMYGRNELIARYIKLRTGKTRTRKQVSSHIQVLARRKSRDFHSKLKDQTAKDKALQHMAAMSSAQIVSATAIHNKLGLPGIPRPTFPGAPGFWPGMIQTGQPGSSQDVKPFVQQAYPIQPAVTAPIPGFEPASAPAPSVPAWQGRSIGTTKLRLVEFSAFLEQQRDPDSADLNCNIQDDAGAFYGVTSQYESSENMTVTCSTKVCSFGKQVVEKVETEYARFENGRFVYRINRSPMCEYMINFIHKLKHLPEKYMMNSVLENFTILLVVTNRDTQETLLCMACVFEVSNSEHGAQHHIYRLVKD

SEQ ID NO: 87458 - protein, 447 aa, Homo sapiens
  Payload ID: 17500
  Gene Symbol: TEAD2
  Gene Name: TEA domain family member 2
  Uniprot ID: Q15562
  ENSP ID: ENSP00000310701
MGEPRAGAALDDGSGWTGSEEGSEEGTGGSEGAGGDGGPDAEGVWSPDIEQSFQEALAIYPPCGRRKIILSDEGKMYGRNELIARYIKLRTGKTRTRKQVSSHIQVLARRKSREIQSKLKDQVSKDKAFQTMATMSSAQLISAPSLQAKLGPTGPQASELFQFWSGGSGPPWNVPDVKPFSQTPFTLSLTPPSTDLPGYEPPQALSPLPPPTPSPPAWQARGLGTARLQLVEFSAFVEPPDAVDSYQRHLFVHISQHCPSPGAPPLESVDVRQIYDKFPEKKGGLRELYDRGPPHAFFLVKFWADLNWGPSGEEAGAGGSISSGGFYGVSSQYESLEHMTLTCSSKVCSFGKQVVEKVETERAQLEDGRFVYRLLRSPMCEYLVNFLHKLRQLPERYMMNSVLENFTILQVVTNRDTQELLLCTAYVFEVSTSERGAQHHIYRLVRD

SEQ ID NO: 87459 - protein, 450 aa, Homo sapiens
  Payload ID: 17500
  Gene Symbol: TEAD2
  Gene Name: TEA domain family member 2
  Uniprot ID: Q15562
  ENSP ID: ENSP00000366419
MGEPRAGAALDDGSGWTGSEEGSEEGTGGSEGAGGDGGPDAEGVWSPDIEQSFQEALAIYPPCGRRKIILSDEGKMYGRNELIARYIKLRTGKTRTRKQVSSHIQVLARRKSREIQSKLKDQVSKDKAFQTMATMSSAQLISAPSLQAKLGPTGPQVVQASELFQFWSGGSGPPWNVPDVKPFSQTPFTLSLTPPSTDLPGYEPPQALSPLPPPTPSPPAWQARGLGTARLQLVEFSAFVEPPDAVDSYQRHLFVHISQHCPSPGAPPLESVDVRQIYDKFPEKKGGLRELYDRGPPHAFFLVKFWADLNWGPSGEEAGAGGSISSGGFYGVSSQYESLEHMTLTCSSKVCSFGKQVVEKVETERAQLEDGRFVYRLLRSPMCEYLVNFLHKLRQLPERYMMNSVLENFTILQVVTNRDTQELLLCTAYVFEVSTSERGAQHHIYRLVRD

SEQ ID NO: 87460 - protein, 319 aa, Homo sapiens
  Payload ID: 17500
  Gene Symbol: TEAD2
  Gene Name: TEA domain family member 2
  Uniprot ID: Q15562
  ENSP ID: ENSP00000437928
MATMSSAQLISAPSLQAKLGPTGPQVVQASELFQFWSGGSGPPWNVPDVKPFSQTPFTLSLTPPSTDLPGYEPPQALSPLPPPTPSPPAWQARGLGTARLQLVEFSAFVEPPDAVDSYQRHLFVHISQHCPSPGAPPLESVDVRQIYDKFPEKKGGLRELYDRGPPHAFFLVKFWADLNWGPSGEEAGAGGSISSGGFYGVSSQYESLEHMTLTCSSKVCSFGKQVVEKVETERAQLEDGRFVYRLLRSPMCEYLVNFLHKLRQLPERYMMNSVLENFTILQVVTNRDTQELLLCTAYVFEVSTSERGAQHHIYRLVRD

SEQ ID NO: 87461 - protein, 451 aa, Homo sapiens
  Payload ID: 17500
  Gene Symbol: TEAD2
  Gene Name: TEA domain family member 2
  Uniprot ID: Q15562
  ENSP ID: ENSP00000469640
MGEPRAGAALDDGSGWTGSEEGSEEGTGGSEGAGGDGGPDAEGVWSPDIEQSFQEALAIYPPCGRRKIILSDEGKMYGRNELIARYIKLRTGKTRTRKQVSSHIQVLARRKSREIQSKLKALNVDQVSKDKAFQTMATMSSAQLISAPSLQAKLGPTGPQASELFQFWSGGSGPPWNVPDVKPFSQTPFTLSLTPPSTDLPGYEPPQALSPLPPPTPSPPAWQARGLGTARLQLVEFSAFVEPPDAVDSYQRHLFVHISQHCPSPGAPPLESVDVRQIYDKFPEKKGGLRELYDRGPPHAFFLVKFWADLNWGPSGEEAGAGGSISSGGFYGVSSQYESLEHMTLTCSSKVCSFGKQVVEKVETERAQLEDGRFVYRLLRSPMCEYLVNFLHKLRQLPERYMMNSVLENFTILQVVTNRDTQELLLCTAYVFEVSTSERGAQHHIYRLVRD

SEQ ID NO: 87462 - protein, 450 aa, Homo sapiens; identical to SEQ ID NO: 87459
  Payload ID: 17500
  Gene Symbol: TEAD2
  Gene Name: TEA domain family member 2
  Uniprot ID: Q15562
  ENSP ID: ENSP00000469672

SEQ ID NO: 87463 - protein, 74 aa, Homo sapiens
  Payload ID: 17500
  Gene Symbol: TEAD2
  Gene Name: TEA domain family member 2
  ENSP ID: ENSP00000471743
  MOD_RES (1)..(1): Any amino acid
XKDQVSKDKAFQTMATMSSAQLISAPSLQAKLGPTGPQVVQASELFQFWSGGSGPPWNVPEKKLLPRSPPADFP

SEQ ID NO: 87464 - protein, 451 aa, Homo sapiens; identical to SEQ ID NO: 87461
  Payload ID: 17500
  Gene Symbol: TEAD2
  Gene Name: TEA domain family member 2
  Uniprot ID: Q15562
  ENSP ID: ENSP00000472109

SEQ ID NO: 87465 - protein, 116 aa, Homo sapiens
  Payload ID: 17500
  Gene Symbol: TEAD2
  Gene Name: TEA domain family member 2
  ENSP ID: ENSP00000472397
MATMSSAQLISAPSLQAKLGPTGPQASELFQFWSGGSGPPWNVPDVKPFSQTPFTLSLTPPSTDLPGYEPPQALSPLPPPTPSPPAWQARGLGTARLQLVEFSAFVEPPDAVDSYQ

SEQ ID NO: 87466 - protein, 435 aa, Homo sapiens
  Payload ID: 17501
  Gene Symbol: TEAD3
  Gene Name: TEA domain family member 3
  Uniprot ID: Q99594
  ENSP ID: ENSP00000345772
IASNSWNASSSPGEAREDGPEGLDKGLDNDAEGVWSPDIEQSFQEALAIYPPCGRRKIILSDEGKMYGRNELIARYIKLRTGKTRTRKQVSSHIQVLARKKVREYQVGIKAMNLDQVSKDKALQSMASMSSAQIVSASVLQNKFSPPSPLPQAVFSTSSRFWSSPPLLGQQPGPSQDIKPFAQPAYPIQPPLPPTLSSYEPLAPLPSAAASVPVWQDRTIASSRLRLLEYSAFMEVQRDPDTYSKHLFVHIGQTNPAFSDPPLEAVDVRQIYDKFPEKKGGLKELYEKGPPNAFFLVKFWADLNSTIQEGPGAFYGVSSQYSSADSMTISVSTKVCSFGKQVVEKVETEYARLENGRFVYRIHRSPMCEYMINFIHKLKHLPEKYMMNSVLENFTILQVVTSRDSQETLLVIAFVFEVSTSEHGAQHHVYKLVKD

SEQ ID NO: 87467 - protein, 375 aa, Homo sapiens
  Payload ID: 17501
  Gene Symbol: TEAD3
  Gene Name: TEA domain family member 3
  ENSP ID: ENSP00000384577
MGPRAWTRGWTTMRRACGARTSSRASRRPWPSTRPAAGGRSSCQTRARCTAMNLDQVSKDKALQSMASMSSAQIVSASVLQNKFSPPSPLPQAVFSTSSRFWSSPPLLGQQPGPSQDIKPFAQPAYPIQPPLPPTLSSYEPLAPLPSAAASVPVWQDRTIASSRLRLLEYSAFMEVQRDPDTYSKHLFVHIGQTNPAFSDPPLEAVDVRQIYDKFPEKKGGLKELYEKGPPNAFFLVKFWADLNSTIQEGPGAFYGVSSQYSSADSMTISVSTKVCSFGKQVVEKVETEYARLENGRFVYRIHRSPMCEYMINFIHKLKHLPEKYMMNSVLENFTILQVVTSRDSQETLLVIAFVFEVSTSEHGAQHHVYKLVKD

SEQ ID NO: 87468 - protein, 219 aa, Homo sapiens
  Payload ID: 17501
  Gene Symbol: TEAD3
  Gene Name: TEA domain family member 3
  ENSP ID: ENSP00000416400
VSSHLQVLARRKSREIQSKLKAMNLDQVSKDKALQSMASMSSAQIVSASVLQNKFSPPSPLPQAVFSTSSRFWSSPPLLGQQPGPSQDIKPFAQPAYPIQPPLPPTLSSYEPLAPLPSAAASVPVWQDRTIASSRLRLLEYSAFMEVQRDPDTYSKHLFVHIGQTNPAFSDPPLEAVDVRQIYDKFPEKKGGLKELYEKGPPNAFFLVKFWADLNSTIQ

SEQ ID NO: 87469 - protein, 391 aa, Homo sapiens
  Payload ID: 17502
  Gene Symbol: TEAD4
  Gene Name: TEA domain family member 4
  ENSP ID: ENSP00000351184
LEGTAGTITSNEWSSPTSPEGSTASGGSQALDKPIDNDAEGVWSPDIEQSFQEALAIYPPCGRRKIILSDEGKMYGRNELIARYIKLRTGKTRTRKQVSSHIQVLARRKAREIQAKLKFWQGALPGQAGTSHDVKPFSQQTYAVQPPLPLPGFESPAGPAPSPSAPPAPPWQGRSVASSKLWMLEFSAFLEQQQDPDTYNKHLFVHIGQSSPSYSDPYLEAVDIRQIYDKFPEKKGGLKDLFERGPSNAFFLVKFWADLNTNIEDEGSSFYGVSSQYESPENMIITCSTKVCSFGKQVVEKVETEYARYENGHYSYRIHRSPLCEYMINFIHKLKHLPEKYMMNSVLENFTILQVVTNRDTQETLLCIAYVFEVSASEHGAQHHIYRLVKE

SEQ ID NO: 87470 - protein, 434 aa, Homo sapiens
  Payload ID: 17502
  Gene Symbol: TEAD4
  Gene Name: TEA domain family member 4
  ENSP ID: ENSP00000352926
LEGTAGTITSNEWSSPTSPEGSTASGGSQALDKPIDNDAEGVWSPDIEQSFQEALAIYPPCGRRKIILSDEGKMYGRNELIARYIKLRTGKTRTRKQVSSHIQVLARRKAREIQAKLKDQAAKDKALQSMAAMSSAQIISATAFHSSMALARGPGRPAVSGFWQGALPGQAGTSHDVKPFSQQTYAVQPPLPLPGFESPAGPAPSPSAPPAPPWQGRSVASSKLWMLEFSAFLEQQQDPDTYNKHLFVHIGQSSPSYSDPYLEAVDIRQIYDKFPEKKGGLKDLFERGPSNAFFLVKFWADLNTNIEDEGSSFYGVSSQYESPENMIITCSTKVCSFGKQVVEKVETEYARYENGHYSYRIHRSPLCEYMINFIHKLKHLPEKYMMNSVLENFTILQVVTNRDTQETLLCIAYVFEVSASEHGAQHHIYRLVKE

SEQ ID NO: 87471 - protein, 305 aa, Homo sapiens
  Payload ID: 17502
  Gene Symbol: TEAD4
  Gene Name: TEA domain family member 4
  Uniprot ID: Q15561
  ENSP ID: ENSP00000380311
MAAMSSAQIISATAFHSSMALARGPGRPAVSGFWQGALPGQAGTSHDVKPFSQQTYAVQPPLPLPGFESPAGPAPSPSAPPAPPWQGRSVASSKLWMLEFSAFLEQQQDPDTYNKHLFVHIGQSSPSYSDPYLEAVDIRQIYDKFPEKKGGLKDLFERGPSNAFFLVKFWADLNTNIEDEGSSFYGVSSQYESPENMIITCSTKVCSFGKQVVEKVETEYARYENGHYSYRIHRSPLCEYMINFIHKLKHLPEKYMMNSVLENFTILQVVTNRDTQETLLCIAYVFEVSASEHGAQHHIYRLVKE

SEQ ID NO: 87472 - protein, 110 aa, Homo sapiens
  Payload ID: 17502
  Gene Symbol: TEAD4
  Gene Name: TEA domain family member 4
  ENSP ID: ENSP00000411475
LEGTAGTITSNEWSSPTSPEGSTASGGSQALDKPIDNDAEGVWSPDIEQSFQEALAIYPPCGRRKIILSDEGKMYGLQPHPGAGSSQSSRDPGQAKVLARSFARPSRNVP

SEQ ID NO: 87473 - protein, 72 aa, Homo sapiens
  Payload ID: 17502
  Gene Symbol: TEAD4
  Gene Name: TEA domain family member 4
  ENSP ID: ENSP00000438453
LEGTAGTITSNEWSSPTSPEGSTASGGSQALDKPIDNDAEGVWSPDIEQSFQEALAIYPPCGRRKIILSDEG

SEQ ID NO: 87474 - protein, 22 aa, Homo sapiens
  Payload ID: 17502
  Gene Symbol: TEAD4
  Gene Name: TEA domain family member 4
  ENSP ID: ENSP00000438960
LEGTAGTITSNEWSSPTSPEGS

SEQ ID NO: 87475 - protein, 189 aa, Homo sapiens
  Payload ID: 17502
  Gene Symbol: TEAD4
  Gene Name: TEA domain family member 4
  ENSP ID: ENSP00000441959
  MOD_RES (1)..(1): Any amino acid
XGKTRTRKQVSSHIQVLARRKAREIQAKLKTGAELGTCGREDQAAKDKALQSMAAMSSAQIISATAFHSSMALARGPGRPAVSGFWQGALPGQAGTSHDVKPFSQQTYAVQPPLPLPGFESPAGPAPSPSAPPAPPWQGRSVASSKLWMLEFSAFLEQQQDPDTYNKHLFVHIGQSSPSYSDPYLEAVD

SEQ ID NO: 87476 - protein, 175 aa, Homo sapiens
  Payload ID: 17502
  Gene Symbol: TEAD4
  Gene Name: TEA domain family member 4
  ENSP ID: ENSP00000444528
LEGTAGTITSNEWSSPTSPEGSTASGGSQALDKPIDNDAEGVWSPDIEQSFQEALAIYPPCGRRKIILSDEGKMYGRNELIARYIKLRTGKTRTRKQVSSHIQVLARRKAREIQAKLKDQAAKDKALQSMAAMSSAQIISATAFHSSMALARGPGRPAVSGFWQGALPGQAGTSH

SEQ ID NO: 87477 - protein, 1032 aa, Homo sapiens
  Payload ID: 17503
  Gene Symbol: TSHZ1
  Gene Name: teashirt zinc finger homeobox 1
  Uniprot ID: Q6ZSZ6
  ENSP ID: ENSP00000323584
MCNEETEIKEAQSYQNSPVSSATNQDAGYGSPFSESSDQLAHFKGSSSREEKEDPQCPDSVSYPQDSLAQIKAVYANLFSESCWSSLALDLKKSGSTTSTNDASQKESSAPTPTPPTCPVSTTGPTTSTPSTSCSSSTSHSSTTSTSSSSGYDWHQAALAKTLQQTSSYGLLPEPSLFSTVQLYRQNNKLYGSVFTGASKFRCKDCSAAYDTLVELTVHMNETGHYRDDNRDKDSEKTKRWSKPRKRSLMEMEGKEDAQKVLKCMYCGHSFESLQDLSVHMIKTKHYQKVPLKEPVPAITKLVPSTKKRALQDLAPPCSPEPAGMAAEVALSESAKDQKAANPYVTPNNRYGYQNGASYTWQFEARKAQILKCMECGSSHDTLQQLTAHMMVTGHFLKVTTSASKKGKQLVLDPVVEEKIQSIPLPPTTHTRLPASSIKKQPDSPAGSTTSEEKKEPEKEKPPVAGDAEKIKEESEDSLEKFEPSTLYPYLREEDLDDSPKGGLDILKSLENTVSTAISKAQNGAPSWGGYPSIHAAYQLPGTVKPLPAAVQSVQVQPSYAGGVKSLSSAEHNALLHSPGSLTPPPHKSNVSAMEELVEKVTGKVNIKKEERPPEKEKSSLAKAASPIAKENKDFPKTEEVSGKPQKKGPEAETGKAKKEGPLDVHTPNGTEPLKAKVTNGCNNLGIIMDHSPEPSFINPLSALQSIMNTHLGKVSKPVSPSLDPLAMLYKISNSMLDKPVYPATPVKQADAIDRYYYENSDQPIDLTKSKNKPLVSSVADSVASPLRESALMDISDMVKNLTGRLTPKSSTPSTVSEKSDADGSSFEEALDELSPVHKRKGRQSNWNPQHLLILQAQFASSLRETTEGKYIMSDLGPQERVHISKFTGLSMTTISHWLANVKYQLRRTGGTKFLKNLDTGHPVFFCNDCASQFRTASTYISHLETHLGFSLKDLSKLPLNQIQEQQNVSKVLTNKTLGPLGATEEDLGSTFQCKLCNRTFASKHAVKLHLSKTHGKSPEDHLIYVTELEKQ

SEQ ID NO: 87478 - protein, 78 aa, Homo sapiens
  Payload ID: 17503
  Gene Symbol: TSHZ1
  Gene Name: teashirt zinc finger homeobox 1
  ENSP ID: ENSP00000452718
MCNEETEIKEAQSYQNSPVSSATNQDAGYGSPFSESSDQLAHFKGSSSREEKEDPQCPDSVSYPQDSLAQIKAVYANL

SEQ ID NO: 87479 - protein, 276 aa, Homo sapiens
  Payload ID: 17503
  Gene Symbol: TSHZ1
  Gene Name: teashirt zinc finger homeobox 1
  ENSP ID: ENSP00000453834
MCNEETEIKEAQSYQNSPVSSATNQDAGYGSPFSESSDQLAHFKGSSSREEKEDPQCPDSVSYPQDSLAQIKAVYANLFSESCWSSLALDLKKSGSTTSTNDASQKESSAPTPTPPTCPVSTTGPTTSTPSTSCSSSTSHSSTTSTSSSSGYDWHQAALAKTLQQTSSYGLLPEPSLFSTVQLYRQNNKLYGSVFTGASKFRCKDCSAAYDTLVELTVHMNETGHYRDDNRDKDSEKTKRWSKPRKRSLMEMEGKEDAQKVLKCMYCGHSFESLQD

SEQ ID NO: 87480 - protein, 1077 aa, Homo sapiens
  Payload ID: 17503
  Gene Symbol: TSHZ1
  Gene Name: teashirt zinc finger homeobox 1
  Uniprot ID: Q6ZSZ6
  ENSP ID: ENSP00000464391
MPRRKQQAPRRSAAYVPEEELKAAEIDEEHVEDDGLSLDIQESEYMCNEETEIKEAQSYQNSPVSSATNQDAGYGSPFSESSDQLAHFKGSSSREEKEDPQCPDSVSYPQDSLAQIKAVYANLFSESCWSSLALDLKKSGSTTSTNDASQKESSAPTPTPPTCPVSTTGPTTSTPSTSCSSSTSHSSTTSTSSSSGYDWHQAALAKTLQQTSSYGLLPEPSLFSTVQLYRQNNKLYGSVFTGASKFRCKDCSAAYDTLVELTVHMNETGHYRDDNRDKDSEKTKRWSKPRKRSLMEMEGKEDAQKVLKCMYCGHSFESLQDLSVHMIKTKHYQKVPLKEPVPAITKLVPSTKKRALQDLAPPCSPEPAGMAAEVALSESAKDQKAANPYVTPNNRYGYQNGASYTWQFEARKAQILKCMECGSSHDTLQQLTAHMMVTGHFLKVTTSASKKGKQLVLDPVVEEKIQSIPLPPTTHTRLPASSIKKQPDSPAGSTTSEEKKEPEKEKPPVAGDAEKIKEESEDSLEKFEPSTLYPYLREEDLDDSPKGGLDILKSLENTVSTAISKAQNGAPSWGGYPSIHAAYQLPGTVKPLPAAVQSVQVQPSYAGGVKSLSSAEHNALLHSPGSLTPPPHKSNVSAMEELVEKVTGKVNIKKEERPPEKEKSSLAKAASPIAKENKDFPKTEEVSGKPQKKGPEAETGKAKKEGPLDVHTPNGTEPLKAKVTNGCNNLGIIMDHSPEPSFINPLSALQSIMNTHLGKVSKPVSPSLDPLAMLYKISNSMLDKPVYPATPVKQADAIDRYYYENSDQPIDLTKSKNKPLVSSVADSVASPLRESALMDISDMVKNLTGRLTPKSSTPSTVSEKSDADGSSFEEALDELSPVHKRKGRQSNWNPQHLLILQAQFASSLRETTEGKYIMSDLGPQERVHISKFTGLSMTTISHWLANVKYQLRRTGGTKFLKNLDTGHPVFFCNDCASQFRTASTYISHLETHLGFSLKDLSKLPLNQIQEQQNVSKVLTNKTLGPLGATEEDLGSTFQCKLCNRTFASKHAVKLHLSKTHGKSPEDHLIYVTELEKQ

SEQ ID NO: 87481 - protein, 1031 aa, Homo sapiens
  Payload ID: 17504
  Gene Symbol: TSHZ2
  Gene Name: teashirt zinc finger homeobox 2
  Uniprot ID: Q9NRE2
  ENSP ID: ENSP00000333114
MMAAALLHYTGYAQEEQLKEEEEIKEEEEEEDSGSVAQLQGGNDTGTDEELETGPEQKGCFSYQNSPGSHLSNQDAENESLLSDASDQVSDIKSVCGRDASDKKAHTHVRLPNEAHNCMDKMTAVYANILSDSYWSGLGLGFKLSNSERRNCDTRNGSNKSDFDWHQDALSKSLQQNLPSRSVSKPSLFSSVQLYRQSSKMCGTVFTGASRFRCRQCSAAYDTLVELTVHMNETGHYQDDNRKKDKLRPTSYSKPRKRAFQDMDKEDAQKVLKCMFCGDSFDSLQDLSVHMIKTKHYQKVPLKEPVPTISSKMVTPAKKRVFDVNRPCSPDSTTGSFADSFSSQKNANLQLSSNNRYGYQNGASYTWQFEACKSQILKCMECGSSHDTLQQLTTHMMVTGHFLKVTSSASKKGKQLVLDPLAVEKMQSLSEAPNSDSLAPKPSSNSASDCTASTTELKKESKKERPEETSKDEKVVKSEDYEDPLQKPLDPTIKYQYLREEDLEDGSKGGGDILKSLENTVTTAINKAQNGAPSWSAYPSIHAAYQLSEGTKPPLPMGSQVLQIRPNLTNKLRPIAPKWKVMPLVSMPTHLAPYTQVKKESEDKDEAVKECGKESPHEEASSFSHSEGDSFRKSETPPEAKKTELGPLKEEEKLMKEGSEKEKPQPLEPTSALSNGCALANHAPALPCINPLSALQSVLNNHLGKATEPLRSPSCSSPSSSTISMFHKSNLNVMDKPVLSPASTRSASVSRRYLFENSDQPIDLTKSKSKKAESSQAQSCMSPPQKHALSDIADMVKVLPKATTPKPASSSRVPPMKLEMDVRRFEDVSSEVSTLHKRKGRQSNWNPQHLLILQAQFASSLFQTSEGKYLLSDLGPQERMQISKFTGLSMTTISHWLANVKYQLRKTGGTKFLKNMDKGHPIFYCSDCASQFRTPSTYISHLESHLGFQMKDMTRLSVDQQSKVEQEISRVSSAQRSPETIAAEEDTDSKFKCKLCCRTFVSKHAVKLHLSKTHSKSPEHHSQFVTDVDEE

SEQ ID NO: 87482 - protein, 1034 aa, Homo sapiens
  Payload ID: 17504
  Gene Symbol: TSHZ2
  Gene Name: teashirt zinc finger homeobox 2
  Uniprot ID: Q9NRE2
  ENSP ID: ENSP00000360552
MPRRKQQAPKRAAGYAQEEQLKEEEEIKEEEEEEDSGSVAQLQGGNDTGTDEELETGPEQKGCFSYQNSPGSHLSNQDAENESLLSDASDQVSDIKSVCGRDASDKKAHTHVRLPNEAHNCMDKMTAVYANILSDSYWSGLGLGFKLSNSERRNCDTRNGSNKSDFDWHQDALSKSLQQNLPSRSVSKPSLFSSVQLYRQSSKMCGTVFTGASRFRCRQCSAAYDTLVELTVHMNETGHYQDDNRKKDKLRPTSYSKPRKRAFQDMDKEDAQKVLKCMFCGDSFDSLQDLSVHMIKTKHYQKVPLKEPVPTISSKMVTPAKKRVFDVNRPCSPDSTTGSFADSFSSQKNANLQLSSNNRYGYQNGASYTWQFEACKSQILKCMECGSSHDTLQQLTTHMMVTGHFLKVTSSASKKGKQLVLDPLAVEKMQSLSEAPNSDSLAPKPSSNSASDCTASTTELKKESKKERPEETSKDEKVVKSEDYEDPLQKPLDPTIKYQYLREEDLEDGSKGGGDILKSLENTVTTAINKAQNGAPSWSAYPSIHAAYQLSEGTKPPLPMGSQVLQIRPNLTNKLRPIAPKWKVMPLVSMPTHLAPYTQVKKESEDKDEAVKECGKESPHEEASSFSHSEGDSFRKSETPPEAKKTELGPLKEEEKLMKEGSEKEKPQPLEPTSALSNGCALANHAPALPCINPLSALQSVLNNHLGKATEPLRSPSCSSPSSSTISMFHKSNLNVMDKPVLSPASTRSASVSRRYLFENSDQPIDLTKSKSKKAESSQAQSCMSPPQKHALSDIADMVKVLPKATTPKPASSSRVPPMKLEMDVRRFEDVSSEVSTLHKRKGRQSNWNPQHLLILQAQFASSLFQTSEGKYLLSDLGPQERMQISKFTGLSMTTISHWLANVKYQLRKTGGTKFLKNMDKGHPIFYCSDCASQFRTPSTYISHLESHLGFQMKDMTRLSVDQQSKVEQEISRVSSAQRSPETIAAEEDTDSKFKCKLCCRTFVSKHAVKLHLSKTHSKSPEHHSQFVTDVDEE

SEQ ID NO: 87483 - protein, 194 aa, Homo sapiens
  Payload ID: 17504
  Gene Symbol: TSHZ2
  Gene Name: teashirt zinc finger homeobox 2
  ENSP ID: ENSP00000474159
RKGRQSNWNPQHLLILQAQFASSLFQTSEGKYLLSDLGPQERMQISKFTGLSMTTISHWLANVKYQLRKTGGTKFLKNMDKGHPIFYCSDCASQFRTPSTYISHLESHLGFQMKDMTRLSVDQQSKVEQEISRVSSAQRSPETIAAEEDTDSKFKCKLCCRTFVSKHAVKLHLSKTHSKSPEHHSQFVTDVDEE

SEQ ID NO: 87484 - protein, 1031 aa, Homo sapiens; identical to SEQ ID NO: 87481
  Payload ID: 17504
  Gene Symbol: TSHZ2
  Gene Name: teashirt zinc finger homeobox 2
  Uniprot ID: Q9NRE2
  ENSP ID: ENSP00000475114

SEQ ID NO: 87485 - protein, 74 aa, Homo sapiens
  Payload ID: 17504
  Gene Symbol: TSHZ2
  Gene Name: teashirt zinc finger homeobox 2
  ENSP ID: ENSP00000487408
MKFQECHSEVMRHGQKIYPSHHRIEMAVEIASLKCQHSSINQSPTRKNSNSTTGWLLWDLLMGIGNSGSNVVLT

SEQ ID NO: 87486 - protein, 1081 aa, Homo sapiens
  Payload ID: 17505
  Gene Symbol: TSHZ3
  Gene Name: teashirt zinc finger homeobox 3
  Uniprot ID: Q63HK5
  ENSP ID: ENSP00000240587
MPRRKQQAPRRAAAYVSEELKAAALVDEGLDPEEHTADGEPSAKYMCPEKELARACPSYQNSPAAEFSCHEMDSESHISETSDRMADFESGSIKNEEETKEVTVPLEDTTVSDSLEQMKAVYNNFLSNSYWSNLNLNLHQPSSEKNNGSSSSSSSSSSSCGSGSFDWHQSAMAKTLQQVSQSRMLPEPSLFSTVQLYRQSSKLYGSIFTGASKFRCKDCSAAYDTLVELTVHMNETGHYRDDNHETDNNNPKRWSKPRKRSLLEMEGKEDAQKVLKCMYCGHSFESLQDLSVHMIKTKHYQKVPLKEPVTPVAAKIIPATRKKASLELELPSSPDSTGGTPKATISDTNDALQKNSNPYITPNNRYGHQNGASYAWHFEARKSQILKCMECGSSHDTLQELTAHMMVTGHFIKVTNSAMKKGKPIVETPVTPTITTLLDEKVQSVPLAATTFTSPSNTPASISPKLNVEVKKEVDKEKAVTDEKPKQKDKPGEEEEKCDISSKYHYLTENDLEESPKGGLDILKSLENTVTSAINKAQNGTPSWGGYPSIHAAYQLPNMMKLSLGSSGKSTPLKPMFGNSEIVSPTKNQTLVSPPSSQTSPMPKTNFHAMEELVKKVTEKVAKVEEKMKEPDGKLSPPKRATPSPCSSEVGEPIKMEASSDGGFRSQENSPSPPRDGCKDGSPLAEPVENGKELVKPLASSLSGSTAIITDHPPEQPFVNPLSALQSVMNIHLGKAAKPSLPALDPMSMLFKMSNSLAEKAAVATPPPLQSKKADHLDRYFYHVNNDQPIDLTKGKSDKGCSLGSVLLSPTSTAPATSSSTVTTAKTSAVVSFMSNSPLRENALSDISDMLKNLTESHTSKSSTPSSISEKSDIDGATLEEAEESTPAQKRKGRQSNWNPQHLLILQAQFAASLRQTSEGKYIMSDLSPQERMHISRFTGLSMTTISHWLANVKYQLRRTGGTKFLKNLDTGHPVFFCNDCASQIRTPSTYISHLESHLGFRLRDLSKLSTEQINSQIAQTKSPSEKMVTSSPEEDLGTSYQCKLCNRTFASKHAVKLHLSKTHGKSPEDHLLYVSELEKQ

SEQ ID NO: 87487 - protein, 33 aa, Homo sapiens
  Payload ID: 17505
  Gene Symbol: TSHZ3
  Gene Name: teashirt zinc finger homeobox 3
  ENSP ID: ENSP00000475613
MPRRKQQAPRRAADKSINWVEVLSTWWVENVLP

SEQ ID NO: 87488 - protein, 631 aa, Homo sapiens
  Payload ID: 17506
  Gene Symbol: TEC
  Gene Name: tec protein tyrosine kinase
  Uniprot ID: P42680
  ENSP ID: ENSP00000370912
MNFNTILEEILIKRSQQKKKTSPLNYKERLFVLTKSMLTYYEGRAEKKYRKGFIDVSKIKCVEIVKNDDGVIPCQNKYPFQVVHDANTLYIFAPSPQSRDLWVKKLKEEIKNNNNIMIKYHPKFWTDGSYQCCRQTEKLAPGCEKYNLFESSIRKALPPAPETKKRRPPPPIPLEEEDNSEEIVVAMYDFQAAEGHDLRLERGQEYLILEKNDVHWWRARDKYGNEGYIPSNYVTGKKSNNLDQYEWYCRNMNRSKAEQLLRSEDKEGGFMVRDSSQPGLYTVSLYTKFGGEGSSGFRHYHIKETTTSPKKYYLAEKHAFGSIPEIIEYHKHNAAGLVTRLRYPVSVKGKNAPTTAGFSYEKWEINPSELTFMRELGSGLFGVVRLGKWRAQYKVAIKAIREGAMCEEDFIEEAKVMMKLTHPKLVQLYGVCTQQKPIYIVTEFMERGCLLNFLRQRQGHFSRDVLLSMCQDVCEGMEYLERNSFIHRDLAARNCLVSEAGVVKVSDFGMARYVLDDQYTSSSGAKFPVKWCPPEVFNYSRFSSKSDVWSFGVLMWEVFTEGRMPFEKYTNYEVVTMVTRGHRLYQPKLASNYVYEVMLRCWQEKPEGRPSFEDLLRTIDELVECEETFGR

SEQ ID NO: 87489 - protein, 51 aa, Homo sapiens
  Payload ID: 17506
  Gene Symbol: TEC
  Gene Name: tec protein tyrosine kinase
  ENSP ID: ENSP00000424365
MRELGSGLFGVVRLGKWRAQYKVAIKAIREGAMCEEDFIEEAKVMMLPEIV

SEQ ID NO: 87490 - protein, 100 aa, Homo sapiens
  Payload ID: 17506
  Gene Symbol: TEC
  Gene Name: tec protein tyrosine kinase
  ENSP ID: ENSP00000424567
MNFNTILEEILIKRSQQKKKTSPLNYKERLFVLTKSMLTYYEGRAEKKYRKGFIDVSKIKCVEIVKNDDGVIPCQNKYPFQSTKQGPVGEEVKRRNKEQQ

SEQ ID NO: 87491 - protein, 483 aa, Homo sapiens [sequence omitted]

SEQ ID NO: 87492 - protein, 573 aa, Homo sapiens
  Payload ID: 17507
  Gene Symbol: TCTN1
  Gene Name: tectonic family member 1
  Uniprot ID: Q2MV58
  ENSP ID: ENSP00000380775
MRPRGLPPLLVVLLGCWASVSAQTDATPAVTTEGLNSTEAALATFGTFPSTRPPGTPRAPGPSSGPRPTPVTDVAVLCVCDLSPAQCDINCCCDPDCSSVDFSVFSACSVPVVTGDSQFCSQKAVIYSLNFTANPPQRVFELVDQINPSIFCIHITNYKPALSFINPEVPDENNFDTLMKTSDGFTLNAESYVSFTTKLDIPTAAKYEYGVPLQTSDSFLRFPSSLTSSLCTDNNPAGQAYWFTPVIPALWEAEARGSLEVPDSRKKVPITVQSIVIQSLNKTLTRREDTDVLQPTLVNAGHFSLCVNVVLEVKYSLTYTDAGEVTKADLSFVLGTVSSVVVPLQQKFEIHFLQENTQPVPLSGNPGYVVGLPLAAGFQPHKGSGIIQTTNRYGQLTILHSTTEQDCLALEGVRTPVLFGYTMQSGCKLRLTGALPCQLVAQKVKSLLWGQGFPDYVAPFGNSQAQDMLDWVPIHFITQSFNRKDSCQLPGALVIEVKWTKYGSLLNPQAKIVNVTANLISSSFPEANSGNERTILISTAVTFVDVSAPAEAGFRAPPAINARLPFNFFFPFV

SEQ ID NO: 87493 - protein, 179 aa, Homo sapiens
  Payload ID: 17507
  Gene Symbol: TCTN1
  Gene Name: tectonic family member 1
  ENSP ID: ENSP00000380776
MRPRGLPPLLVVLLGCWASVSAQTDATPAVTTEGLNSTEAALATFGTFPSTRPPGTPRAPGPSSGPRPTPVTDVAVLCVCDLSPAQCDINCCCDPDCSSVDFSVFSACSVPVVTGDSQFCSQKAVIYSLNFTANPPQRVFELVDQINPSIFCIHITNSHFTPGLSRWLCESRSRILSFP

SEQ ID NO: 87494 - protein, 592 aa, Homo sapiens
  Payload ID: 17507
  Gene Symbol: TCTN1
  Gene Name: tectonic family member 1
  Uniprot ID: Q2MV58
  ENSP ID: ENSP00000380779
MRPRGLPPLLVVLLGCWASVSAQTDATPAVTTEGLNSTEAALATFGTFPSTRPPGTPRAPGPSSGPRPTPVTDVAVLCVCDLSPAQCDINCCCDPDCSSVDFSVFSACSVPVVTGDSQFCSQKAVIYSLNFTANPPQRVFELVDQINPSIFCIHITNYKPALSFINPEVPDENNFDTLMKTSDGFTLNAESYVSFTTKLDIPTAAKYEYGVPLQTSDSFLRFPSSLTSSLCTDNNPAAFLVNQAVKCTRKINLEQCEEIEALSMAFYSSPEILRVPDSRKKVPITVQSIVIQSLNKTLTRREDTDVLQPTLVNAGHFSLCVNVVLEVKYSLTYTDAGEVTKADLSFVLGTVSSVVVPLQQKFEIHFLQENTQPVPLSGNPGYVVGLPLAAGFQPHKGSGIIQTTNRYGQLTILHSTTEQDCLALEGVRTPVLFGYTMQSGCKLRLTGALPCQLVAQKVKSLLWGQGFPDYVAPFGNSQAQDMLDWVPIHFITQSFNRKHFVLQDSCQLPGALVIEVKWTKYGSLLNPQAKIVNVTANLISSSFPEANSGNERTILISTAVTFVDVSAPAEAGFRAPPAINARLPFNFFFPFV

SEQ ID NO: 87495 - protein, 100 aa, Homo sapiens
  Payload ID: 17507
  Gene Symbol: TCTN1
  Gene Name: tectonic family member 1
  ENSP ID: ENSP00000435027
MRPRGLPPLLVVLLGCWASVSAQTDATPAVTTEGLNSTEAALATFGTFPSTRPPGTPRAPGPSSGPRPTPVTDGGYHVPAPGVHSDPTSRGQPRCCSLCL

SEQ ID NO: 87496 - protein, 83 aa, Homo sapiens
  Payload ID: 17507
  Gene Symbol: TCTN1
  Gene Name: tectonic family member 1
  ENSP ID: ENSP00000436044
MRPRGLPPLLVVLLGCWASVSAQTDATPAVTTEGLNSTEAALATFGTFPSTRPPGTPRAPGPSSGPRPTPVTDGSHSVTQAGV

SEQ ID NO: 87497 - protein, 100 aa, Homo sapiens; identical to SEQ ID NO: 87495
  Payload ID: 17507
  Gene Symbol: TCTN1
  Gene Name: tectonic family member 1
  ENSP ID: ENSP00000436673

SEQ ID NO: 87498 - protein, 263 aa, Homo sapiens
  Payload ID: 17507
  Gene Symbol: TCTN1
  Gene Name: tectonic family member 1
  ENSP ID: ENSP00000437196
MRPRGLPPLLVVLLGCWASVSAQTDATPAVTTEGLNSTEAALATFGTFPSTRPPGTPRAPGPSSGPRPTPVTDVAVLCVCDLSPAQCDINCCCDPDCSSVDFSVFSACSVPVVTGDSQFCSQKAVIYSLNFTANPPQRVFELVDQINPSIFCIHITNYKPALSFINPEVPDENNFDTLMKTSDGFTLNAESYVSFTTKLDIPTAAKYEYGVPLQTSDSFLRFPSSLTSSLCTDNNPAGQAYWFTPVIPALWEAEARGSLERFW

SEQ ID NO: 87499 - protein, 94 aa, Homo sapiens
  Payload ID: 17507
  Gene Symbol: TCTN1
  Gene Name: tectonic family member 1
  ENSP ID: ENSP00000448188
DTDVLQPTLVNAGHFSLCVNVVLETDWSSPVSARSTEGEEPAVGPGLPRLRGPFWKFPGPGHAGLGAHPLHHPVIQQEGFLPAPRGFGYRSEVD

SEQ ID NO: 87500 - protein, 587 aa, Homo sapiens
  Payload ID: 17507
  Gene Symbol: TCTN1
  Gene Name: tectonic family member 1
  Uniprot ID: Q2MV58
  ENSP ID: ENSP00000448735
MRPRGLPPLLVVLLGCWASVSAQTDATPAVTTEGLNSTEAALATFGTFPSTRPPGTPRAPGPSSGPRPTPVTDVAVLCVCDLSPAQCDINCCCDPDCSSVDFSVFSACSVPVVTGDSQFCSQKAVIYSLNFTANPPQRVFELVDQINPSIFCIHITNYKPALSFINPEVPDENNFDTLMKTSDGFTLNAESYVSFTTKLDIPTAAKYEYGVPLQTSDSFLRFPSSLTSSLCTDNNPAAFLVNQAVKCTRKINLEQCEEIEALSMAFYSSPEILRVPDSRKKVPITVQSIVIQSLNKTLTRREDTDVLQPTLVNAGHFSLCVNVVLEVKYSLTYTDAGEVTKADLSFVLGTVSSVVVPLQQKFEIHFLQENTQPVPLSGNPGYVVGLPLAAGFQPHKGSGIIQTTNRYGQLTILHSTTEQDCLALEGVRTPVLFGYTMQSGCKLRLTGALPCQLVAQKVKSLLWGQGFPDYVAPFGNSQAQDMLDWVPIHFITQSFNRKDSCQLPGALVIEVKWTKYGSLLNPQAKIVNVTANLISSSFPEANSGNERTILISTAVTFVDVSAPAEAGFRAPPAINARLPFNFFFPFV

SEQ ID NO: 87501 - protein, 72 aa, Homo sapiens
  Payload ID: 17507
  Gene Symbol: TCTN1
  Gene Name: tectonic family member 1
  ENSP ID: ENSP00000450154
MKGRFLFPLRLLLWMCLHLQRQASELHQPSMPGCPLTSSSRLFDNAQMHQFLNIHVKFENCTFGEIKFYIQL

SEQ ID NO: 87502 - protein, 88 aa, Homo sapiens
  Payload ID: 17507
  Gene Symbol: TCTN1
  Gene Name: tectonic family member 1
  ENSP ID: ENSP00000473743
MRPRGLPPLLVVLLGCWASVSAQTDATPAVTTEGLNSTEAALATFGTFPSTRPPGTPRAPGPSSGPRPTPVTDGATASFVVKKQSSIH

SEQ ID NO: 87503 - protein, 245 aa, Homo sapiens
  Payload ID: 17507
  Gene Symbol: TCTN1
  Gene Name: tectonic family member 1
  ENSP ID: ENSP00000473789
MRPRGLPPLLVVLLGCWASVSAQTDATPAVTTEGLNSTEAALATFGTFPSTRPPGTPRAPGPSSGPRPTPVTDVAVLCVCDLSPAQCDINCCCDPDCSSVDFSVFSACSVPVVTGDSQFCSQKAVIYSLNFTANPPQRVFELVDQINPSIFCIHITNYKPALSFINPEVPDENNFDTLMKTSDGFTLNAESYVSFTTKLDIPTAAKYEVSLNLIDSFHPITNIFPCKLIFKVTRKTGFLETELIL

SEQ ID NO: 87504 - protein, 162 aa, Homo sapiens
  Payload ID: 17507
  Gene Symbol: TCTN1
  Gene Name: tectonic family member 1
  ENSP ID: ENSP00000473903
MRPRGLPPLLVVLLGCWASVSAQTDATPAVTTEGLNSTEAALATFGTFPSTRPPGTPRAPGPSSGPRPTPVTDVAVLCVCDLSPAQCDINCCCDPDCSSVDFSVFSACSVPVVTGDSQFCSQKAVIYSLNFTANPPQRVFELVDQINPSIFCIHITNCRCSV

SEQ ID NO: 87505 - protein, 100 aa, Homo sapiens; identical to SEQ ID NO: 87495
  Payload ID: 17507
  Gene Symbol: TCTN1
  Gene Name: tectonic family member 1
  ENSP ID: ENSP00000474208

SEQ ID NO: 87506 - protein, 106 aa, Homo sapiens
  Payload ID: 17507
  Gene Symbol: TCTN1
  Gene Name: tectonic family member 1
  ENSP ID: ENSP00000474291
MRPRGLPPLLVVLLGCWASVSAQTDATPAVTTEGLNSTEAALATFGTFPSTRPPGTPRAPGPSSGPRPTPVTDGHATCRYRSRRLTVSGELDGKLQVASGSVGGEE

SEQ ID NO: 87507 - protein, 88 aa, Homo sapiens; identical to SEQ ID NO: 87502
  Payload ID: 17507
  Gene Symbol: TCTN1
  Gene Name: tectonic family member 1
  ENSP ID: ENSP00000474343

SEQ ID NO: 87508 - protein, 75 aa, Homo sapiens
  Payload ID: 17507
  Gene Symbol: TCTN1
  Gene Name: tectonic family member 1
  ENSP ID: ENSP00000474525
MRPRGLPPLLVVLLGCWASVSAQTDATPAVTTEGLNSTEAALATFGTFPSTRPPGTPRAPGPSSGPRPTPVTDGG

SEQ ID NO: 87509 - protein, 573 aa, Homo sapiens [sequence omitted]

SEQ ID NO: 87510 - protein, 697 aa, Homo sapiens
  Payload ID: 17508
  Gene Symbol: TCTN2
  Gene Name: tectonic family member 2
  Uniprot ID: Q96GX1
  ENSP ID: ENSP00000304941
MGFQPPAALLLRLFLLQGILRLLWGDLAFIPPFIRMSGPAVSASLVGDTEGVTVSLAVLQDEAGILPIPTCGVLNNETEDWSVTVIPGAKVLEVTVRWKRGLDWCSSNETDSFSESPCILQTLLVSASHNSSCSAHLLIQVEIYANSSLTHNASENVTVIPNQVYQPLGPCPCNLTAGACDVRCCCDQECSSNLTTLFRRSCFTGVFGGDVNPPFDQLCSAGTTTRGVPDWFPFLCVQSPLANTPFLGYFYHGAVSPKQDSSFEVYVDTDAKDFADFGYKQGDPIMTVKKAYFTIPQVSLAGQCMQNAPVAFLHNFDVKCVTNLELYQERDGIINAKIKNVALGGIVTPKVIYEEATDLDKFITNTETPLNNGSTPRIVNVEEHYIFKWNNNTISEINVKIFRAEINAHQKGIMTQRFVVKFLSYNSGNEEELSGNPGYQLGKPVRALNINRMNNVTTLHLWQSAGRGLCTSATFKPILFGENVLSGCLLEVGINENCTQLRENAVERLDSLIQATHVAMRGNSDYADLSDGWLEIIRVDAPDPGADPLASSVNGMCLDIPAHLSIRILISDAGAVEGITQQEILGVETRFSSVNWQYQCGLTCEHKADLLPISASVQFIKIPAQLPHPLTRFQINYTEYDCNRNEVCWPQLLYPWTQYYQGELHSQCVAKGLLLLLFLTLALFLSNPWTRICKAYS

SEQ ID NO: 87511 - protein, 696 aa, Homo sapiens
  Payload ID: 17508
  Gene Symbol: TCTN2
  Gene Name: tectonic family member 2
  Uniprot ID: Q96GX1
  ENSP ID: ENSP00000395171
MGFQPPAALLLRLFLLQGILRLLWGDLAFIPPFIRMSGPAVSASLVGDTEGVTVSLAVLQDEAGILPIPTCGVLNNETEDWSVTVIPGAVLEVTVRWKRGLDWCSSNETDSFSESPCILQTLLVSASHNSSCSAHLLIQVEIYANSSLTHNASENVTVIPNQVYQPLGPCPCNLTAGACDVRCCCDQECSSNLTTLFRRSCFTGVFGGDVNPPFDQLCSAGTTTRGVPDWFPFLCVQSPLANTPFLGYFYHGAVSPKQDSSFEVYVDTDAKDFADFGYKQGDPIMTVKKAYFTIPQVSLAGQCMQNAPVAFLHNFDVKCVTNLELYQERDGIINAKIKNVALGGIVTPKVIYEEATDLDKFITNTETPLNNGSTPRIVNVEEHYIFKWNNNTISEINVKIFRAEINAHQKGIMTQRFVVKFLSYNSGNEEELSGNPGYQLGKPVRALNINRMNNVTTLHLWQSAGRGLCTSATFKPILFGENVLSGCLLEVGINENCTQLRENAVERLDSLIQATHVAMRGNSDYADLSDGWLEIIRVDAPDPGADPLASSVNGMCLDIPAHLSIRILISDAGAVEGITQQEILGVETRFSSVNWQYQCGLTCEHKADLLPISASVQFIKIPAQLPHPLTRFQINYTEYDCNRNEVCWPQLLYPWTQYYQGELHSQCVAKGLLLLLFLTLALFLSNPWTRICKAYS

SEQ ID NO: 87512 - protein, 60 aa, Homo sapiens
  Payload ID: 17508
  Gene Symbol: TCTN2
  Gene Name: tectonic family member 2
  ENSP ID: ENSP00000437644
MGFQPPAALLLRLFLLQGILRLLWGDLGVYGAAVTSLSSLLLSECPALRSARPWSETPRV

SEQ ID NO: 87513 - protein, 625 aa, Homo sapiens
  Payload ID: 17509
  Gene Symbol: TCTN3
  Gene Name: tectonic family member 3
  ENSP ID: ENSP00000265993
MRLETAEAYVGPGGPECPMRTPQLALLQVFFLVFPDGVRPQPSSSPSGAVPTSLELQRGTDGGTLQSPSEATATRPAVPGLPTVVPTLVTPSAPGNRTVDLFPVLPICVCDLTPGACDINCCCDRDCYLLHPRTVFSFCLPGSVRSSSWVCVDNSVIFRSNSPFPSRVFMDSNGIRQFCVHVNNSNLNYFQKLQKVNATNFQALAAEFGGESFTSTFQTQSPPSFYRAGDPILTYFPKWSVISLLRQPAGVGAGGLCAESNPAGFLESKSTTCTRFFKNLASSCTLDSALNAASYYNFTVLKVPRSMTDPQNMEFQVPVILTSQANAPLLAGNTCQNVVSQVTYEIETNGTFGIQKVSVSLGQTNLTVEPGASLQQHFILRFRAFQQSTAASLTSPRSGNPGYIVGKPLLALTDDISYSMTLLQSQGNGSCSVKRHEVQFGVNAISGCKLRLKKADCSHLQQEIYQTLHGRPRPEYVAIFGNADPAQKGGWTRILNRHCSISAINCTSCCLIPVSLEIQVLWAYVGLLSNPQAHVSGVRFLYQCQSIQDSQQVTEVSLTTLVNFVDITQKPQPPRGQPKMDWKWPFDFFPFKVAFSRGVFSQKCSVSPILILCLLLLGVLNLETM

SEQ ID NO: 87514 - protein, 443 aa, Homo sapiens
  Payload ID: 17509
  Gene Symbol: TCTN3
  Gene Name: tectonic family member 3
  Uniprot ID: Q6NUS6
  ENSP ID: ENSP00000360253
MRTPQLALLQVFFLVFPDGVRPQPSSSPSGAVPTSLELQRGTDGGTLQSPSEATATRPAVPGLPTVVPTLVTPSAPGNRTVDLFPVLPICVCDLTPGACDINCCCDRDCYLLHPRTVFSFCLPGSVRSSSWVCVDNSVIFRSNSPFPSRVFMDSNGIRQFCVHVNNSNLNYFQKLQKVNATNFQALAAEFGGESFTSTFQTQSPPSFYRAGDPILTYFPKWSVISLLRQPAGVGAGGLCAESNPAGFLESKSTTCTRFFKNLASSCTLDSALNAASYYNFTVLKVPRSMTDPQNMEFQVPVILTSQANAPLLAGNTCQNVVSQVTYEIETNGTFGIQKVSVSLGQTNLTVEPGASLQQHFILRFRAFQQSTAASLTSPRSGNPGYIVGKPLLALTDDISYSVSFLELGGLLQPNEKSCKGFQTYVRLAKGEEFFVHYNEVLIY

SEQ ID NO: 87515 - protein, 607 aa, Homo sapiens
  Payload ID: 17509
  Gene Symbol: TCTN3
  Gene Name: tectonic family member 3
  Uniprot ID: Q6NUS6
  ENSP ID: ENSP00000360261
MRTPQLALLQVFFLVFPDGVRPQPSSSPSGAVPTSLELQRGTDGGTLQSPSEATATRPAVPGLPTVVPTLVTPSAPGNRTVDLFPVLPICVCDLTPGACDINCCCDRDCYLLHPRTVFSFCLPGSVRSSSWVCVDNSVIFRSNSPFPSRVFMDSNGIRQFCVHVNNSNLNYFQKLQKVNATNFQALAAEFGGESFTSTFQTQSPPSFYRAGDPILTYFPKWSVISLLRQPAGVGAGGLCAESNPAGFLESKSTTCTRFFKNLASSCTLDSALNAASYYNFTVLKVPRSMTDPQNMEFQVPVILTSQANAPLLAGNTCQNVVSQVTYEIETNGTFGIQKVSVSLGQTNLTVEPGASLQQHFILRFRAFQQSTAASLTSPRSGNPGYIVGKPLLALTDDISYSMTLLQSQGNGSCSVKRHEVQFGVNAISGCKLRLKKADCSHLQQEIYQTLHGRPRPEYVAIFGNADPAQKGGWTRILNRHCSISAINCTSCCLIPVSLEIQVLWAYVGLLSNPQAHVSGVRFLYQCQSIQDSQQVTEVSLTTLVNFVDITQKPQPPRGQPKMDWKWPFDFFPFKVAFSRGVFSQKCSVSPILILCLLLLGVLNLETM

SEQ ID NO: 87516 - protein, 459 aa, Homo sapiens
  Payload ID: 17509
  Gene Symbol: TCTN3
  Gene Name: tectonic family member 3
  Uniprot ID: Q6NUS6
  ENSP ID: ENSP00000387567
MRTPQLALLQVFFLVFPDGVRPQPSSSPSGAVPTSLELQRGTDGGTLQSPSEATATRPAVPGLPTVVPTLVTPSAPGNRTVDLFPVLPICVCDLTPGACDINCCCDRDCYLLHPRTVFSFCLPGSVRSSSWVCVDNSVIFRSNSPFPSRVFMDSNGIRQFCVHVNNCFLESKSTTCTRFFKNLASSCTLDSALNAASYYNFTVLKVPRSMTDPQNMEAFQQSTAASLTSPRSGNPGYIVGKPLLALTDDISYSMTLLQSQGNGSCSVKRHEVQFGVNAISGCKLRLKKADCSHLQQEIYQTLHGRPRPEYVAIFGNADPAQKGGWTRILNRHCSISAINCTSCCLIPVSLEIQVLWAYVGLLSNPQAHVSGVRFLYQCQSIQDSQQVTEVSLTTLVNFVDITQKPQPPRGQPKMDWKWPFDFFPFKVAFSRGVFSQKCSVSPILILCLLLLGVLNLETM

SEQ ID NO: 87517 - protein, 607 aa, Homo sapiens; identical to SEQ ID NO: 87515
  Payload ID: 17509
  Gene Symbol: TCTN3
  Gene Name: tectonic family member 3
  Uniprot ID: Q6NUS6
  ENSP ID: ENSP00000483364

SEQ ID NO: 87518 - protein, 96 aa, Homo sapiens
  Payload ID: 17510
  Gene Symbol: TECPR1
  Gene Name: tectonin beta-propeller repeat containing 1
  ENSP ID: ENSP00000396076
MPNSVLWAVDLFGRVYTLSTAGQYWEMCKDSQLEFKRVSATTQCCWGIACDNQVYVYVCASDVPIRRREEAYENQAWVQGRLCVPGPQRWNPMGGF

SEQ ID NO: 87519 - protein, 1165 aa, Homo sapiens
  Payload ID: 17510
  Gene Symbol: TECPR1
  Gene Name: tectonin beta-propeller repeat containing 1
  Uniprot ID: Q7Z6L1
  ENSP ID: ENSP00000404923
MPNSVLWAVDLFGRVYTLSTAGQYWEMCKDSQLEFKRVSATTQCCWGIACDNQVYVYVCASDVPIRRREEAYENQRWNPMGGFCEKLLLSDRWGWSDVSGLQHRPLDRVALPSPHWEWESDWYVDENFGGEPTEKGGWTYAIDFPATYTKDKKWNSCVRRRKWIRYRRYKSRDIWAKIPSKDDPKELPDPFNDLSVGGWEITEEPVGRLSVWAVSLQGKVWYREDVSHSNPEGSSWSLLDTPGEVVQISCGPHDLLWATLWEGQALVREGINRSNPKGSSWSIVEPPGSENGVMHISVGVSVVWAVTKDWKVWFRRGVNSHNPCGTSWIEMVGEMTMVNVGMNDQVWGIGCEDRAVYFRQGVTPSELSGKTWKAIIAARECDRSHSGSSSSLLSAGCFFGDEVRGSGESAPSDTDASSEVERPGPGQILPAEPLDDSKNATGNSASGLGAGRTAEDTVEDACPAEGSREARPNTHPGPAPTPAELPWTNIDLKEAKKVPSHSAAGFPETTSLSSLGLLPLGLEEPYGVDDHPLWAWVSGGGCVVEACAMPRWFTVQAGLSSSVHMLSLSITPAQTAAWRKQIFQQLTERTKRELENFRHYEQAVEQSVWVKTGALQWWCDWKPHKWVDVRLALEQFTGHDGVRDSILFIYYVVHEEKKYIHIFLNEVVALVPVLNETKHSFALYTPERTRQRWPVRLAAATEQDMNDWLALLSLSCCESRKVQGRPSPQAIWSITCKGDIFVSEPSPDLEAHEHPLPCDQMFWRQMGGHLRMVEANSRGVVWGIGYDHTAWVYTGGYGGGCFQGLASSTSNIYTQSDVKCVHIYENQRWNPVTGYTSRGLPTDRYMWSDASGLQECTKAGTKPPSLQWAWVSDWFVDFSVPGGTDQEGWQYASDFPASYHGSKTMKDFVRRRCWARKCKLVTSGPWLEVPPIALRDVSIIPESPGAEGSGHSIALWAVSDKGDVLCRLGVSELNPAGSSWLHVGTDQPFASISIGACYQVWAVARDGSAFYRGSVYPSQPAGDCWYHIPSPPRQRLKQVSAGQTSVYALDENGNLWYRQGITPSYPQGSSWEHVSNNVCRVSVGPLDQVWVIANKVQGSHSLSRGTVCHRTGVQPHEPKGHGWDYGIGGGWDHISVRANATRAPRSSSQEQEPSAPPEAHGPVCC

SEQ ID NO: 87520 - protein, 101 aa, Homo sapiens
  Payload ID: 17510
  Gene Symbol: TECPR1
  Gene Name: tectonin beta-propeller repeat containing 1
  ENSP ID: ENSP00000407471
MPNSVLWAVDLFGRVYTLSTAGQYWEMCKDSQLEFKRVSATTQCCWGIACDNQVYVYVCASDVPIRRREEAYENQRWNPMGGFCEKLLLSDRWGWSDVSGL

SEQ ID NO: 87521 - protein, 99 aa, Homo sapiens
  Payload ID: 17510
  Gene Symbol: TECPR1
  Gene Name: tectonin beta-propeller repeat containing 1
  ENSP ID: ENSP00000412675
MPNSVLWAVDLFGRVYTLSTAGQYWEMCKDSQLEFKRVSATTQCCWGIACDNQVYVYVCASDVPIRRREEAYENQAWVQGRLCVPGPQRWNPMGGFCEK

SEQ ID NO: 87522 - protein, 1411 aa, Homo sapiens
  Payload ID: 17511
  Gene Symbol: TECPR2
  Gene Name: tectonin beta-propeller repeat containing 2
  Uniprot ID: O15040
  ENSP ID: ENSP00000352510
MASISEPVTFREFCPLYYLLNAIPTKIQKGFRSIVVYLTALDTNGDYIAVGSSIGMLYLYCRHLNQMRKYNFEGKTESITVVKLLSCFDDLVAAGTASGRVAVFQLVSSLPGRNKQLRRFDVTGIHKNSITALAWSPNGMKLFSGDDKGKIVYSSLDLDQGLCNSQLVLEEPSSIVQLDYSQKVLLVSTLQRSLLFYTEEKSVRQIGTQPRKSTGKFGACFIPGLCKQSDLTLYASRPGLRLWKADVHGTVQATFILKDAFAGGVKPFELHPRLESPNSGSCSLPERHLGLVSCFFQEGWVLSWNEYSIYLLDTVNQATVAGLEGSGDIVSVSCTENEIFFLKGDRNIIRISSRPEGLTSTVRDGLEMSGCSERVHVQQAEKLPGATVSETRLRGSSMASSVASEPRSRSSSLNSTDSGSGLLPPGLQATPELGKGSQPLSQRFNAISSEDFDQELVVKPIKVKRKKKKKKTEGGSRSTCHSSLESTPCSEFPGDSPQSLNTDLLSMTSSVLGSSVDQLSAESPDQESSFNGEVNGVPQENTDPETFNVLEVSGSMPDSLAEEDDIRTEMPHCHHAHGRELLNGAREDVGGSDVTGLGDEPCPADDGPNSTQLPFQEQDSSPGAHDGEDIQPIGPQSTFCEVPLLNSLTVPSSLSWAPSAEQWLPGTRADEGSPVEPSQEQDILTSMEASGHLSTNLWHAVTDDDTGQKEIPISERVLGSVGGQLTPVSALAASTHKPWLEQPPRDQTLTSSDEEDIYAHGLPSSSSETSVTELGPSCSQQDLSRLGAEDAGLLKPDQFAESWMGYSGPGYGILSLVVSEKYIWCLDYKGGLFCSALPGAGLRWQKFEDAVQQVAVSPSGALLWKIEQKSNRAFACGKVTIKGKRHWYEALPQAVFVALSDDTAWIIRTSGDLYLQTGLSVDRPCARAVKVDCPYPLSQITARNNVVWALTEQRALLYREGVSSFCPEGEQWKCDIVSERQALEPVCITLGDQQTLWALDIHGNLWFRTGIISKKPQGDDDHWWQVSITDYVVFDQCSLFQTIIHATHSVATAAQAPVEKVADKLRMAFWSQQLQCQPSLLGVNNSGVWISSGKNEFHVAKGSLIGTYWNHVVPRGTASATKWAFVLASAAPTKEGSFLWLCQSSKDLCSVSAQSAQSRPSTVQLPPEAEMRAYAACQDALWALDSLGQVFIRTLSKSCPTGMHWTRLDLSQLGAVKLTSLACGNQHIWACDSRGGVYFRVGTQPLNPSLMLPAWIMIEPPVQPAGVSLVSVHSSPNDQMLWVLDSRWNVHVRTGITEEMPVGTAWEHVPGLQACQLALSTRTVWARCPNGDLARRYGVTDKNPAGDYWKKIPGSVSCFTVTASDELWAVGPPGYLLQRLTKTFSHSHGTQKSSQAAMPHPEDLEDEWEVI

SEQ ID NO: 87523 - protein, 1267 aa, Homo sapiens
  Payload ID: 17511
  Gene Symbol: TECPR2
  Gene Name: tectonin beta-propeller repeat containing 2
  Uniprot ID: O15040
  ENSP ID: ENSP00000453671
MASISEPVTFREFCPLYYLLNAIPTKIQKGFRSIVVYLTALDTNGDYIAVGSSIGMLYLYCRHLNQMRKYNFEGKTESITVVKLLSCFDDLVAAGTASGRVAVFQLVSSLPGRNKQLRRFDVTGIHKNSITALAWSPNGMKLFSGDDKGKIVYSSLDLDQGLCNSQLVLEEPSSIVQLDYSQKVLLVSTLQRSLLFYTEEKSVRQIGTQPRKSTGKFGACFIPGLCKQSDLTLYASRPGLRLWKADVHGTVQATFILKDAFAGGVKPFELHPRLESPNSGSCSLPERHLGLVSCFFQEGWVLSWNEYSIYLLDTVNQATVAGLEGSGDIVSVSCTENEIFFLKGDRNIIRISSRPEGLTSTVRDGLEMSGCSERVHVQQAEKLPGATVSETRLRGSSMASSVASEPRSRSSSLNSTDSGSGLLPPGLQATPELGKGSQPLSQRFNAISSEDFDQELVVKPIKVKRKKKKKKTEGGSRSTCHSSLESTPCSEFPGDSPQSLNTDLLSMTSSVLGSSVDQLSAESPDQESSFNGEVNGVPQENTDPETFNVLEVSGSMPDSLAEEDDIRTEMPHCHHAHGRELLNGAREDVGGSDVTGLGDEPCPADDGPNSTQLPFQEQDSSPGAHDGEDIQPIGPQSTFCEVPLLNSLTVPSSLSWAPSAEQWLPGTRADEGSPVEPSQEQDILTSMEASGHLSTNLWHAVTDDDTGQKEIPISERVLGSVGGQLTPVSALAASTHKPWLEQPPRDQTLTSSDEEDIYAHGLPSSSSETSVTELGPSCSQQDLSRLGAEDAGLLKPDQFAESWMGYSGPGYGILSLVVSEKYIWCLDYKGGLFCSALPGAGLRWQKFEDAVQQVAVSPSGALLWKIEQKSNRAFACGKVTIKGKRHWYEALPQAVFVALSDDTAWIIRTSGDLYLQTGLSVDRPCARAVKVDCPYPLSQITARNNVVWALTEQRALLYREGVSSFCPEGEQWKCDIVSERQALEPVCITLGDQQTLWALDIHGNLWFRTGIISKKPQGDDDHWWQVSITDYVVFDQCSLFQTIIHATHSVATAAQAPVEKVADKLRMAFWSQQLQCQPSLLGVNNSGVWISSGKNEFHVAKGSLIGTYWNHVVPRGTASATKWAFVLASAAPTKEGSFLWLCQSSKDLCSVSAQSAQSRPSTVQLPPEAEMRAYAACQDALWALDSLGQVFIRTLSKSCPTGMHWTRLDLSQLGAVKLTSLACGNQHIWACDSRGGVYFRVGTQPLNPSLMLPAWIMIEPPVQVSRS

SEQ ID NO: 87524 - protein, 2155 aa, Homo sapiens
  Payload ID: 17512
  Gene Symbol: TECTA
  Gene Name: tectorin alpha
  Uniprot ID: O75443
  ENSP ID: ENSP00000264037
MNYSSFLRIWVSFIFALVQHQAQPRELMYPFWQNDTKTPKVDDGSSSEIKLAIPVFFFGVPYRTVYVNNNGVVSFNVLVSQFTPESFPLTDGRAFVAPFWADVHNGIRGEIYYRETMEPAILKRATKDIRKYFKDMATFSATWVFIVTWEEVTFYGGSSTTPVNTFQAVLVSDGSYTFTLFNYYEINWTTGTASGGDPLTGLGGVMAQAGFNGGNLTNFFSLPGSRTPEIVNIQETTNVNVPGRWAFKVDGKEIDPANGCTSRGQFLRRGEVFWDDLNCTVKCRCLDFNNEIYCQEASCSPYEVCEPKGKFFYCSAVETSTCVVFGEPHYHTFDGFLFHFQGSCAYLLARQCLQTSSLPFFSVEAKNEHRRGSAVSWVKELSVEVNGYKILIPKGSYGRVKVNDLVTSLPVTLDLGTVKIYQSGISTAVETDFGLLVTFDGQHYASISVPGSYINSTCGLCGNYNKNPLDDFLRPDGRPAMSVLDLGESWRVYHADWKCDSGCVDNCTQCDAATEALYFGSDYCGFLNKTDGPLWECGTVVDPTAFVHSCVYDLCSVRDNGTLLCQAIQAYALVCQALGIPIGDWRTQTGCVSTVQCPSFSHYSVCTSSCPDTCSDLTASRNCATPCTEGCECNQGFVLSTSQCVPLHKCGCDFDGHYYTMGEFFWATANCTVQCLCEEGGDVYCFNKTCGSGEVCAVEDGYQGCFPKRETVCLLSQNQVLHTFDGASYAFPSEFSYTLLKTCPERPEYLEIDINKKKPDAGPAWLRGLRILVADQEVKIGGIGASEVKLNGQEVELPFFHPSGKLEIYRNKNSTTVESKGVVTVQYSDIGLLYIRLSTTYFNCTGGLCGFYNANASDEFCLPNGKCTDNLAVFLESWTTFEEICNGECGDLLKACNNDSELLKFYRSRSRCGIINDPSNSSFLECHGVVNVTAYYRTCLFRLCQSGGNESELCDSVARYASACKNADVEVGPWRTYDFCPLECPENSHFEECITCTETCETLTLGPICVDSCSEGCQCDEGYALLGSQCVTRSECGCNFEGHQLATNETFWVDLDCQIFCYCSGTDNRVHCETIPCKDDEYCMEEGGLYYCQARTDASCIVSGYGHYLTFDGFPFDFQTSCPLILCTTGSRPSSDSFPKFVVTAKNEDRDPSLALWVKQVDVTVFGYSIVIHRAYKHTVLVNSERLYLPLKLGQGKINIFSFGFHVVVETDFGLKVVYDWKTFLSITVPRSMQNSTYGLCGRYNGNPDDDLEMPMGLLASSVNEFGQSWVKRDTFCQVGCGDRCPSCAKVEGFSKVQQLCSLIPNQNAAFSKCHSKVNPTFFYKNCLFDSCIDGGAVQTACSWLQNYASTCQTQGITVTGWRNYTSCTVTCPPNSHYESCVSVCQPRCAAIRLKSDCSHYCVEGCHCDAGYVLNGKSCILPHSCGCYSDGKYYEPKQLFWNSDCTRRCRCFRRNVIQCDPRQCKSDEECALRNGVRGCFSTKTSYCLAAGGGVFRTFDGAFLRFPANCAFVLSTICQKLPDISFQLIINFDKWSAPNLTIISPVYFYINEEQILINDRNTVKVNGTQVNVPFITGLATKIYSSEGFLVIDTSPDIQIYYNGFNVIKISISERLQNKVCGLCGNFNGDLTDDYVTLRGKPVVSSVVLAQSWKTNGMQKRPLAPSCNELQFSQYAAMCDNVHIQKMQGDGYCLKLTDMKGFFQPCYGLLDPLPFYESCYLDGCYSHKKFQLCGSLAAYGEACRSFGILSTEWIEKENCSGVVEDPCVGADCPNRTCELGNGRELCGCIEPPPYGNNSHDIIDAEVTCKAAQMEVSISKCKLFQLGFEREGVRINDRQCTGIEGEDFISFQINNTKGNCGNIVQSNGTHIMYKNTLWIESANNTGNIITRDRTINVEFSCAYELDIKISLDSVVKPMLSVINLTVPTQEGSFITKMALYKNASYKHPYRQGEVVLTTRDVLYVGVFVVGADATHLILTLNKCYATPTRDSNDKLRYFIIEGGCQNLKDNTIGIEENAVSLTCRFHVTVFKFIGDYDEVHLHCAVSLCDSEKYSCKITCPHNSRIATDYTKEPKEQIISVGPIRRKRLDWCEDNGGCEQICTSRVDGPLCSCVTGTLQEDGKSCRASNSSMELQVWTLLLIMIQISLWHFVYKSGTTS

SEQ ID NO: 87525 - protein, 2155 aa, Homo sapiens; identical to SEQ ID NO: 87524
  Payload ID: 17512
  Gene Symbol: TECTA
  Gene Name: tectorin alpha
  Uniprot ID: O75443
  ENSP ID: ENSP00000376543

SEQ ID NO: 87526 - protein, 329 aa, Homo sapiens
  Payload ID: 17513
  Gene Symbol: TECTB
  Gene Name: tectorin beta
  Uniprot ID: Q96PL2
  ENSP ID: ENSP00000358430
MVTKAFVLLAIFAEASAKSCAPNKADVILVFCYPKTIITKIPECPYGWEVHQLALGGLCYNGVHEGGYYQFVIPDLSPKNKSYCGTQSEYKPPIYHFYSHIVSNDTTVIVKNQPVNYSFSCTYHSTYLVNQAAFDQRVATVHVKNGSMGTFESQLSLNFYTNAKFSIKKEAPFVLEASEIGSDLFAGVEAKGLSIRFKVVLNSCWATPSADFMYPLQWQLINKGCPTDETVLVHENGRDHRATFQFNAFRFQNIPKLSKVWLHCETFICDSEKLSCPVTCDKRKRLLRDQTGGVLVVELSLRSRGFSSLYSFSDVLHHLIMMLGICAVL

SEQ ID NO: 87527 - protein, 1124 aa, Homo sapiens
  Payload ID: 17514
  Gene Symbol: TEK
  Gene Name: TEK tyrosine kinase, endothelial
  Uniprot ID: Q02763
  ENSP ID: ENSP00000369375
MDSLASLVLCGVSLLLSGTVEGAMDLILINSLPLVSDAETSLTCIASGWRPHEPITIGRDFEALMNQHQDPLEVTQDVTREWAKKVVWKREKASKINGAYFCEGRVRGEAIRIRTMKMRQQASFLPATLTMTVDKGDNVNISFKKVLIKEEDAVIYKNGSFIHSVPRHEVPDILEVHLPHAQPQDAGVYSARYIGGNLFTSAFTRLIVRRCEAQKWGPECNHLCTACMNNGVCHEDTGECICPPGFMGRTCEKACELHTFGRTCKERCSGQEGCKSYVFCLPDPYGCSCATGWKGLQCNEACHPGFYGPDCKLRCSCNNGEMCDRFQGCLCSPGWQGLQCEREGIQRMTPKIVDLPDHIEVNSGKFNPICKASGWPLPTNEEMTLVKPDGTVLHPKDFNHTDHFSVAIFTIHRILPPDSGVWVCSVNTVAGMVEKPFNISVKVLPKPLNAPNVIDTGHNFAVINISSEPYFGDGPIKSKKLLYKPVNHYEAWQHIQVTNEIVTLNYLEPRTEYELCVQLVRRGEGGEGHPGPVRRFTTASIGLPPPRGLNLLPKSQTTLNLTWQPIFPSSEDDFYVEVERRSVQKSDQQNIKVPGNLTSVLLNNLHPREQYVVRARVNTKAQGEWSEDLTAWTLSDILPPQPENIKISNITHSSAVISWTILDGYSISSITIRYKVQGKNEDQHVDVKIKNATITQYQLKGLEPETAYQVDIFAENNIGSSNPAFSHELVTLPESQAPADLGGGKMLLIAILGSAGMTCLTVLLAFLIILQLKRANVQRRMAQAFQNVREEPAVQFNSGTLALNRKVKNNPDPTIYPVLDWNDIKFQDVIGEGNFGQVLKARIKKDGLRMDAAIKRMKEYASKDDHRDFAGELEVLCKLGHHPNIINLLGACEHRGYLYLAIEYAPHGNLLDFLRKSRVLETDPAFAIANSTASTLSSQQLLHFAADVARGMDYLSQKQFIHRDLAARNILVGENYVAKIADFGLSRGQEVYVKKTMGRLPVRWMAIESLNYSVYTTNSDVWSYGVLLWEIVSLGGTPYCGMTCAELYEKLPQGYRLEKPLNCDDEVYDLMRQCWREKPYERPSFAQILVSLNRMLEERKTYVNTTLYEKFTYAGIDCSAEEAA

SEQ ID NO: 87528 - protein, 1081 aa, Homo sapiens
  Payload ID: 17514
  Gene Symbol: TEK
  Gene Name: TEK tyrosine kinase, endothelial
  Uniprot ID: Q02763
  ENSP ID: ENSP00000383977
MDSLASLVLCGVSLLLSGTVEGAMDLILINSLPLVSDAETSLTCIASGWRPHEPITIGRDFEALMNQHQDPLEVTQDVTREWAKKVVWKREKASKINGAYFCEGRVRGEAIRIRTMKMRQQASFLPATLTMTVDKGDNVNISFKKVLIKEEDAVIYKNGSFIHSVPRHEVPDILEVHLPHAQPQDAGVYSARYIGGNLFTSAFTRLIVRRCEAQKWGPECNHLCTACMNNGVCHEDTGECICPPGFMGRTCEKACELHTFGRTCKERCSGQEGCKSYVFCLPDPYGCSCATGWKGLQCNEGIQRMTPKIVDLPDHIEVNSGKFNPICKASGWPLPTNEEMTLVKPDGTVLHPKDFNHTDHFSVAIFTIHRILPPDSGVWVCSVNTVAGMVEKPFNISVKVLPKPLNAPNVIDTGHNFAVINISSEPYFGDGPIKSKKLLYKPVNHYEAWQHIQVTNEIVTLNYLEPRTEYELCVQLVRRGEGGEGHPGPVRRFTTASIGLPPPRGLNLLPKSQTTLNLTWQPIFPSSEDDFYVEVERRSVQKSDQQNIKVPGNLTSVLLNNLHPREQYVVRARVNTKAQGEWSEDLTAWTLSDILPPQPENIKISNITHSSAVISWTILDGYSISSITIRYKVQGKNEDQHVDVKIKNATITQYQLKGLEPETAYQVDIFAENNIGSSNPAFSHELVTLPESQAPADLGGGKMLLIAILGSAGMTCLTVLLAFLIILQLKRANVQRRMAQAFQNVREEPAVQFNSGTLALNRKVKNNPDPTIYPVLDWNDIKFQDVIGEGNFGQVLKARIKKDGLRMDAAIKRMKEYASKDDHRDFAGELEVLCKLGHHPNIINLLGACEHRGYLYLAIEYAPHGNLLDFLRKSRVLETDPAFAIANSTASTLSSQQLLHFAADVARGMDYLSQKQFIHRDLAARNILVGENYVAKIADFGLSRGQEVYVKKTMGRLPVRWMAIESLNYSVYTTNSDVWSYGVLLWEIVSLGGTPYCGMTCAELYEKLPQGYRLEKPLNCDDEVYDLMRQCWREKPYERPSFAQILVSLNRMLEERKTYVNTTLYEKFTYAGIDCSAEEAA

SEQ ID NO: 87529 - protein, 468 aa, Homo sapiens
  Payload ID: 17514
  Gene Symbol: TEK
  Gene Name: TEK tyrosine kinase, endothelial
  ENSP ID: ENSP00000428337
MDSLASLVLCGVSLLLSVPRHEVPDILEVHLPHAQPQDAGVYSARYIGGNLFTSAFTRLIVRRCEAQKWGPECNHLCTACMNNGVCHEDTGECICPPGFMGRTCEKACELHTFGRTCKERCSGQEGCKSYVFCLPDPYGCSCATGWKGLQCNEGIQRMTPKIVDLPDHIEVNSGKFNPICKASGWPLPTNEEMTLVKPDGTVLHPKDFNHTDHFSVAIFTIHRILPPDSGVWVCSVNTVAGMVEKPFNISVKVLPKPLNAPNVIDTGHNFAVINISSEPYFGDGPIKSKKLLYKPVNHYEAWQHIQVTNEIVTLNYLEPRTEYELCVQLVRRGEGGEGHPGPVRRFTTASIGLPPPRGLNLLPKSQTTLNLTWQPIFPSSEDDFYVEVERRSVQKSDQQNIKVPGNLTSVLLNNLHPREQYVVRARVNTKAQGEWSEDLTAWTLSDILPPQPENIKISNITHSSAVIS

SEQ ID NO: 87530 - protein, 976 aa, Homo sapiens
  Payload ID: 17514
  Gene Symbol: TEK
  Gene Name: TEK tyrosine kinase, endothelial
  Uniprot ID: Q02763
  ENSP ID: ENSP00000430686
MDSLASLVLCGVSLLLSASFLPATLTMTVDKGDNVNISFKKVLIKEEDAVIYKNGSFIHSVPRHEVPDILEVHLPHAQPQDAGVYSARYIGGNLFTSAFTRLIVRRCEAQKWGPECNHLCTACMNNGVCHEDTGECICPPGFMGRTCEKACELHTFGRTCKERCSGQEGCKSYVFCLPDPYGCSCATGWKGLQCNEGIQRMTPKIVDLPDHIEVNSGKFNPICKASGWPLPTNEEMTLVKPDGTVLHPKDFNHTDHFSVAIFTIHRILPPDSGVWVCSVNTVAGMVEKPFNISVKVLPKPLNAPNVIDTGHNFAVINISSEPYFGDGPIKSKKLLYKPVNHYEAWQHIQVTNEIVTLNYLEPRTEYELCVQLVRRGEGGEGHPGPVRRFTTASIGLPPPRGLNLLPKSQTTLNLTWQPIFPSSEDDFYVEVERRSVQKSDQQNIKVPGNLTSVLLNNLHPREQYVVRARVNTKAQGEWSEDLTAWTLSDILPPQPENIKISNITHSSAVISWTILDGYSISSITIRYKVQGKNEDQHVDVKIKNATITQYQLKGLEPETAYQVDIFAENNIGSSNPAFSHELVTLPESQAPADLGGGKMLLIAILGSAGMTCLTVLLAFLIILQLKRANVQRRMAQAFQNREEPAVQFNSGTLALNRKVKNNPDPTIYPVLDWNDIKFQDVIGEGNFGQVLKARIKKDGLRMDAAIKRMKEYASKDDHRDFAGELEVLCKLGHHPNIINLLGACEHRGYLYLAIEYAPHGNLLDFLRKSRVLETDPAFAIANSTASTLSSQQLLHFAADVARGMDYLSQKQFIHRDLAARNILVGENYVAKIADFGLSRGQEVYVKKTMGRLPVRWMAIESLNYSVYTTNSDVWSYGVLLWEIVSLGGTPYCGMTCAELYEKLPQGYRLEKPLNCDDEVYDLMRQCWREKPYERPSFAQILVSLNRMLEERKTYVNTTLYEKFTYAGIDCSAEEAA

SEQ ID NO: 87531 - protein, 468 aa, Homo sapiens
  Payload ID: 17514
  Gene Symbol: TEK
  Gene Name: TEK tyrosine kinase, endothelial
  ENSP ID: ENSP00000480251
MDSLASLVLCGVSLLLSGTVEGAMDLILINSLPLVSDAETSLTCIASGWRPHEPITIGRDFEALMNQHQDPLEVTQDVTREWAKKVVWKREKASKINGAYFCEGRVRGEAIRIRTMKMRQQASFLPATLTMTVDKGDNVNISFKKVLIKEEDAVIYKNGSFIHSVPRHEVPDILEVHLPHAQPQDAGVYSARYIGGNLFTSAFTRLIVRRCEAQKWGPECNHLCTACMNNGVCHEDTGECICPPGFMGRTCEKACELHTFGRTCKERCSGQEGCKSYVFCLPDPYGCSCATGWKGLQCNEGIQRMTPKIVDLPDHIEVNSGKFNPICKASGWPLPTNEEMTLVKPDGTVLHPKDFNHTDHFSVAIFTIHRILPPDSGVWVCSVNTVAGMVEKPFNISVKVLPKPLNAPNVIDTGHNFAVINISSEPYFGDGPIKSKKLLYKPVNHYEAWQHIQVSMEKQRLTKANSDK

SEQ ID NO: 87532 - protein, 418 aa, Homo sapiens
  Payload ID: 17515
  Gene Symbol: TEKT1
  Gene Name: tektin 1
  Uniprot ID: Q969V4
  ENSP ID: ENSP00000341346
MAKLLQPPPKFLPSEWHIANKNQYHRADAQRSRSERLVAESQRLVDEIEKTTRKSQSDVNKKLEQRLEEVQFWKKELDDKLEQLVNVTDDLLIYKIRLEKALETLKEPLHITETCLAYREKRIGIDLVHDTVEHELIKEAEIIQGIMALLTRTLEEASEQIRMNRSAKYNLEKDLKDKFVALTIDDICFSLNNNSPNIRYSENAVRIEPNSVSLEDWLDFSSTNVEKADKQRNNSLMLKALVDRILSQTANDLRKQCDVVDTAFKNGLKDTKDARDKLADHLAKVMEEIASQEKNITALEKAILDQEGPAKVAHTRLETRTHRPNVELCRDVAQYRLMKEVQEITHNVARLKETLAQAQAELKGLHRRQLALQEEIQVKENTIYIDEVLCMQMRKSIPLRDGEDHGVWAGGLRPDAVC

SEQ ID NO: 87533 - protein, 144 aa, Homo sapiens
  Payload ID: 17515
  Gene Symbol: TEKT1
  Gene Name: tektin 1
  ENSP ID: ENSP00000458518
  MOD_RES (1)..(1): Any amino acid
XRIEPNSVSLEDWLDFSSTNVEKADKQRNNSLMLKALVDRILSQTANDLRKQCDVVDTAFKNGLKDTKDARDKLADHLAKIEGNFSPSSGRAERAASQTACPAGGDPGQREHHLYRRSAVYADEEIHPTSGWGRPWGLGWGPPP

SEQ ID NO: 87534 - protein, 64 aa, Homo sapiens
  Payload ID: 17515
  Gene Symbol: TEKT1
  Gene Name: tektin 1
  ENSP ID: ENSP00000460197
TNVEKADKQRNNSLMLKALVDRILSQTANDLRKQCDVVDTAFKNGLKDTKDARDKLADHLAKRS

SEQ ID NO: 87535 - protein, 80 aa, Homo sapiens
  Payload ID: 17515
  Gene Symbol: TEKT1
  Gene Name: tektin 1
  ENSP ID: ENSP00000460359
MAKLLQPPPKFLPSEWHIANKNQYHRADAQRSRSERLVAESQRLVDEIEKTTRKSQSDVNKKLGRSALALTWCTTQWSMS

SEQ ID NO: 87536 - protein, 430 aa, Homo sapiens
  Payload ID: 17516
  Gene Symbol: TEKT2
  Gene Name: tektin 2 (testicular)
  Uniprot ID: Q9UIF3
  ENSP ID: ENSP00000207457
MATLSVKPSRRFQLPDWHTNSYLLSTNAQLQRDASHQIRQEARVLRNETNNQTIWDEHDNRTRLVERIDTVNRWKEMLDKCLTDLDAEIDALTQMKESAEQNLQAKNLPLDVAIECLTLRESRRDIDVVKDPVEDELHKEVEVIEATKKALQQKVSQAFEQLCLLQEVQQQLNSDHRGKMETLEIDRGCLSLNLRSPNISLKVDPTRVPDGSTTLQQWDDFSRFNKDRAEAEMKAATELREATALTIAETNNELEAQRVATEFAFRKRLREMEKVYSELKWQEKNTLEEIAELQEDIRHLEEDLRTKLLSLKLSHTRLEARTYRPNVELCRDQAQYGLTDEVHQLEATIAALKQKLAQAQDALDALCKHLARLQADIACKANSMLLDTKCMDTRRKLTVPAERFVPEVDTFTRTTNSTLSPLKSCQLELA

SEQ ID NO: 87537 - protein, 96 aa, Homo sapiens
  Payload ID: 17516
  Gene Symbol: TEKT2
  Gene Name: tektin 2 (testicular)
  ENSP ID: ENSP00000432793
  MOD_RES (1)..(1): Any amino acid
XRKRLREMEKVYSELKWQEKNTLEEIAELQEDIRHLEEDLRTKLLSLKLSHTRLEARTYRPNVELCRDQAQYGLTDEVHQLEATIAALKQKLAQAQ

SEQ ID NO: 87538 - protein, 108 aa, Homo sapiens
  Payload ID: 17516
  Gene Symbol: TEKT2
  Gene Name: tektin 2 (testicular)
  ENSP ID: ENSP00000434183
MATLSVKPSRRFQLPDWHTNSYLLSTNAQLQRDASHQIRQEARVLRNETNNQTIWDEHDNRTRLVERIDTVNRWKEMLDKCLTDLDAEIDALTQRRGFTILARLFSNS

SEQ ID NO: 87539 - protein, 490 aa, Homo sapiens
  Payload ID: 17517
  Gene Symbol: TEKT3
  Gene Name: tektin 3
  Uniprot ID: Q9BXF9
  ENSP ID: ENSP00000343995
MERVGCTLTTTYAHPRPTPTNFLPAISTMASSYRDRFPHSNLTHSLSLPWRPSTYYKVASNSPSVAPYCTRSQRVSENTMLPFVSNRTTFFTRYTPDDWYRSNLTNYQESNTSRHNSEKLRVDTSRLIQDKYQQTRKTQADTTQNLGERVNDIGFWKSEIIHELDEMIGETNALTDVKKRLERALMETEAPLQVARECLFHREKRMGIDLVHDEVEAQLLTEVDTILCCQERMKLHLDKAIAQLAANRASQHELEKDLSDKQTAYRIDDKCHHLRNTSDGVGYFRGVERVDATVSVPESWAKFTDDNILRSQSERAASAKLRDDIENLLVVTANEMWNQFNKVNLSFTNRIAETADAKNKIQTHLAKTLQEIFQTEMTIESIKKAIKDKTAFLKVAQTRLDERTRRPNIELCRDMAQLRLVNEVHEVDDTIQTLQQRLRDAEDTLQSLVHIKATLEYDLAVKANSLYIDQEKCMSMRKSYPNTLRLVGFC

SEQ ID NO: 87540 - protein, 490 aa, Homo sapiens; identical to SEQ ID NO: 87539
  Payload ID: 17517
  Gene Symbol: TEKT3
  Gene Name: tektin 3
  Uniprot ID: Q9BXF9
  ENSP ID: ENSP00000379263

SEQ ID NO: 87541 - protein, 225 aa, Homo sapiens
  Payload ID: 17517
  Gene Symbol: TEKT3
  Gene Name: tektin 3
  ENSP ID: ENSP00000379264
MERVGCTLTTTYAHPRPTPTNFLPAISTMASSYRDRFPHSNLTHSLSLPWRPSTYYKVASNSPSVAPYCTRSQRVSENTMLPFVSNRTTFFTRYTPDDWYRSNLTNYQESNTSRHNSEKLRVDTSRLIQDKYQQTRKTQADTTQNLGERVNDIGFWKSEIIHELDEMIGETNALTDVKKRLERALMETEAPLQVARECLFHREKRMGIDLVHDEVEAQLLTDIVT

SEQ ID NO: 87542 - protein, 140 aa, Homo sapiens
  Payload ID: 17517
  Gene Symbol: TEKT3
  Gene Name: tektin 3
  ENSP ID: ENSP00000439713
MERVGCTLTTTYAHPRPTPTNFLPAISTMASSYRDRFPHSNLTHSLSLPWRPSTYYKVASNSPSVAPYCTRSQRVSENTMLPFVSNRTTFFTRYTPDDWYRSNLTNYQESNTSRHNSEKLRVDTSRLIQDKYQQTRKTQA

SEQ ID NO: 87543 - protein, 193 aa, Homo sapiens
  Payload ID: 17517
  Gene Symbol: TEKT3
  Gene Name: tektin 3
  ENSP ID: ENSP00000443280
MIGETNALTDVKKRLERALMETEAPLQVARECLFHREKRMGIDLVHDEVEAQLLTEVDTILCCQERMKLHLDKAIAQLAANRASQHELEKDLSDKQTAYRIDDKCHHLRNTSDGVGYFRGVERVDATVSVPESWAKFTDDNILRSQSERAASAKLRDDIENLLVVTANEMWNQFNKVNLSFTNRIAETADAKN

SEQ ID NO: 87544 - protein, 82 aa, Homo sapiens
  Payload ID: 17517
  Gene Symbol: TEKT3
  Gene Name: tektin 3
  ENSP ID: ENSP00000444180
MERVGCTLTTTYAHPRPTPTNFLPAISTMASSYRDRFPHSNLTHSLSLPWRPSTYYKVASNSPSVAPYCTRSQRVSENTMLP

SEQ ID NO: 87545 - protein, 147 aa, Homo sapiens
  Payload ID: 17517
  Gene Symbol: TEKT3
  Gene Name: tektin 3
  ENSP ID: ENSP00000446111
MERVGCTLTTTYAHPRPTPTNFLPAISTMASSYRDRFPHSNLTHSLSLPWRPSTYYKVASNSPSVAPYCTRSQRVSENTMLPFVSNRTTFFTRYTPDDWYRSNLTNYQESNTSRHNSEKLRVDTSRLIQDKYQQTRKTQADTTQNLG

SEQ ID NO: 87546 - protein, 435 aa, Homo sapiens
  Payload ID: 17518
  Gene Symbol: TEKT4
  Gene Name: tektin 4
  Uniprot ID: Q8WW24
  ENSP ID: ENSP00000295201
MAQTVPPCELPCKEYDVARNTGAYTSSGLATASFRTSKYLLEEWFQNCYARYHQAFADRDQSERQRHESQQLATETQALAQRTQQDSTRTVGERLQDTHSWKSELQREMEALAAETNLLLAQKQRLERALDATEVPFSITTDNLQCRERREHPNLVRDHVETELLKEAELIRNIQELLKRTIMQAVSQIRLNREHKETCEMDWSDKMEAYNIDETCGRHHSQSTEVQAHPYSTTFQESASTPETRAKFTQDNLCRAQRERLASANLRVLVDCILRDTSEDLRLQCDAVNLAFGRRCEELEDARYKLHHHLHKTLREITDQEHNVAALKQAIKDKEAPLHVAQTRLYLRSHRPNMELCRDAAQFRLLSEVEELNMSLTALREKLLEAEQSLRNLEDIHMSLEKDIAAMTNSLFIDRQKCMAHRTRYPTILQLAGYQ

SEQ ID NO: 87547 - protein, 485 aa, Homo sapiens
  Payload ID: 17519
  Gene Symbol: TEKT5
  Gene Name: tektin 5
  Uniprot ID: Q96M29
  ENSP ID: ENSP00000283025
MEFLGTTQTASYCGPKKCCGLTSLPAVQAPVIQECYQPYYLPGYRYLNSWRPSLFYKIANVQTCPDESTSTLRPPTILPTLRSALFSRYSPHDWDQSNQLQVRGAEASRLWASRLTDDSMRLLQDKDQLTHQMQEGTCRNLGQRLSDIGFWKSELSYELDRLLTENQNLETVKRRLECAANEVNCPLQVALECLYHREKRIGIDLVHDNVEKNLIREVDLLKCCQEQMRKLAQRIDIQMRDNRDAQHVLERDLEDKSSAQCIDEKCFNLRNTSDCISFFHGMEKIDGTISVPETWAKFSNDNIKHSQNMRANSIQLREEAEHLFETLSDQMWRQFTDTNLAFNARISEVTDVKNKLQTQLAKTLQEIFQAENTIMLLERSIMAKEGPLKVAQTRLECRTRRPNMELCRDIPQLKLVNEVFTIDDTLQTLKLRLRETQDTLQLLVMTKCRLEHELAIKANTLCIDKEKCMGMRKTFPCTPRLVGHT

SEQ ID NO: 87548 - protein, 186 aa, Homo sapiens
  Payload ID: 17519
  Gene Symbol: TEKT5
  Gene Name: tektin 5
  ENSP ID: ENSP00000458802
MRKLAQRIDIQMRDNRDAQHVLERDLEDKSSAQCIDEKCFNLRNTSDCISFFHGMEKIDGTISVPETWAKFSNDNIKHSQNMRANSIQLREEAEHLFETLSDQMWRQFTDTNLAFNARISEVTDVKNKLQTQLAKTLQEIFQAENTIMLLERSIMAKEGPLKVAQTRLECRTRRPNMELCRDIPQL

SEQ ID NO: 87549 - protein, 1089 aa, Homo sapiens
  Payload ID: 17520
  Gene Symbol: TTI1
  Gene Name: TELO2 interacting protein 1
  Uniprot ID: O43156
  ENSP ID: ENSP00000362546
MAVFDTPEEAFGVLRPVCVQLTKTQTVENVEHLQTRLQAVSDSALQELQQYILFPLRFTLKTPGPKRERLIQSVVECLTFVLSSTCVKEQELLQELFSELSACLYSPSSQKPAAVSEELKLAVIQGLSTLMHSAYGDIILTFYEPSILPRLGFAVSLLLGLAEQEKSKQIKIAALKCLQVLLLQCDCQDHPRSLDELEQKQLGDLFASFLPGISTALTRLITGDFKQGHSIVVSSLKIFYKTVSFIMADEQLKRISKVQAKPAVEHRVAELMVYREADWVKKTGDKLTILIKKIIECVSVHPHWKVRLELVELVEDLLLKCSQSLVECAGPLLKALVGLVNDESPEIQAQCNKVLRHFADQKVVVGNKALADILSESLHSLATSLPRLMNSQDDQGKFSTLSLLLGYLKLLGPKINFVLNSVAHLQRLSKALIQVLELDVADIKIVEERRWNSDDLNASPKTSATQPWNRIQRRYFRFFTDERIFMLLRQVCQLLGYYGNLYLLVDHFMELYHQSVVYRKQAAMILNELVTGAAGLEVEDLHEKHIKTNPEELREIVTSILEEYTSQENWYLVTCLETEEMGEELMMEHPGLQAITSGEHTCQVTSFLAFSKPSPTICSMNSNIWQICIQLEGIGQFAYALGKDFCLLLMSALYPVLEKAGDQTLLISQVATSTMMDVCRACGYDSLQHLINQNSDYLVNGISLNLRHLALHPHTPKVLEVMLRNSDANLLPLVADVVQDVLATLDQFYDKRAASFVSVLHALMAALAQWFPDTGNLGHLQEQSLGEEGSHLNQRPAALEKSTTTAEDIEQFLLNYLKEKDVADGNVSDFDNEEEEQSVPPKVDENDTRPDVEPPLPLQIQIAMDVMERCIHLLSDKNLQIRLKVLDVLDLCVVVLQSHKNQLLPLAHQAWPSLVHRLTRDAPLAVLRAFKVLRTLGSKCGDFLRSRFCKDVLPKLAGSLVTQAPISARAGPVYSHTLAFKLQLAVLQGLGPLCERLDLGEGDLNKVADACLIYLSVKQPVKLQEAARSVFLHLMKVDPDSTWFLLNELYCPVQFTPPHPSLHPVQLHGASGQQNPYTTNVLQLLKELQ

SEQ ID NO: 87550 - protein, 1089 aa, Homo sapiens; identical to SEQ ID NO: 87549
  Payload ID: 17520
  Gene Symbol: TTI1
  Gene Name: TELO2 interacting protein 1
  Uniprot ID: O43156
  ENSP ID: ENSP00000362547

SEQ ID NO: 87551 - protein, 1089 aa, Homo sapiens; identical to SEQ ID NO: 87549
  Payload ID: 17520
  Gene Symbol: TTI1
  Gene Name: TELO2 interacting protein 1
  Uniprot ID: O43156
  ENSP ID: ENSP00000407270

SEQ ID NO: 87552 - protein, 32 aa, Homo sapiens
  Payload ID: 17520
  Gene Symbol: TTI1
  Gene Name: TELO2 interacting protein 1
  ENSP ID: ENSP00000477545
  MOD_RES (1)..(1): Any amino acid
XQFLLNYLKEKDVADGNVSDFDNEEGNLFILA

SEQ ID NO: 87553 - protein, 508 aa, Homo sapiens
  Payload ID: 17521
  Gene Symbol: TTI2
  Gene Name: TELO2 interacting protein 2
  Uniprot ID: Q6NXR4
  ENSP ID: ENSP00000353971
MELDSALEAPSQEDSNLSEELSHSAFGQAFSKILHCLARPEARRGNVKDAVLKDLGDLIEATEFDRLFEGTGARLRGMPETLGQVAKALEKYAAPSKEEEGGGDGHSEAAEKAAQVGLLFLKLLGKVETAKNSLVGPAWQTGLHHLAGPVYIFAITHSLEQPWTTPRSREVAREVLTSLLQVTECGSVAGFLHGENEDEKGRLSVILGLLKPDLYKESWKNNPAIKHVFSWTLQQVTRPWLSQHLERVLPASLVISDDYQTENKILGVHCLHHIVLNVPAADLLQYNRAQVLYHAISNHLYTPEHHLIQAVLLCLLDLFPILEKTLHWKGDGARPTTHCDEVLRLILTHMEPEHRLLLRRTYARNLPAFVNRLGILTVRHLKRLERVIIGYLEVYDGPEEEARLKILETLKLLMQHTWPRVSCRLVVLLKALLKLICDVARDPNLTPESVKSALLQEATDCLILLDRCSQGRVKGLLAKIPQSCEDRKVVNYIRKVQQVSEGAPYNGT

SEQ ID NO: 87554 - protein, 508 aa, Homo sapiens; identical to SEQ ID NO: 87553
  Payload ID: 17521
  Gene Symbol: TTI2
  Gene Name: TELO2 interacting protein 2
  Uniprot ID: Q6NXR4
  ENSP ID: ENSP00000411169

SEQ ID NO: 87555 - protein, 477 aa, Homo sapiens
  Payload ID: 17521
  Gene Symbol: TTI2
  Gene Name: TELO2 interacting protein 2
  ENSP ID: ENSP00000428401
MELDSALEAPSQEDSNLSEELSHSAFGQAFSKILHCLARPEARRGNVKDAVLKDLGDLIEATEFDRLFEGTGARLRGMPETLGQVAKALEKYAAPSKEEEGGGDGHSEAAEKAAQVGLLFLKLLGKVETAKNSLVGPAWQTGLHHLAGPVYIFAITHSLEQPWTTPRSREVAREVLTSLLQVTECGSVAGFLHGENEDEKGRLSVILGLLKPDLYKESWKNNPAIKHVFSWTLQQVTRPWLSQHLERVLPASLVISDDYQTENKILGVHCLHHIVLNVAVLLCLLDLFPILEKTLHWKGDGARPTTHCDEVLRLILTHMEPEHRLLLRRTYARNLPAFVNRLGILTVRHLKRLERVIIGYLEVYDGPEEEARLKILETLKLLMQHTWPRVSCRLVVLLKALLKLICDVARDPNLTPESVKSALLQEATDCLILLDRCSQGRVKGLLAKIPQSCEDRKVVNYIRKVQQVSEGAPYNGT

SEQ ID NO: 87556 - protein, 101 aa, Homo sapiens
  Payload ID: 17521
  Gene Symbol: TTI2
  Gene Name: TELO2 interacting protein 2
  ENSP ID: ENSP00000428569
MELDSALEAPSQEDSNLSEELSHSAFGQAFSKILHCLARPEARRGNVKDAVLKDLGDLIEATEFDRLFEGTGARLRGMPETLGQVAKALEKYAAPSKEEEG

SEQ ID NO: 87557 - protein, 508 aa, Homo sapiens; identical to SEQ ID NO: 87553
  Payload ID: 17521
  Gene Symbol: TTI2
  Gene Name: TELO2 interacting protein 2
  Uniprot ID: Q6NXR4
  ENSP ID: ENSP00000478396

SEQ ID NO: 87558 - protein, 1132 aa, Homo sapiens
  Payload ID: 17522
  Gene Symbol: TERT
  Gene Name: telomerase reverse transcriptase
  Uniprot ID: O14746
  ENSP ID: ENSP00000309572
MPRAPRCRAVRSLLRSHYREVLPLATFVRRLGPQGWRLVQRGDPAAFRALVAQCLVCVPWDARPPPAAPSFRQVSCLKELVARVLQRLCERGAKNVLAFGFALLDGARGGPPEAFTTSVRSYLPNTVTDALRGSGAWGLLLRRVGDDVLVHLLARCALFVLVAPSCAYQVCGPPLYQLGAATQARPPPHASGPRRRLGCERAWNHSVREAGVPLGLPAPGARRRGGSASRSLPLPKRPRRGAAPEPERTPVGQGSWAHPGRTRGPSDRGFCVVSPARPAEEATSLEGALSGTRHSHPSVGRQHHAGPPSTSRPPRPWDTPCPPVYAETKHFLYSSGDKEQLRPSFLLSSLRPSLTGARRLVETIFLGSRPWMPGTPRRLPRLPQRYWQMRPLFLELLGNHAQCPYGVLLKTHCPLRAAVTPAAGVCAREKPQGSVAAPEEEDTDPRRLVQLLRQHSSPWQVYGFVRACLRRLVPPGLWGSRHNERRFLRNTKKFISLGKHAKLSLQELTWKMSVRDCAWLRRSPGVGCVPAAEHRLREEILAKFLHWLMSVYVVELLRSFFYVTETTFQKNRLFFYRKSVWSKLQSIGIRQHLKRVQLRELSEAEVRQHREARPALLTSRLRFIPKPDGLRPIVNMDYVVGARTFRREKRAERLTSRVKALFSVLNYERARRPGLLGASVLGLDDIHRAWRTFVLRVRAQDPPPELYFVKVDVTGAYDTIPQDRLTEVIASIIKPQNTYCVRRYAVVQKAAHGHVRKAFKSHVSTLTDLQPYMRQFVAHLQETSPLRDAVVIEQSSSLNEASSGLFDVFLRFMCHHAVRIRGKSYVQCQGIPQGSILSTLLCSLCYGDMENKLFAGIRRDGLLLRLVDDFLLVTPHLTHAKTFLRTLVRGVPEYGCVVNLRKTVVNFPVEDEALGGTAFVQMPAHGLFPWCGLLLDTRTLEVQSDYSSYARTSIRASLTFNRGFKAGRNMRRKLFGVLRLKCHSLFLDLQVNSLQTVCTNIYKILLLQAYRFHACVLQLPFHQQVWKNPTFFLRVISDTASLCYSILKAKNAGMSLGAKGAAGPLPSEAVQWLCHQAFLLKLTRHRVTYVPLLGSLRTAQTQLSRKLPGTTLTALEAAANPALPSDFKTILD

SEQ ID NO: 87559 - protein, 1069 aa, Homo sapiens
  Payload ID: 17522
  Gene Symbol: TERT
  Gene Name: telomerase reverse transcriptase
  Uniprot ID: O14746
  ENSP ID: ENSP00000334346
MPRAPRCRAVRSLLRSHYREVLPLATFVRRLGPQGWRLVQRGDPAAFRALVAQCLVCVPWDARPPPAAPSFRQVSCLKELVARVLQRLCERGAKNVLAFGFALLDGARGGPPEAFTTSVRSYLPNTVTDALRGSGAWGLLLRRVGDDVLVHLLARCALFVLVAPSCAYQVCGPPLYQLGAATQARPPPHASGPRRRLGCERAWNHSVREAGVPLGLPAPGARRRGGSASRSLPLPKRPRRGAAPEPERTPVGQGSWAHPGRTRGPSDRGFCVVSPARPAEEATSLEGALSGTRHSHPSVGRQHHAGPPSTSRPPRPWDTPCPPVYAETKHFLYSSGDKEQLRPSFLLSSLRPSLTGARRLVETIFLGSRPWMPGTPRRLPRLPQRYWQMRPLFLELLGNHAQCPYGVLLKTHCPLRAAVTPAAGVCAREKPQGSVAAPEEEDTDPRRLVQLLRQHSSPWQVYGFVRACLRRLVPPGLWGSRHNERRFLRNTKKFISLGKHAKLSLQELTWKMSVRDCAWLRRSPGVGCVPAAEHRLREEILAKFLHWLMSVYVVELLRSFFYVTETTFQKNRLFFYRKSVWSKLQSIGIRQHLKRVQLRELSEAEVRQHREARPALLTSRLRFIPKPDGLRPIVNMDYVVGARTFRREKRAERLTSRVKALFSVLNYERARRPGLLGASVLGLDDIHRAWRTFVLRVRAQDPPPELYFVKVDVTGAYDTIPQDRLTEVIASIIKPQNTYCVRRYAVVQKAAHGHVRKAFKSHVSTLTDLQPYMRQFVAHLQETSPLRDAVVIEQSSSLNEASSGLFDVFLRFMCHHAVRIRGKSYVQCQGIPQGSILSTLLCSLCYGDMENKLFAGIRRDGLLLRLVDDFLLVTPHLTHAKTFLSYARTSIRASLTFNRGFKAGRNMRRKLFGVLRLKCHSLFLDLQVNSLQTVCTNIYKILLLQAYRFHACVLQLPFHQQVWKNPTFFLRVISDTASLCYSILKAKNAGMSLGAKGAAGPLPSEAVQWLCHQAFLLKLTRHRVTYVPLLGSLRTAQTQLSRKLPGTTLTALEAAANPALPSDFKTILD

SEQ ID NO: 87560 - protein, 795 aa, Homo sapiens
  Payload ID: 17522
  Gene Symbol: TERT
  Gene Name: telomerase reverse transcriptase
  Uniprot ID: O14746
  ENSP ID: ENSP00000425003
MPRAPRCRAVRSLLRSHYREVLPLATFVRRLGPQGWRLVQRGDPAAFRALVAQCLVCVPWDARPPPAAPSFRQVSCLKELVARVLQRLCERGAKNVLAFGFALLDGARGGPPEAFTTSVRSYLPNTVTDALRGSGAWGLLLRRVGDDVLVHLLARCALFVLVAPSCAYQVCGPPLYQLGAATQARPPPHASGPRRRLGCERAWNHSVREAGVPLGLPAPGARRRGGSASRSLPLPKRPRRGAAPEPERTPVGQGSWAHPGRTRGPSDRGFCVVSPARPAEEATSLEGALSGTRHSHPSVGRQHHAGPPSTSRPPRPWDTPCPPVYAETKHFLYSSGDKEQLRPSFLLSSLRPSLTGARRLVETIFLGSRPWMPGTPRRLPRLPQRYWQMRPLFLELLGNHAQCPYGVLLKTHCPLRAAVTPAAGVCAREKPQGSVAAPEEEDTDPRRLVQLLRQHSSPWQVYGFVRACLRRLVPPGLWGSRHNERRFLRNTKKFISLGKHAKLSLQELTWKMSVRDCAWLRRSPGVGCVPAAEHRLREEILAKFLHWLMSVYVVELLRSFFYVTETTFQKNRLFFYRKSVWSKLQSIGIRQHLKRVQLRELSEAEVRQHREARPALLTSRLRFIPKPDGLRPIVNMDYVVGARTFRREKRAERLTSRVKALFSVLNYERARRPGLLGASVLGLDDIHRAWRTFVLRVRAQDPPPELYFVKDRLTEVIASIIKPQNTYCVRRYAVVQKAAHGHVRKAFKSHVLRPVPGDPAGLHPLHAALQPVLRRHGEQAVCGDSAGRAAPAFGG

SEQ ID NO: 87561 - protein, 807 aa, Homo sapiens
  Payload ID: 17522
  Gene Symbol: TERT
  Gene Name: telomerase reverse transcriptase
  Uniprot ID: O14746
  ENSP ID: ENSP00000426042
MPRAPRCRAVRSLLRSHYREVLPLATFVRRLGPQGWRLVQRGDPAAFRALVAQCLVCVPWDARPPPAAPSFRQVSCLKELVARVLQRLCERGAKNVLAFGFALLDGARGGPPEAFTTSVRSYLPNTVTDALRGSGAWGLLLRRVGDDVLVHLLARCALFVLVAPSCAYQVCGPPLYQLGAATQARPPPHASGPRRRLGCERAWNHSVREAGVPLGLPAPGARRRGGSASRSLPLPKRPRRGAAPEPERTPVGQGSWAHPGRTRGPSDRGFCVVSPARPAEEATSLEGALSGTRHSHPSVGRQHHAGPPSTSRPPRPWDTPCPPVYAETKHFLYSSGDKEQLRPSFLLSSLRPSLTGARRLVETIFLGSRPWMPGTPRRLPRLPQRYWQMRPLFLELLGNHAQCPYGVLLKTHCPLRAAVTPAAGVCAREKPQGSVAAPEEEDTDPRRLVQLLRQHSSPWQVYGFVRACLRRLVPPGLWGSRHNERRFLRNTKKFISLGKHAKLSLQELTWKMSVRDCAWLRRSPGVGCVPAAEHRLREEILAKFLHWLMSVYVVELLRSFFYVTETTFQKNRLFFYRKSVWSKLQSIGIRQHLKRVQLRELSEAEVRQHREARPALLTSRLRFIPKPDGLRPIVNMDYVVGARTFRREKRAERLTSRVKALFSVLNYERARRPGLLGASVLGLDDIHRAWRTFVLRVRAQDPPPELYFVKVDVTGAYDTIPQDRLTEVIASIIKPQNTYCVRRYAVVQKAAHGHVRKAFKSHVLRPVPGDPAGLHPLHAALQPVLRRHGEQAVCGDSAGRAAPAFGG

SEQ ID NO: 87562 - protein, 2627 aa, Homo sapiens
  Payload ID: 17523
  Gene Symbol: TEP1
  Gene Name: telomerase-associated protein 1
  Uniprot ID: Q99973
  ENSP ID: ENSP00000262715
MEKLHGHVSAHPDILSLENRCLAMLPDLQPLEKLHQHVSTHSDILSLKNQCLATLPDLKTMEKPHGYVSAHPDILSLENQCLATLSDLKTMEKPHGHVSAHPDILSLENRCLATLSSLKSTVSASPLFQSLQISHMTQADLYRVNNSNCLLSEPPSWRAQHFSKGLDLSTCPIALKSISATETAQEATLGRWFDSEEKKGAETQMPSYSLSLGEEEEVEDLAVKLTSGDSESHPEPTDHVLQEKKMALLSLLCSTLVSEVNMNNTSDPTLAAIFEICRELALLEPEFILKASLYARQQLNVRNVANNILAIAAFLPACRPHLRRYFCAIVQLPSDWIQVAELYQSLAEGDKNKLVPLPACLRTAMTDKFAQFDEYQLAKYNPRKHRAKRHPRRPPRSPGMEPPFSHRCFPRYIGFLREEQRKFEKAGDTVSEKKNPPRFTLKKLVQRLHIHKPAQHVQALLGYRYPSNLQLFSRSRLPGPWDSSRAGKRMKLSRPETWERELSLRGNKASVWEELIENGKLPFMAMLRNLCNLLRVGISSRHHELILQRLQHAKSVIHSRQFPFRFLNAHDAIDALEAQLRNQALPFPSNITLMRRILTRNEKNRPRRRFLCHLSRQQLRMAMRIPVLYEQLKREKLRVHKARQWKYDGEMLNRYRQALETAVNLSVKHSLPLLPGRTVLVYLTDANADRLCPKSNPQGPPLNYALLLIGMMITRAEQVDVVLCGGDTLKTAVLKAEEGILKTAIKLQAQVQEFDENDGWSLNTFGKYLLSLAGQRVPVDRVILLGQSMDDGMINVAKQLYWQRVNSKCLFVGILLRRVQYLSTDLNPNDVTLSGCTDAILKFIAEHGASHLLEHVGQMDKIFKIPPPPGKTGVQSLRPLEEDTPSPLAPVSQQGWRSIRLFISSTFRDMHGERDLLLRSVLPALQARAAPHRISLHGIDLRWGVTEEETRRNRQLEVCLGEVENAQLFVGILGSRYGYIPPSYNLPDHPHFHWAQQYPSGRSVTEMEVMQFLNRNQRLQPSAQALIYFRDSSFLSSVPDAWKSDFVSESEEAARRISELKSYLSRQKGITCRRYPCEWGGVAAGRPYVGGLEEFGQLVLQDVWNMIQKLYLQPGALLEQPVSIPDDDLVQATFQQLQKPPSPARPRLLQDTVQRLMLPHGRLSLVTGQSGQGKTAFLASLVSALQAPDGAKVASLVFFHFSGARPDQGLALTLLRRLCTYLRGQLKEPGALPSTYRSLVWELQQRLLPKSAESLHPGQTQVLIIDGADRLVDQNGQLISDWIPKKLPRCVHLVLSVSSDAGLGETLEQSQGAHVLALGPLEASARARLVREELALYGKRLEESPFNNQMRLLLVKRESGRPLYLRLVTDHLRLFTLYEQVSERLRTLPATVPLLLQHILSTLEKEHGPDVLPQALTALEVTRSGLTVDQLHGVLSVWRTLPKGTKSWEEAVAAGNSGDPYPMGPFACLVQSLRSLLGEGPLERPGARLCLPDGPLRTAAKRCYGKRPGLEDTAHILIAAQLWKTCDADASGTFRSCPPEALGDLPYHLLQSGNRGLLSKFLTNLHVVAAHLELGLVSRLLEAHALYASSVPKEEQKLPEADVAVFRTFLRQQASILSQYPRLLPQQAANQPLDSPLCHQASLLSRRWHLQHTLRWLNKPRTMKNQQSSSLSLAVSSSPTAVAFSTNGQRAAVGTANGTVYLLDLRTWQEEKSVVSGCDGISACLFLSDDTLFLTAFDGLLELWDLQHGCRVLQTKAHQYQITGCCLSPDCRLLATVCLGGCLKLWDTVRGQLAFQHTYPKSLNCVAFHPEGQVIATGSWAGSISFFQVDGLKVTKDLGAPGASIRTLAFNVPGGVVAVGRLDSMVELWAWREGARLAAFPAHHGFVAAALFLHAGCQLLTAGEDGKVQVWSGSLGRPRGHLGSLSLSPALSVALSPDGDRVAVGYRADGIRIYKISSGSQGAQGQALDVAVSALAWLSPKVLVSGAEDGSLQGWALKECSLQSLWLLSRFQKPVLGLATSQELLASASEDFTVQLWPRQLLTRPHKAEDFPCGTELRGHEGPVSCCSFSTDGGSLATGGRDRSLLCWDVRTPKTPVLIHSFPACHRDWVTGCAWTKDNLLISCSSDGSVGLWDPESGQRLGQFLGHQSAVSAVAAVEEHVVSVSRDGTLKVWDHQGVELTSIPAHSGPISHCAAAMEPRAAGQPGSELLVVTVGLDGATRLWHPLLVCQTHTLLGHSGPVRAAAVSETSGLMLTASEDGSVRLWQVPKEADDTCIPRSSAAVTAVAWAPDGSMAVSGNQAGELILWQEAKAVATAQAPGHIGALIWSSAHTFFVLSADEKISEWQVKLRKGSAPGNLSLHLNRILQEDLGVLTSLDWAPDGHFLILAKADLKLLCMKPGDAPSEIWSSYTENPMILSTHKEYGIFVLQPKDPGVLSFLRQKESGEFEERLNFDINLENPSRTLISITQAKPESESSFLCASSDGILWNLAKCSPEGEWTTGNMWQKKANTPETQTPGTDPSTCRESDASMDSDASMDSEPTPHLKTRQRRKIHSGSVTALHVLPELLVTASKDRDVKLWERPSMQLLGLFRCEGSVSCLEPWLGANSTLQLAVGDVQGNVYFLNWE

SEQ ID NO: 87563 - protein, 250 aa, Homo sapiens
  Payload ID: 17523
  Gene Symbol: TEP1
  Gene Name: telomerase-associated protein 1
  ENSP ID: ENSP00000450475
WAPDGSMAVSGNQAGELILWQEAKAVATAQAPGHIGALIWSSAHTFFVLSADEKISEWQVKLRKGSAPGNLSLHLNRILQEDLGVLTSLDWAPDGHFLILAKADLKLLCMKPGDAPSEIWSSYTENPMILSTHKEYGIFVLQPKDPGVLSFLRQKESGEFEERLNFDINLENPSRTLISITQAKPESALMGSYGTWPNAAQKENGPQVTCGRKKQTLQKPKLQGQTHLPAGNLMPAWIVMPAWIVSQHHI

SEQ ID NO: 87564 - protein, 201 aa, Homo sapiens
  Payload ID: 17523
  Gene Symbol: TEP1
  Gene Name: telomerase-associated protein 1
  ENSP ID: ENSP00000450508
  MOD_RES (1)..(1): Any amino acid
XAVSGNQAGELILWQEAKAVATAQEDLGVLTSLDWAPDGHFLILAKADLKLLCMKPGDAPSEIWSSYTENPMILSTHKEYGIFVLQPKDPGVLSFLRQKESGEFEERLNFDINLENPSRTLISITQAKPESESSFLCASSDGILWNLAKCSPEGEWTTGNMWQKKANTPETQTPGTDPSTCRESDASMDSDASMDSEPTPH

SEQ ID NO: 87565 - protein, 1904 aa, Homo sapiens
  Payload ID: 17523
  Gene Symbol: TEP1
  Gene Name: telomerase-associated protein 1
  ENSP ID: ENSP00000450541
MLNRYRQALETAVNLSVKHSLPLLPGRTVLVYLTDANADRLCPKSNPQGPPLNYALLLIGMMITRAEQVDVVLCGGDTLKTAVLKAEEGILKTAIKLQAQVQEFDENDGWSLNTFGKYLLSLAGQRVPVDRVILLGQSMDDGMINVAKQLYWQRVNSKCLFVGILLRRVQYLSTDLNPNDVTLSGCTDAILKFIAEHGASHLLEHVGQMDKIFKIPPPPGKTGVQSLRPLEEDTPSPLAPVSQQGWRSIRLFISSTFRDMHGERDLLLRSVLPALQARAAPHRISLHGIDLRWGVTEEETRRNRQLEVCLGEVENAQLFVGILGSRYGYIPPSYNLPDHPHFHWAQQYPSGRSVTEMEVMQFLNRNQRLQPSAQALIYFRDSSFLSSVPDAWKSDFVSESEEAARRISELKSYLSRQKGITCRRYPCEWGGVAAGRPYVGGLEEFGQLVLQDVWNMIQKLYLQPGALLEQPVSIPDDDLVQATFQQLQKPPSPARPRLLQDTVQRLMLPHGRLSLVTGQSGQGKTAFLASLVSALQAPDGAKVASLVFFHFSGARPDQGLALTLLRRLCTYLRGQLKEPGALPSTYRSLVWELQQRLLPKSAESLHPGQTQVLIIDGADRLVDQNGQLISDWIPKKLPRCVHLVLSVSSDAGLGETLEQSQGAHVLALGPLEASARARLVREELALYGKRLEESPFNNQRESGRPLYLRLVTDHLRLFTLYEQVSERLRTLPATVPLLLQHILSTLEKEHGPDVLPQALTALEVTRSGLTVDQLHGVLSVWRTLPKGTKSWEEAVAAGNSGDPYPMGPFACLVQSLRSLLGEGPLERPGARLCLPDGPLRTAAKRCYGKRPGLEDTAHILIAAQLWKTCDADASGTFRSCPPEALGDLPYHLLQSGNRGLLSKFLTNLHVVAAHLELGLVSRLLEAHALYASSVPKEEQKLPEADVAVFRTFLRQQASILSQYPRLLPQQAANQPLDSPLCHQASLLSRRWHLQHTLRWLNKPRTMKNQQSSSLSLAVSSSPTAVAFSTNGQRAAVGTANGTVYLLDLRTWQEEKSVVSGCDGISACLFLSDDTLFLTAFDGLLELWDLQHGCRVLQTKAHQYQITGCCLSPDCRLLATVCLGGCLKLWDTVRGQLAFQHTYPKSLNCVAFHPEGQVIATGSWAGSISFFQVDGLKVTKDLGAPGASIRTLAFNVPGGVVAVGRLDSMVELWAWREGARLAAFPAHHGFVAAALFLHAGCQLLTAGEDGKVQVWSGSLGRPRGHLGSLSLSPALSVALSPDGDRVAVGYRADGIRIYKISSGSQGAQGQALDVAVSALAWLSPKVLVSGAEDGSLQGWALKECSLQSLWLLSRFQKPVLGLATSQELLASASEDFTVQLWPRQLLTRPHKAEDFPCGTELRGHEGPVSCCSFSTDGGSLATGGRDRSLLCWDVRTPKTPVLIHSFPACHRDWVTGCAWTKDNLLISCSSDGSVGLWDPESGQRLGQFLGHQSAVSAVAAVEEHVVSVSRDGTLKVWDHQGVELTSIPAHSGPISHCAAAMEPRAAGQPGSELLVVTVGLDGATRLWHPLLVCQTHTLLGHSGPVRAAAVSETSGLMLTASEDGSVRLWQVPKEADDTCIPRSSAAVTAVAWAPDGSMAVSGNQAGELILWQEAKAVATAQAPGHIGALIWSSAHTFFVLSADEKISEWQVKLRKGSAPGNLSLHLNRILQEDLGVLTSLDWAPDGHFLILAKADLKLLCMKPGDAPSEIWSSYTENPMILSTHKEYGIFVLQPKDPGVLSFLRQKESGEFEERLNFDINLENPSRTLISITQAKPESESSFLCASSDGILWNLAKCSPEGEWTTGNMWQKKANTPETQTPGTDPSTCRESDASMDSDASMDSEPTPHLKTRQRRKPSMCYLSCW

SEQ ID NO: 87566 - protein, 70 aa, Homo sapiens
  Payload ID: 17523
  Gene Symbol: TEP1
  Gene Name: telomerase-associated protein 1
  ENSP ID: ENSP00000450830
  MOD_RES (1)..(1): Any amino acid
XPQALTALEVTRSGLTVDQLHGVLSVWRTLPKGTKSWEEAVAAGNSGDPYPMGPFACLVQSLRSSALEDM

SEQ ID NO: 87567 - protein, 102 aa, Homo sapiens
  Payload ID: 17523
  Gene Symbol: TEP1
  Gene Name: telomerase-associated protein 1
  ENSP ID: ENSP00000451409
RTLAFNVPGGVVAVGRLDSMVELWAWREGARLAAFPAHHGFVAAALFLHAGCQLLTAGEDGKMVIGWLLDIERMALGSTKSLQVPRGLRVRHWMWQCPPWPG

SEQ ID NO: 87568 - protein, 1481 aa, Homo sapiens
  Payload ID: 17523
  Gene Symbol: TEP1
  Gene Name: telomerase-associated protein 1
  ENSP ID: ENSP00000451634
MEKLHGHVSAHPDILSLENRCLAMLPDLQPLEKLHQHVSTHSDILSLKNQCLATLPDLKTMEKPHGYVSAHPDILSLENQCLATLSDLKTMEKPHGHVSAHPDILSLENRCLATLSSLKSTVSASPLFQSLQISHMTQADLYRVNNSNCLLSEPPSWRAQHFSKGLDLSTCPIALKSISATETAQEATLGRWFDSEEKKGAETQMPSYSLSLGEEEEVEDLAVKLTSGDSESHPEPTDHVLQEKKMALLSLLCSTLVSEVNMNNTSDPTLAAIFEICRELALLEPEFILKASLYARQQLNVRNVANNILAIAAFLPACRPHLRRYFCAIVQLPSDWIQVAELYQSLAEGDKNKLVPLPACLRTAMTDKFAQFDEYQLAKYNPRKHRAKRHPRRPPRSPGMEPPFSHRCFPRYIGFLREEQRKFEKAGDTVSEKKNPPRFTLKKLVQRLHIHKPAQHVQALLGYRYPSNLQLFSRSRLPGPWDSSRAGKRMKLSRPETWERELSLRGNKASVWEELIENGKLPFMAMLRNLCNLLRVGISSRHHELILQRLQHAKSVIHSRQFPFRFLNAHDAIDALEAQLRNQALPFPSNITLMRRILTRNEKNRPRRRFLCHLSRQQLRMAMRIPVLYEQLKREKLRVHKARQWKYDGEMLNRYRQALETAVNLSVKHSLPLLPGRTVLVYLTDANADRLCPKSNPQGPPLNYALLLIGMMITRAEQVDVVLCGGDTLKTAVLKAEEGILKTAIKLQAQVQEFDENDGWSLNTFGKYLLSLAGQRVPVDRVILLGQSMDDGMINVAKQLYWQRVNSKCLFVGILLRRVQYLSTDLNPNDVTLSGCTDAILKFIAEHGASHLLEHVGQMDKIFKIPPPPGKTGVQSLRPLEEDTPSPLAPVSQQGWRSIRLFISSTFRDMHGERDLLLRSVLPALQARAAPHRISLHGIDLRWGVTEEETRRNRQLEVCLGEVENAQLFVGILGSRYGYIPPSYNLPDHPHFHWAQQYPSGRSVTEMEVMQFLNRNQRLQPSAQALIYFRDSSFLSSVPDAWKSDFVSESEEAARRISELKSYLSRQKGITCRRYPCEWGGVAAGRPYVGGLEEFGQLVLQDVWNMIQKLYLQPGALLEQPVSIPDDDLVQATFQQLQKPPSPARPRLLQDTVQRLMLPHGRLSLVTGQSGQGKTAFLASLVSALQAPDGAKVASLVFFHFSGARPDQGLALTLLRRLCTYLRGQLKEPGALPSTYRSLVWELQQRLLPKSAESLHPGQTQVLIIDGADRLVDQNGQLISDWIPKKLPRCVHLVLSVSSDAGLGETLEQSQGAHVLALGPLEASARARLVREELALYGKRLEESPFNNQMRLLLVKRESGRPLYLRLVTDHLRLFTLYEQVSERLRTLPATVPLLLQHILSTLEKEHGPDVLPQALTALEVTRSGLTVDQLHGVLSVWRTLPKGTKSWEEAVAAGNSGDPYPMGPFACLVQSLRSSALEDM

SEQ ID NO: 87569 - protein, 78 aa, Homo sapiens
  Payload ID: 17523
  Gene Symbol: TEP1
  Gene Name: telomerase-associated protein 1
  ENSP ID: ENSP00000451919
  MOD_RES (1)..(1): Any amino acid
XRLERMARFRCGQGLWVGPVGTWVPFLSLLPSLWHSAQMVIGWLLDIERMALGSTKSLQVPRGLRVRHWMWQCPPWPG

SEQ ID NO: 87570 - protein, 166 aa, Homo sapiens
  Payload ID: 17523
  Gene Symbol: TEP1
  Gene Name: telomerase-associated protein 1
  ENSP ID: ENSP00000452240
MEKLHGHVSAHPDILSLENRCLAMLPDLQPLEKLHQHVSTHSDILSLKNQCLATLPDLKTMEKPHGYVSAHPDILSLENQCLATLSDLKTMEKPHGHVSAHPDILSLENRCLATLSSLKSTVSASPLFQSLQISHMTQADLYRVNNSNCLLSEPPSWRAQHFSKGL

SEQ ID NO: 87571 - protein, 2519 aa, Homo sapiens
  Payload ID: 17523
  Gene Symbol: TEP1
  Gene Name: telomerase-associated protein 1
  ENSP ID: ENSP00000452574
MEKLHGHVSAHPDILSLENRCLAMLPDLQPLEKLHQHVSTHSDILSLKNQCLATLPDLKTMEKPHGYVSAHPDILSLENQCLATLSDLKTMEKPHGHVSAHPDILSLENRCLATLSSLKSTVSASPLFQSLQISHMTQADLYRVNNSNCLLSEPPSWRAQHFSKGLDLSTCPIALKSISATETAQEATLGRWFDSEEKKGAETQMPSYSLSLGEEEEVEDLAVKLTSGDSESHPEPTDHVLQEKKMALLSLLCSTLVSEVNMNNTSDPTLAAIFEICRELALLEPEFILKGMEPPFSHRCFPRYIGFLREEQRKFEKAGDTVSEKKNPPRFTLKKLVQRLHIHKPAQHVQALLGYRYPSNLQLFSRSRLPGPWDSSRAGKRMKLSRPETWERELSLRGNKASVWEELIENGKLPFMAMLRNLCNLLRVGISSRHHELILQRLQHAKSVIHSRQFPFRFLNAHDAIDALEAQLRNQALPFPSNITLMRRILTRNEKNRPRRRFLCHLSRQQLRMAMRIPVLYEQLKREKLRVHKARQWKYDGEMLNRYRQALETAVNLSVKHSLPLLPGRTVLVYLTDANADRLCPKSNPQGPPLNYALLLIGMMITRAEQVDVVLCGGDTLKTAVLKAEEGILKTAIKLQAQVQEFDENDGWSLNTFGKYLLSLAGQRVPVDRVILLGQSMDDGMINVAKQLYWQRVNSKCLFVGILLRRVQYLSTDLNPNDVTLSGCTDAILKFIAEHGASHLLEHVGQMDKIFKIPPPPGKTGVQSLRPLEEDTPSPLAPVSQQGWRSIRLFISSTFRDMHGERDLLLRSVLPALQARAAPHRISLHGIDLRWGVTEEETRRNRQLEVCLGEVENAQLFVGILGSRYGYIPPSYNLPDHPHFHWAQQYPSGRSVTEMEVMQFLNRNQRLQPSAQALIYFRDSSFLSSVPDAWKSDFVSESEEAARRISELKSYLSRQKGITCRRYPCEWGGVAAGRPYVGGLEEFGQLVLQDVWNMIQKLYLQPGALLEQPVSIPDDDLVQATFQQLQKPPSPARPRLLQDTVQRLMLPHGRLSLVTGQSGQGKTAFLASLVSALQAPDGAKVASLVFFHFSGARPDQGLALTLLRRLCTYLRGQLKEPGALPSTYRSLVWELQQRLLPKSAESLHPGQTQVLIIDGADRLVDQNGQLISDWIPKKLPRCVHLVLSVSSDAGLGETLEQSQGAHVLALGPLEASARARLVREELALYGKRLEESPFNNQMRLLLVKRESGRPLYLRLVTDHLRLFTLYEQVSERLRTLPATVPLLLQHILSTLEKEHGPDVLPQALTALEVTRSGLTVDQLHGVLSVWRTLPKGTKSWEEAVAAGNSGDPYPMGPFACLVQSLRSLLGEGPLERPGARLCLPDGPLRTAAKRCYGKRPGLEDTAHILIAAQLWKTCDADASGTFRSCPPEALGDLPYHLLQSGNRGLLSKFLTNLHVVAAHLELGLVSRLLEAHALYASSVPKEEQKLPEADVAVFRTFLRQQASILSQYPRLLPQQAANQPLDSPLCHQASLLSRRWHLQHTLRWLNKPRTMKNQQSSSLSLAVSSSPTAVAFSTNGQRAAVGTANGTVYLLDLRTWQEEKSVVSGCDGISACLFLSDDTLFLTAFDGLLELWDLQHGCRVLQTKAHQYQITGCCLSPDCRLLATVCLGGCLKLWDTVRGQLAFQHTYPKSLNCVAFHPEGQVIATGSWAGSISFFQVDGLKVTKDLGAPGASIRTLAFNVPGGVVAVGRLDSMVELWAWREGARLAAFPAHHGFVAAALFLHAGCQLLTAGEDGKVQVWSGSLGRPRGHLGSLSLSPALSVALSPDGDRVAVGYRADGIRIYKISSGSQGAQGQALDVAVSALAWLSPKVLVSGAEDGSLQGWALKECSLQSLWLLSRFQKPVLGLATSQELLASASEDFTVQLWPRQLLTRPHKAEDFPCGTELRGHEGPVSCCSFSTDGGSLATGGRDRSLLCWDVRTPKTPVLIHSFPACHRDWVTGCAWTKDNLLISCSSDGSVGLWDPESGQRLGQFLGHQSAVSAVAAVEEHVVSVSRDGTLKVWDHQGVELTSIPAHSGPISHCAAAMEPRAAGQPGSELLVVTVGLDGATRLWHPLLVCQTHTLLGHSGPVRAAAVSETSGLMLTASEDGSVRLWQVPKEADDTCIPRSSAAVTAVAWAPDGSMAVSGNQAGELILWQEAKAVATAQAPGHIGALIWSSAHTFFVLSADEKISEWQVKLRKGSAPGNLSLHLNRILQEDLGVLTSLDWAPDGHFLILAKADLKLLCMKPGDAPSEIWSSYTENPMILSTHKEYGIFVLQPKDPGVLSFLRQKESGEFEERLNFDINLENPSRTLISITQAKPESESSFLCASSDGILWNLAKCSPEGEWTTGNMWQKKANTPETQTPGTDPSTCRESDASMDSDASMDSEPTPHLKTRQRRKIHSGSVTALHVLPELLVTASKDRDVKLWERPSMQLLGLFRCEGSVSCLEPWLGANSTLQLAVGDVQGNVYFLNWE

SEQ ID NO: 87572 - protein, 837 aa, Homo sapiens
  Payload ID: 17524
  Gene Symbol: TELO2
  Gene Name: telomere maintenance 2
  Uniprot ID: Q9Y4R8
  ENSP ID: ENSP00000262319
MEPAPSEVRLAVREAIHALSSSEDGGHIFCTLESLKRYLGEMEPPALPREKEEFASAHFSPVLRCLASRLSPAWLELLPHGRLEELWASFFLEGPADQAFLVLMETIEGAAGPSFRLMKMARLLARFLREGRLAVLMEAQCRQQTQPGFILLRETLLGKVVALPDHLGNRLQQENLAEFFPQNYFRLLGEEVVRVLQAVVDSLQGGLDSSVSFVSQVLGKACVHGRQQEILGVLVPRLAALTQGSYLHQRVCWRLVEQVPDRAMEAVLTGLVEAALGPEVLSRLLGNLVVKNKKAQFVMTQKLLFLQSRLTTPMLQSLLGHLAMDSQRRPLLLQVLKELLETWGSSSAIRHTPLPQQRHVSKAVLICLAQLGEPELRDSRDELLASMMAGVKCRLDSSLPPVRRLGMIVAEVVSARIHPEGPPLKFQYEEDELSLELLALASPQPAGDGASEAGTSLVPATAEPPAETPAEIVDGGVPQAQLAGSDSDLDSDDEFVPYDMSGDRELKSSKAPAYVRDCVEALTTSEDIERWEAALRALEGLVYRSPTATREVSVELAKVLLHLEEKTCVVGFAGLRQRALVAVTVTDPAPVADYLTSQFYALNYSLRQRMDILDVLTLAAQELSRPGCLGRTPQPGSPSPNTPCLPEAAVSQPGSAVASDWRVVVEERIRSKTQRLSKGGPRQGPAGSPSRFNSVAGHFFFPLLQRFDRPLVTFDLLGEDQLVLGRLAHTLGALMCLAVNTTVAVAMGKALLEFVWALRFHIDAYVRQGLLSAVSSVLLSLPAARLLEDLMDELLEARSWLADVAEKDPDEDCRTLALRALLLLQRLKNRLLPPASP

SEQ ID NO: 87573 - protein, 426 aa, Homo sapiens
  Payload ID: 17524
  Gene Symbol: TELO2
  Gene Name: telomere maintenance 2
  ENSP ID: ENSP00000456383
MEPAPSEVRLAVREAIHALSSSEDGGHIFCTLESLKRYLGEMEPPALPREKEEFASAHFSPVLRCLASRLSPAWLELLPHGRLEELWASFFLEGPADQAFLVLMETIEGAAGPSFRLMKMARLLARFLREGRLAVLMEAQCRQQTQPGFILLRETLLGKVVALPDHLGNRLQQENLAEFFPQNYFRLLGEEVVRVLQAVVDSLQGGLDSSVSFVSQVLGKACVHGRQQEILGVLVPRLAALTQGSYLHQRVCWRLVEQVPDRAMEAVLTGLVEAALGPEVLSRLLGNLVVKNKKAQFVMTQKLLFLQSRLTTPMLQSLLGHLAMDSQRRPLLLQVLKELLETWGSSSAIRHTPLPQQRHVSKAVLICLAQLGEPELRDSRDELLASMMAGVKCRLDSSLPPVRRLGMIVQIQLRGRPLLLPPPSAL

SEQ ID NO: 87574 - protein, 160 aa, Homo sapiens
  Payload ID: 17524
  Gene Symbol: TELO2
  Gene Name: telomere maintenance 2
  ENSP ID: ENSP00000457461
  MOD_RES (1)..(1): Any amino acid
XLDSDDEFVPYDMSGDRELKSSKAPAYVRDCVEALTTSEDIERWEAALRALEGLVYRSPTATREVADYLTSQFYALNYSLRQRMDILDVLTLAAQELSRPGCLGRTPQPGSPSPNTPCLPEAAVSQPGSAVASDWRVVVEERIRSKTQRLSKGGPRQGPA

SEQ ID NO: 87575 - protein, 419 aa, Homo sapiens
  Payload ID: 17525
  Gene Symbol: TERF1
  Gene Name: telomeric repeat binding factor (NIMA-interacting) 1
  Uniprot ID: P54274
  ENSP ID: ENSP00000276602
MAEDVSSAAPSPRGCADGRDADPTEEQMAETERNDEEQFECQELLECQVQVGAPEEEEEEEEDAGLVAEAEAVAAGWMLDFLCLSLCRAFRDGRSEDFRRTRNSAEAIIHGLSSLTACQLRTIYICQFLTRIAAGKTLDAQFENDERITPLESALMIWGSIEKEHDKLHEEIQNLIKIQAIAVCMENGNFKEAEEVFERIFGDPNSHMPFKSKLLMIISQKDTFHSFFQHFSYNHMMEKIKSYVNYVLSEKSSTFLMKAAAKVVESKRTRTITSQDKPSGNDVEMETEANLDTRKRSHKNLFLSKLQHGTQQQDLNKKERRVGTPQSTKKKKESRRATESRIPVSKSQPVTPEKHRARKRQAWLWEEDKNLRSGVRKYGEGNWSKILLHYKFNNRTSVMLKDRWRTMKKLKLISSDSED

SEQ ID NO: 87576 - protein, 439 aa, Homo sapiens
  Payload ID: 17525
  Gene Symbol: TERF1
  Gene Name: telomeric repeat binding factor (NIMA-interacting) 1
  Uniprot ID: P54274
  ENSP ID: ENSP00000276603
MAEDVSSAAPSPRGCADGRDADPTEEQMAETERNDEEQFECQELLECQVQVGAPEEEEEEEEDAGLVAEAEAVAAGWMLDFLCLSLCRAFRDGRSEDFRRTRNSAEAIIHGLSSLTACQLRTIYICQFLTRIAAGKTLDAQFENDERITPLESALMIWGSIEKEHDKLHEEIQNLIKIQAIAVCMENGNFKEAEEVFERIFGDPNSHMPFKSKLLMIISQKDTFHSFFQHFSYNHMMEKIKSYVNYVLSEKSSTFLMKAAAKVVESKRTRTITSQDKPSGNDVEMETEANLDTRKSVSDKQSAVTESSEGTVSLLRSHKNLFLSKLQHGTQQQDLNKKERRVGTPQSTKKKKESRRATESRIPVSKSQPVTPEKHRARKRQAWLWEEDKNLRSGVRKYGEGNWSKILLHYKFNNRTSVMLKDRWRTMKKLKLISSDSED

SEQ ID NO: 87577 - protein, 168 aa, Homo sapiens
  Payload ID: 17525
  Gene Symbol: TERF1
  Gene Name: telomeric repeat binding factor (NIMA-interacting) 1
  ENSP ID: ENSP00000428838
MAEDVSSAAPSPRGCADGRDADPTEEQMAETERNDEEQFECQELLECQVQVGAPEEEEEEEEDAGLVAEAEAVAAGWMLDFLCLSLCRAFRDGRSEDFRRTRNSAEDAQFENDERITPLESALMIWGSIEKEHDKLHEEIQNLIKIQAIAVCMENGNFKEAEEVFERI

SEQ ID NO: 87578 - protein, 186 aa, Homo sapiens
  Payload ID: 17525
  Gene Symbol: TERF1
  Gene Name: telomeric repeat binding factor (NIMA-interacting) 1
  ENSP ID: ENSP00000430121
MFTIIHGLSSLTACQLRTIYICQFLTRIAAGKTLDAQFENDERITPLESALMIWGSIEKEHDKLHEEIQNLIKIQAIAVCMENGNFKEAEEVFERIFGDPNSHMPFKSKLLMIISQKDTFHSFFQHFSYNHMMEKIKSYVNYVLSEKSSTFLMKAAAKVVESKRTRTITSQDKPSGNDVEMETEAN

SEQ ID NO: 87579 - protein, 542 aa, Homo sapiens
  Payload ID: 17526
  Gene Symbol: TERF2
  Gene Name: telomeric repeat binding factor 2
  Uniprot ID: Q15554
  ENSP ID: ENSP00000254942
MAAGAGTAGPASGPGVVRDPAASQPRKRPGREGGEGARRSDTMAGGGGSSDGSGRAAGRRASRSSGRARRGRHEPGLGGPAERGAGEARLEEAVNRWVLKFYFHEALRAFRGSRYGDFRQIRDIMQALLVRPLGKEHTVSRLLRVMQCLSRIEEGENLDCSFDMEAELTPLESAINVLEMIKTEFTLTEAVVESSRKLVKEAAVIICIKNKEFEKASKILKKHMSKDPTTQKLRNDLLNIIREKNLAHPVIQNFSYETFQQKMLRFLESHLDDAEPYLLTMAKKALKSESAASSTGKEDKQPAPGPVEKPPREPARQLRNPPTTIGMMTLKAAFKTLSGAQDSEAAFAKLDQKDLVLPTQALPASPALKNKRPRKDENESSAPADGEGGSELQPKNKRMTISRLVLEEDSQSTEPSAGLNSSQEAASAPPSKPTVLNQPLPGEKNPKVPKGKWNSSNGVEEKETWVEEDELFQVQAAPDEDSTTNITKKQKWTVEESEWVKAGVQKYGEGNWAAISKNYPFVNRTAVMIKDRWRTMKRLGMN

SEQ ID NO: 87580 - protein, 293 aa, Homo sapiens
  Payload ID: 17526
  Gene Symbol: TERF2
  Gene Name: telomeric repeat binding factor 2
  Uniprot ID: Q15554
  ENSP ID: ENSP00000454955
MAAGAGTAGPASGPGVVRDPAASQPRKRPGREGGEGARRSDTMAGGGGSSDGSGRAAGRRASRSSGRARRGRHEPGLGGPAERGAGEARLEEAVNRWVLKFYFHEALRAFRGSRYGDFRQIRDIMQALLVRPLGKEHTVSRLLRVMQCLSRIEEGENLDCSFDMEAELTPLESAINVLEMIKTEFTLTEAVVESSRKLVKEAAVIICIKNKEFEKASKILKKHMSKDPTTQKLRNDLLNIIREKNLAHPVIQNFSYETFQQKMLRFLESHLDDAEPYLLTVRLGPSPITMVCP

SEQ ID NO: 87581 - protein, 283 aa, Homo sapiens
  Payload ID: 17526
  Gene Symbol: TERF2
  Gene Name: telomeric repeat binding factor 2
  ENSP ID: ENSP00000456022
MSSLPALLVRPLGKEHTVSRLLRVMQCLSRIEEGENLDCSFDMEAELTPLESAINVLEMIKTEFTLTEAVVESSRKLVKEAAVIICIKNKEFEKASKILKKHMSKDPTTQKLRNDLLNIIREKNLAHPVIQNFSYETFQQKMLRFLESHLDDAEPYLLTMAKKALKSESAASSTGKEDKQPAPGPVEKPPREPARQLRNPPTTIGMMTLKAAFKTLSGAQDSEAAFAKLDQKDLVLPTQALPASPALKNKRPRKDENESSAPADGEGGSELQPKNKRMTISRL

SEQ ID NO: 87582 - protein, 60 aa, Homo sapiens
  Payload ID: 17526
  Gene Symbol: TERF2
  Gene Name: telomeric repeat binding factor 2
  ENSP ID: ENSP00000456062
  MOD_RES (1)..(1): Any amino acid
XAERGAGEARLEEAVNRWVLKFYFHEALRAFRGSRFACQALGEGAHRVPIAAGYAVSVAD

SEQ ID NO: 87583 - protein, 206 aa, Homo sapiens
  Payload ID: 17526
  Gene Symbol: TERF2
  Gene Name: telomeric repeat binding factor 2
  ENSP ID: ENSP00000457094
MEAELTPLESAINVLEMIKTEFTLTEAVVESSRKLVKEAAVIICIKNKEFEKASKILKKHMSKDPTTQKLRNDLLNIIREKNLAHPVIQNFSYETFQQKMLRFLESHLDDAEPYLLTIGFMAKKALKSESAASSTGKEDKQPAPGPVEKPPREPARQLRNPPTTIGMMTLKAAFKTLSGAQDSEAAFAKLDQKDLVLPTQALPASP

SEQ ID NO: 87584 - protein, 99 aa, Homo sapiens
  Payload ID: 17526
  Gene Symbol: TERF2
  Gene Name: telomeric repeat binding factor 2
  ENSP ID: ENSP00000462523
AVIICIKNKEFEKASKILKKHMSKDPTTQKLRNDLLNIIREKNLAHPVIQNFSYETFQQKMLRFLESHLDDAEPYLLTIGFVSELVCILSIFLVKEAEN

SEQ ID NO: 87585 - protein, 144 aa, Homo sapiens
  Payload ID: 17526
  Gene Symbol: TERF2
  Gene Name: telomeric repeat binding factor 2
  ENSP ID: ENSP00000462726
  MOD_RES (1)..(1): Any amino acid
XMIKTEFTLTEAVVESSRKLVKEAMAKKALKSESAASSTGKEDKQPAPGPVEKPPREPARQLRNPPTTIGMMTLKAAFKTLSGAQDSEAAFAKLDQKDLVLPTQALPASPALKNKRPRKDENESSAPADGEGGSELQPKNKRMT

SEQ ID NO: 87586 - protein, 49 aa, Homo sapiens
  Payload ID: 17526
  Gene Symbol: TERF2
  Gene Name: telomeric repeat binding factor 2
  ENSP ID: ENSP00000463079
  MOD_RES (1)..(1): Any amino acid
XNSSNGVEEKETWVEEDELFQVQEVDCRRKRVGQGWSAEIWGRKLGCHF

SEQ ID NO: 87587 - protein, 244 aa, Homo sapiens
  Payload ID: 17526
  Gene Symbol: TERF2
  Gene Name: telomeric repeat binding factor 2
  ENSP ID: ENSP00000475507
  MOD_RES (1)..(1): Any amino acid
XPTTQKLRNDLLNIIREKNLAHPVIQNFSYETFQQKMLRFLESHLDDAEPYLLTMAKKALKSESAASSTGKEDKQPAPGPVEKPPREPARQLRNPPTTIGMMTLKAAFKTLSGAQDSEAAFAKLDQKDLVLPTQALPASPALKNKRPRKDENESSAPADGEGGSELQPKNKRMTISRLVLEEDSQSTEPSAGLNSSQEAASAPPSKPTVLNQPLPGEKNPKYEDLLCRNFGAGWWSWLGLVLLP

SEQ ID NO: 87588 - protein, 86 aa, Homo sapiens
  Payload ID: 17526
  Gene Symbol: TERF2
  Gene Name: telomeric repeat binding factor 2
  ENSP ID: ENSP00000476905
MQCLSRIEEGENLDCSFDMEAELTPLESAINVLEMIKTEFTLTEAVVESSRKLVKEAAVIICIKNKEFEKASKILKKHMSKDPTTQ

SEQ ID NO: 87589 - protein, 399 aa, Homo sapiens
  Payload ID: 17527
  Gene Symbol: TERF2IP
  Gene Name: telomeric repeat binding factor 2, interacting protein
  Uniprot ID: Q9NYB0
  ENSP ID: ENSP00000300086
MAEAMDLGKDPNGPTHSSTLFVRDDGSSMSFYVRPSPAKRRLSTLILHGGGTVCRVQEPGAVLLAQPGEALAEASGDFISTQYILDCVERNERLELEAYRLGPASAADTGSEAKPGALAEGAAEPEPQRHAGRIAFTDADDVAILTYVKENARSPSSVTGNALWKAMEKSSLTQHSWQSLKDRYLKHLRGQEHKYLLGDAPVSPSSQKLKRKAEEDPEAADSGEPQNKRTPDLPEEEYVKEEIQENEEAVKKMLVEATREFEEVVVDESPPDFEIHITMCDDDPPTPEEDSETQPDEEEEEEEEKVSQPEVGAAIKIIRQLMEKFNLDLSTVTQAFLKNSGELEATSAFLASGQRADGYPIWSRQDDIDLQKDDEDTREALVKKFGAQNVARRIEFRKK

SEQ ID NO: 87590 - protein, 99 aa, Homo sapiens
  Payload ID: 17527
  Gene Symbol: TERF2IP
  Gene Name: telomeric repeat binding factor 2, interacting protein
  ENSP ID: ENSP00000454399
LTQHSWQSLKDRYLKHLRGQEHKYLLGDAPVSPSSQKLKRKAEEDPEAADSGGEEAERGASRISARVGLGSFSWLPGVHLGIFGSSAWPRPLLTSGTTE

SEQ ID NO: 87591 - protein, 122 aa, Homo sapiens
  Payload ID: 17527
  Gene Symbol: TERF2IP
  Gene Name: telomeric repeat binding factor 2, interacting protein
  ENSP ID: ENSP00000456092
VDESPPDFEIHITMCDDDPPTPEEDSETQPDEEEEEEEEKVSQPEVSISSQSWLILSSTFGRFSCIWAGYAFSTSGSHSHHPECSAVARSQLSAASISQAQAILPPQPPEKLELQECATASG

SEQ ID NO: 87592 - protein, 123 aa, Homo sapiens
  Payload ID: 17528
  Gene Symbol: TEN1
  Gene Name: TEN1 CST complex subunit
  Uniprot ID: Q86WV5
  ENSP ID: ENSP00000380762
MMLPKPGTYYLPWEVSAGQVPDGSTLRTFGRLCLYDMIQSRVTLMAQHGSDQHQVLVCTKLVEPFHAQVGSLYIVLGELQHQQDRGSVVKARVLTCVEGMNLPLLEQAIREQRLYKQERGGSQ

SEQ ID NO: 87593 - protein, 101 aa, Homo sapiens
  Payload ID: 17528
  Gene Symbol: TEN1
  Gene Name: TEN1 CST complex subunit
  ENSP ID: ENSP00000464792
MCLRGCKRNVLMKRVKLGKARWLMPVIPALWEAKEPMMLPKPGTYYLPWEVSAGQVPDGSTLRTFGRLCLYDMIQSRVTLMAQHGSDQHQVLVCTKLVEPF

SEQ ID NO: 87594 - protein, 55 aa, Homo sapiens
  Payload ID: 17528
  Gene Symbol: TEN1
  Gene Name: TEN1 CST complex subunit
  ENSP ID: ENSP00000465299
MMLPKPGTYYLPWEVSAGQVPDGSTLRTFGRLCLYDMIQSRVTLMAQHGSDQHQV

SEQ ID NO: 87595 - protein, 73 aa, Homo sapiens
  Payload ID: 17528
  Gene Symbol: TEN1
  Gene Name: TEN1 CST complex subunit
  ENSP ID: ENSP00000465866
MMLPKPGTYYLPWEVSAGQVPDGSTLRTFGRLCLYDMIQSRVTLMAQHGSDQHQVLVCTKLVEPFHAQTEAPW

SEQ ID NO: 87596 - protein, 305 aa, Homo sapiens; identical to SEQ ID NO: 21297
  Payload ID: 17529
  Gene Symbol: TEN1-CDK3
  Gene Name: TEN1-CDK3 readthrough (NMD candidate)
  ENSP ID: ENSP00000400088

SEQ ID NO: 87597 - protein, 2201 aa, Homo sapiens
  Payload ID: 17530
  Gene Symbol: TNC
  Gene Name: tenascin C
  Uniprot ID: P24821
  ENSP ID: ENSP00000265131
MGAMTQLLAGVFLAFLALATEGGVLKKVIRHKRQSGVNATLPEENQPVVFNHVYNIKLPVGSQCSVDLESASGEKDLAPPSEPSESFQEHTVDGENQIVFTHRINIPRRACGCAAAPDVKELLSRLEELENLVSSLREQCTAGAGCCLQPATGRLDTRPFCSGRGNFSTEGCGCVCEPGWKGPNCSEPECPGNCHLRGRCIDGQCICDDGFTGEDCSQLACPSDCNDQGKCVNGVCICFEGYAGADCSREICPVPCSEEHGTCVDGLCVCHDGFAGDDCNKPLCLNNCYNRGRCVENECVCDEGFTGEDCSELICPNDCFDRGRCINGTCYCEEGFTGEDCGKPTCPHACHTQGRCEEGQCVCDEGFAGVDCSEKRCPADCHNRGRCVDGRCECDDGFTGADCGELKCPNGCSGHGRCVNGQCVCDEGYTGEDCSQLRCPNDCHSRGRCVEGKCVCEQGFKGYDCSDMSCPNDCHQHGRCVNGMCVCDDGYTGEDCRDRQCPRDCSNRGLCVDGQCVCEDGFTGPDCAELSCPNDCHGQGRCVNGQCVCHEGFMGKDCKEQRCPSDCHGQGRCVDGQCICHEGFTGLDCGQHSCPSDCNNLGQCVSGRCICNEGYSGEDCSEVSPPKDLVVTEVTEETVNLAWDNEMRVTEYLVVYTPTHEGGLEMQFRVPGDQTSTIIQELEPGVEYFIRVFAILENKKSIPVSARVATYLPAPEGLKFKSIKETSVEVEWDPLDIAFETWEIIFRNMNKEDEGEITKSLRRPETSYRQTGLAPGQEYEISLHIVKNNTRGPGLKRVTTTRLDAPSQIEVKDVTDTTALITWFKPLAEIDGIELTYGIKDVPGDRTTIDLTEDENQYSIGNLKPDTEYEVSLISRRGDMSSNPAKETFTTGLDAPRNLRRVSQTDNSITLEWRNGKAAIDSYRIKYAPISGGDHAEVDVPKSQQATTKTTLTGLRPGTEYGIGVSAVKEDKESNPATINAATELDTPKDLQVSETAETSLTLLWKTPLAKFDRYRLNYSLPTGQWVGVQLPRNTTSYVLRGLEPGQEYNVLLTAEKGRHKSKPARVKASTEQAPELENLTVTEVGWDGLRLNWTAADQAYEHFIIQVQEANKVEAARNLTVPGSLRAVDIPGLKAATPYTVSIYGVIQGYRTPVLSAEASTGETPNLGEVVVAEVGWDALKLNWTAPEGAYEYFFIQVQEADTVEAAQNLTVPGGLRSTDLPGLKAATHYTITIRGVTQDFSTTPLSVEVLTEEVPDMGNLTVTEVSWDALRLNWTTPDGTYDQFTIQVQEADQVEEAHNLTVPGSLRSMEIPGLRAGTPYTVTLHGEVRGHSTRPLAVEVVTEDLPQLGDLAVSEVGWDGLRLNWTAADNAYEHFVIQVQEVNKVEAAQNLTLPGSLRAVDIPGLEAATPYRVSIYGVIRGYRTPVLSAEASTAKEPEIGNLNVSDITPESFNLSWMATDGIFETFTIEIIDSNRLLETVEYNISGAERTAHISGLPPSTDFIVYLSGLAPSIRTKTISATATTEALPLLENLTISDINPYGFTVSWMASENAFDSFLVTVVDSGKLLDPQEFTLSGTQRKLELRGLITGIGYEVMVSGFTQGHQTKPLRAEIVTEAEPEVDNLLVSDATPDGFRLSWTADEGVFDNFVLKIRDTKKQSEPLEITLLAPERTRDITGLREATEYEIELYGISKGRRSQTVSAIATTAMGSPKEVIFSDITENSATVSWRAPTAQVESFRITYVPITGGTPSMVTVDGTKTQTRLVKLIPGVEYLVSIIAMKGFEESEPVSGSFTTALDGPSGLVTANITDSEALARWQPAIATVDSYVISYTGEKVPEITRTVSGNTVEYALTDLEPATEYTLRIFAEKGPQKSSTITAKFTTDLDSPRDLTATEVQSETALLTWRPPRASVTGYLLVYESVDGTVKEVIVGPDTTSYSLADLSPSTHYTAKIQALNGPLRSNMIQTIFTTIGLLYPFPKDCSQAMLNGDTTSGLYTIYLNGDKAEALEVFCDMTSDGGGWIVFLRRKNGRENFYQNWKAYAAGFGDRREEFWLGLDNLNKITAQGQYELRVDLRDHGETAFAVYDKFSVGDAKTRYKLKVEGYSGTAGDSMAYHNGRSFSTFDKDTDSAITNCALSYKGAFWYRNCHRVNLMGRYGDNNHSQGVNWFHWKGHEHSIQFAEMKLRPSNFRNLEGRRKRA

SEQ ID NO: 87598 - protein, 2019 aa, Homo sapiens
  Payload ID: 17530
  Gene Symbol: TNC
  Gene Name: tenascin C
  ENSP ID: ENSP00000339553
MGAMTQLLAGVFLAFLALATEGGVLKKVIRHKRQSGVNATLPEENQPVVFNHVYNIKLPVGSQCSVDLESASGEKDLAPPSEPSESFQEHTVDGENQIVFTHRINIPRRACGCAAAPDVKELLSRLEELENLVSSLREQCTAGAGCCLQPATGRLDTRPFCSGRGNFSTEGCGCVCEPGWKGPNCSEPECPGNCHLRGRCIDGQCICDDGFTGEDCSQLACPSDCNDQGKCVNGVCICFEGYAGADCSREICPVPCSEEHGTCVDGLCVCHDGFAGDDCNKPLCLNNCYNRGRCVENECVCDEGFTGEDCSELICPNDCFDRGRCINGTCYCEEGFTGEDCGKPTCPHACHTQGRCEEGQCVCDEGFAGVDCSEKRCPADCHNRGRCVDGRCECDDGFTGADCGELKCPNGCSGHGRCVNGQCVCDEGYTGEDCSQLRCPNDCHSRGRCVEGKCVCEQGFKGYDCSDMSCPNDCHQHGRCVNGMCVCDDGYTGEDCRDRQCPRDCSNRGLCVDGQCVCEDGFTGPDCAELSCPNDCHGQGRCVNGQCVCHEGFMGKDCKEQRCPSDCHGQGRCVDGQCICHEGFTGLDCGQHSCPSDCNNLGQCVSGRCICNEGYSGEDCSEVSPPKDLVVTEVTEETVNLAWDNEMRVTEYLVVYTPTHEGGLEMQFRVPGDQTSTIIQELEPGVEYFIRVFAILENKKSIPVSARVATYLPAPEGLKFKSIKETSVEVEWDPLDIAFETWEIIFRNMNKEDEGEITKSLRRPETSYRQTGLAPGQEYEISLHIVKNNTRGPGLKRVTTTRLDAPSQIEVKDVTDTTALITWFKPLAEIDGIELTYGIKDVPGDRTTIDLTEDENQYSIGNLKPDTEYEVSLISRRGDMSSNPAKETFTTGLDAPRNLRRVSQTDNSITLEWRNGKAAIDSYRIKYAPISGGDHAEVDVPKSQQATTKTTLTGLRPGTEYGIGVSAVKEDKESNPATINAATELDTPKDLQVSETAETSLTLLWKTPLAKFDRYRLNYSLPTGQWVGVQLPRNTTSYVLRGLEPGQEYNVLLTAEKGRHKSKPARVKASTEQAPELENLTVTEVGWDGLRLNWTAADQAYEHFIIQVQEANKVEAARNLTVPGSLRAVDIPGLKAATPYTVSIYGVIQGYRTPVLSAEASTGETPNLGEVVVAEVGWDALKLNWTAPEGAYEYFFIQVQEADTVEAAQNLTVPGGLRSTDLPGLKAATHYTITIRGVTQDFSTTPLSVEVLTEDLPQLGDLAVSEVGWDGLRLNWTAADNAYEHFVIQVQEVNKVEAAQNLTLPGSLRAVDIPGLEAATPYRVSIYGVIRGYRTPVLSAEASTAKEPEIGNLNVSDITPESFNLSWMATDGIFETFTIEIIDSNRLLETVEYNISGAERTAHISGLPPSTDFIVYLSGLAPSIRTKTISATATTEAEPEVDNLLVSDATPDGFRLSWTADEGVFDNFVLKIRDTKKQSEPLEITLLAPERTRDITGLREATEYEIELYGISKGRRSQTVSAIATTAMGSPKEVIFSDITENSATVSWRAPTAQVESFRITYVPITGGTPSMVTVDGTKTQTRLVKLIPGVEYLVSIIAMKGFEESEPVSGSFTTALDGPSGLVTANITDSEALARWQPAIATVDSYVISYTGEKVPEITRTVSGNTVEYALTDLEPATEYTLRIFAEKGPQKSSTITAKFTTDLDSPRDLTATEVQSETALLTWRPPRASVTGYLLVYESVDGTVKEVIVGPDTTSYSLADLSPSTHYTAKIQALNGPLRSNMIQTIFTTIGLLYPFPKDCSQAMLNGDTTSGLYTIYLNGDKAEALEVFCDMTSDGGGWIVFLRRKNGRENFYQNWKAYAAGFGDRREEFWLGLDNLNKITAQGQYELRVDLRDHGETAFAVYDKFSVGDAKTRYKLKVEGYSGTAGDSMAYHNGRSFSTFDKDTDSAITNCALSYKGAFWYRNCHRVNLMGRYGDNNHSQGVNWFHWKGHEHSIQFAEMKLRPSNFRNLEGRRKRA

SEQ ID NO: 87599 - protein, 1928 aa, Homo sapiens
  Payload ID: 17530
  Gene Symbol: TNC
  Gene Name: tenascin C
  ENSP ID: ENSP00000411406
MGAMTQLLAGVFLAFLALATEGGVLKKVIRHKRQSGVNATLPEENQPVVFNHVYNIKLPVGSQCSVDLESASGEKDLAPPSEPSESFQEHTVDGENQIVFTHRINIPRRACGCAAAPDVKELLSRLEELENLVSSLREQCTAGAGCCLQPATGRLDTRPFCSGRGNFSTEGCGCVCEPGWKGPNCSEPECPGNCHLRGRCIDGQCICDDGFTGEDCSQLACPSDCNDQGKCVNGVCICFEGYAGADCSREICPVPCSEEHGTCVDGLCVCHDGFAGDDCNKPLCLNNCYNRGRCVENECVCDEGFTGEDCSELICPNDCFDRGRCINGTCYCEEGFTGEDCGKPTCPHACHTQGRCEEGQCVCDEGFAGVDCSEKRCPADCHNRGRCVDGRCECDDGFTGADCGELKCPNGCSGHGRCVNGQCVCDEGYTGEDCSQLRCPNDCHSRGRCVEGKCVCEQGFKGYDCSDMSCPNDCHQHGRCVNGMCVCDDGYTGEDCRDRQCPRDCSNRGLCVDGQCVCEDGFTGPDCAELSCPNDCHGQGRCVNGQCVCHEGFMGKDCKEQRCPSDCHGQGRCVDGQCICHEGFTGLDCGQHSCPSDCNNLGQCVSGRCICNEGYSGEDCSEVSPPKDLVVTEVTEETVNLAWDNEMRVTEYLVVYTPTHEGGLEMQFRVPGDQTSTIIQELEPGVEYFIRVFAILENKKSIPVSARVATYLPAPEGLKFKSIKETSVEVEWDPLDIAFETWEIIFRNMNKEDEGEITKSLRRPETSYRQTGLAPGQEYEISLHIVKNNTRGPGLKRVTTTRLDAPSQIEVKDVTDTTALITWFKPLAEIDGIELTYGIKDVPGDRTTIDLTEDENQYSIGNLKPDTEYEVSLISRRGDMSSNPAKETFTTGLDAPRNLRRVSQTDNSITLEWRNGKAAIDSYRIKYAPISGGDHAEVDVPKSQQATTKTTLTGLRPGTEYGIGVSAVKEDKESNPATINAATELDTPKDLQVSETAETSLTLLWKTPLAKFDRYRLNYSLPTGQWVGVQLPRNTTSYVLRGLEPGQEYNVLLTAEKGRHKSKPARVKASTEQAPELENLTVTEVGWDGLRLNWTAADQAYEHFIIQVQEANKVEAARNLTVPGSLRAVDIPGLKAATPYTVSIYGVIQGYRTPVLSAEASTGETPNLGEVVVAEVGWDALKLNWTAPEGAYEYFFIQVQEADTVEAAQNLTVPGGLRSTDLPGLKAATHYTITIRGVTQDFSTTPLSVEVLTEEVPDMGNLTVTEVSWDALRLNWTTPDGTYDQFTIQVQEADQVEEAHNLTVPGSLRSMEIPGLRAGTPYTVTLHGEVRGHSTRPLAVEVVTEDLPQLGDLAVSEVGWDGLRLNWTAADNAYEHFVIQVQEVNKVEAAQNLTLPGSLRAVDIPGLEAATPYRVSIYGVIRGYRTPVLSAEASTAMGSPKEVIFSDITENSATVSWRAPTAQVESFRITYVPITGGTPSMVTVDGTKTQTRLVKLIPGVEYLVSIIAMKGFEESEPVSGSFTTALDGPSGLVTANITDSEALARWQPAIATVDSYVISYTGEKVPEITRTVSGNTVEYALTDLEPATEYTLRIFAEKGPQKSSTITAKFTTDLDSPRDLTATEVQSETALLTWRPPRASVTGYLLVYESVDGTVKEVIVGPDTTSYSLADLSPSTHYTAKIQALNGPLRSNMIQTIFTTIGLLYPFPKDCSQAMLNGDTTSGLYTIYLNGDKAEALEVFCDMTSDGGGWIVFLRRKNGRENFYQNWKAYAAGFGDRREEFWLGLDNLNKITAQGQYELRVDLRDHGETAFAVYDKFSVGDAKTRYKLKVEGYSGTAGDSMAYHNGRSFSTFDKDTDSAITNCALSYKGAFWYRNCHRVNLMGRYGDNNHSQGVNWFHWKGHEHSIQFAEMKLRPSNFRNLEGRRKRA

SEQ ID NO: 87600 - protein, 1838 aa, Homo sapiens
  Payload ID: 17530
  Gene Symbol: TNC
  Gene Name: tenascin C
  ENSP ID: ENSP00000438152
MGAMTQLLAGVFLAFLALATEGGVLKKVIRHKRQSGVNATLPEENQPVVFNHVYNIKLPVGSQCSVDLESASGEKDLAPPSEPSESFQEHTVDGENQIVFTHRINIPRRACGCAAAPDVKELLSRLEELENLVSSLREQCTAGAGCCLQPATGRLDTRPFCSGRGNFSTEGCGCVCEPGWKGPNCSEPECPGNCHLRGRCIDGQCICDDGFTGEDCSQLACPSDCNDQGKCVNGVCICFEGYAGADCSREICPVPCSEEHGTCVDGLCVCHDGFAGDDCNKPLCLNNCYNRGRCVENECVCDEGFTGEDCSELICPNDCFDRGRCINGTCYCEEGFTGEDCGKPTCPHACHTQGRCEEGQCVCDEGFAGVDCSEKRCPADCHNRGRCVDGRCECDDGFTGADCGELKCPNGCSGHGRCVNGQCVCDEGYTGEDCSQLRCPNDCHSRGRCVEGKCVCEQGFKGYDCSDMSCPNDCHQHGRCVNGMCVCDDGYTGEDCRDRQCPRDCSNRGLCVDGQCVCEDGFTGPDCAELSCPNDCHGQGRCVNGQCVCHEGFMGKDCKEQRCPSDCHGQGRCVDGQCICHEGFTGLDCGQHSCPSDCNNLGQCVSGRCICNEGYSGEDCSEVSPPKDLVVTEVTEETVNLAWDNEMRVTEYLVVYTPTHEGGLEMQFRVPGDQTSTIIQELEPGVEYFIRVFAILENKKSIPVSARVATYLPAPEGLKFKSIKETSVEVEWDPLDIAFETWEIIFRNMNKEDEGEITKSLRRPETSYRQTGLAPGQEYEISLHIVKNNTRGPGLKRVTTTRLDAPSQIEVKDVTDTTALITWFKPLAEIDGIELTYGIKDVPGDRTTIDLTEDENQYSIGNLKPDTEYEVSLISRRGDMSSNPAKETFTTGLDAPRNLRRVSQTDNSITLEWRNGKAAIDSYRIKYAPISGGDHAEVDVPKSQQATTKTTLTGLRPGTEYGIGVSAVKEDKESNPATINAATELDTPKDLQVSETAETSLTLLWKTPLAKFDRYRLNYSLPTGQWVGVQLPRNTTSYVLRGLEPGQEYNVLLTAEKGRHKSKPARVKASTAKEPEIGNLNVSDITPESFNLSWMATDGIFETFTIEIIDSNRLLETVEYNISGAERTAHISGLPPSTDFIVYLSGLAPSIRTKTISATATTEPKPQLGTLIFSNITPKSFNMSWTTQAGLFAKIVINVSDAHSLHESQQFTVSGDAKQAHITGLVENTGYDVSVAGTTLAGDPTRPLTAFVITEAEPEVDNLLVSDATPDGFRLSWTADEGVFDNFVLKIRDTKKQSEPLEITLLAPERTRDITGLREATEYEIELYGISKGRRSQTVSAIATTAMGSPKEVIFSDITENSATVSWRAPTAQVESFRITYVPITGGTPSMVTVDGTKTQTRLVKLIPGVEYLVSIIAMKGFEESEPVSGSFTTALDGPSGLVTANITDSEALARWQPAIATVDSYVISYTGEKVPEITRTVSGNTVEYALTDLEPATEYTLRIFAEKGPQKSSTITAKFTTDLDSPRDLTATEVQSETALLTWRPPRASVTGYLLVYESVDGTVKEVIVGPDTTSYSLADLSPSTHYTAKIQALNGPLRSNMIQTIFTTIGLLYPFPKDCSQAMLNGDTTSGLYTIYLNGDKAEALEVFCDMTSDGGGWIVFLRRKNGRENFYQNWKAYAAGFGDRREEFWLGLDNLNKITAQGQYELRVDLRDHGETAFAVYDKFSVGDAKTRYKLKVEGYSGTAGDSMAYHNGRSFSTFDKDTDSAITNCALSYKGAFWYRNCHRVNLMGRYGDNNHSQGVNWFHWKGHEHSIQFAEMKLRPSNFRNLEGRRKRA

SEQ ID NO: 87601 - protein, 1838 aa, Homo sapiens; identical to SEQ ID NO: 87600
  Payload ID: 17530
  Gene Symbol: TNC
  Gene Name: tenascin C
  ENSP ID: ENSP00000442242

SEQ ID NO: 87602 - protein, 92 aa, Homo sapiens
  Payload ID: 17530
  Gene Symbol: TNC
  Gene Name: tenascin C
  ENSP ID: ENSP00000443469
MGAMTQLLAGVFLAFLALATEGGVLKKVIRHKRQSGVNATLPEENQPVVFNHVYNIKLPVGSQCSVDLESASGEKDLAPPSEPSESFQEHTV

SEQ ID NO: 87603 - protein, 1564 aa, Homo sapiens
  Payload ID: 17530
  Gene Symbol: TNC
  Gene Name: tenascin C
  Uniprot ID: P24821
  ENSP ID: ENSP00000443478
MGAMTQLLAGVFLAFLALATEGGVLKKVIRHKRQSGVNATLPEENQPVVFNHVYNIKLPVGSQCSVDLESASGEKDLAPPSEPSESFQEHTVDGENQIVFTHRINIPRRACGCAAAPDVKELLSRLEELENLVSSLREQCTAGAGCCLQPATGRLDTRPFCSGRGNFSTEGCGCVCEPGWKGPNCSEPECPGNCHLRGRCIDGQCICDDGFTGEDCSQLACPSDCNDQGKCVNGVCICFEGYAGADCSREICPVPCSEEHGTCVDGLCVCHDGFAGDDCNKPLCLNNCYNRGRCVENECVCDEGFTGEDCSELICPNDCFDRGRCINGTCYCEEGFTGEDCGKPTCPHACHTQGRCEEGQCVCDEGFAGVDCSEKRCPADCHNRGRCVDGRCECDDGFTGADCGELKCPNGCSGHGRCVNGQCVCDEGYTGEDCSQLRCPNDCHSRGRCVEGKCVCEQGFKGYDCSDMSCPNDCHQHGRCVNGMCVCDDGYTGEDCRDRQCPRDCSNRGLCVDGQCVCEDGFTGPDCAELSCPNDCHGQGRCVNGQCVCHEGFMGKDCKEQRCPSDCHGQGRCVDGQCICHEGFTGLDCGQHSCPSDCNNLGQCVSGRCICNEGYSGEDCSEVSPPKDLVVTEVTEETVNLAWDNEMRVTEYLVVYTPTHEGGLEMQFRVPGDQTSTIIQELEPGVEYFIRVFAILENKKSIPVSARVATYLPAPEGLKFKSIKETSVEVEWDPLDIAFETWEIIFRNMNKEDEGEITKSLRRPETSYRQTGLAPGQEYEISLHIVKNNTRGPGLKRVTTTRLDAPSQIEVKDVTDTTALITWFKPLAEIDGIELTYGIKDVPGDRTTIDLTEDENQYSIGNLKPDTEYEVSLISRRGDMSSNPAKETFTTGLDAPRNLRRVSQTDNSITLEWRNGKAAIDSYRIKYAPISGGDHAEVDVPKSQQATTKTTLTGLRPGTEYGIGVSAVKEDKESNPATINAATELDTPKDLQVSETAETSLTLLWKTPLAKFDRYRLNYSLPTGQWVGVQLPRNTTSYVLRGLEPGQEYNVLLTAEKGRHKSKPARVKASTAMGSPKEVIFSDITENSATVSWRAPTAQVESFRITYVPITGGTPSMVTVDGTKTQTRLVKLIPGVEYLVSIIAMKGFEESEPVSGSFTTALDGPSGLVTANITDSEALARWQPAIATVDSYVISYTGEKVPEITRTVSGNTVEYALTDLEPATEYTLRIFAEKGPQKSSTITAKFTTDLDSPRDLTATEVQSETALLTWRPPRASVTGYLLVYESVDGTVKEVIVGPDTTSYSLADLSPSTHYTAKIQALNGPLRSNMIQTIFTTIGLLYPFPKDCSQAMLNGDTTSGLYTIYLNGDKAEALEVFCDMTSDGGGWIVFLRRKNGRENFYQNWKAYAAGFGDRREEFWLGLDNLNKITAQGQYELRVDLRDHGETAFAVYDKFSVGDAKTRYKLKVEGYSGTAGDSMAYHNGRSFSTFDKDTDSAITNCALSYKGAFWYRNCHRVNLMGRYGDNNHSQGVNWFHWKGHEHSIQFAEMKLRPSNFRNLEGRRKRA

SEQ ID NO: 87604 - protein, 615 aa, Homo sapiens
  Payload ID: 17530
  Gene Symbol: TNC
  Gene Name: tenascin C
  ENSP ID: ENSP00000445380
  MOD_RES (1)..(1): Any amino acid
XPELENLTVTEVGWDGLRLNWTAADQAYEHFIIQVQEANKVEAARNLTVPGSLRAVDIPGLKAATPYTVSIYGVIQGYRTPVLSAEASTAKEPEIGNLNVSDITPESFNLSWMATDGIFETFTIEIIDSNRLLETVEYNISGAERTAHISGLPPSTDFIVYLSGLAPSIRTKTISATATTEAEPEVDNLLVSDATPDGFRLSWTADEGVFDNFVLKIRDTKKQSEPLEITLLAPERTRDITGLREATEYEIELYGISKGRRSQTVSAIATTAMGSPKEVIFSDITENSATVSWRAPTAQVESFRITYVPITGGTPSMVTVDGTKTQTRLVKLIPGVEYLVSIIAMKGFEESEPVSGSFTTALDGPSGLVTANITDSEALARWQPAIATVDSYVISYTGEKVPEITRTVSGNTVEYALTDLEPATEYTLRIFAEKGPQKSSTITAKFTTDLDSPRDLTATEVQSETALLTWRPPRASVTGYLLVYESVDGTVKEVIVGPDTTSYSLADLSPSTHYTAKIQALNGPLRSNMIQTIFTTIGLLYPFPKDCSQAMLNGDTTSGLYTIYLNGDKAEALEVFCDMTSDGGGWIVFLRRKNGRENFYQNWKAYAAGFGDRRE

SEQ ID NO: 87605 - protein, 23 aa, Homo sapiens
  Payload ID: 17530
  Gene Symbol: TNC
  Gene Name: tenascin C
  ENSP ID: ENSP00000489385
ASTEAEPEVDNLLVSDATPDGFR

SEQ ID NO: 87606 - protein, 1299 aa, Homo sapiens
  Payload ID: 17531
  Gene Symbol: TNN
  Gene Name: tenascin N
  Uniprot ID: Q9UQP3
  ENSP ID: ENSP00000239462
MSLQEMFRFPMGLLLGSVLLVASAPATLEPPGCSNKEQQVTVSHTYKIDVPKSALVQVDADPQPLSDDGASLLALGEAREEQNIIFRHNIRLQTPQKDCELAGSVQDLLARVKKLEEEMVEMKEQCSAQRCCQGVTDLSRHCSGHGTFSLETCSCHCEEGREGPACERLACPGACSGHGRCVDGRCLCHEPYVGADCGYPACPENCSGHGECVRGVCQCHEDFMSEDCSEKRCPGDCSGHGFCDTGECYCEEGFTGLDCAQVVTPQGLQLLKNTEDSLLVSWEPSSQVDHYLLSYYPLGKELSGKQIQVPKEQHSYEILGLLPGTKYIVTLRNVKNEVSSSPQHLLATTDLAVLGTAWVTDETENSLDVEWENPSTEVDYYKLRYGPMTGQEVAEVTVPKSSDPKSRYDITGLHPGTEYKITVVPMRGELEGKPILLNGRTEIDSPTNVVTDRVTEDTATVSWDPVQAVIDKYVVRYTSADGDTKEMAVHKDESSTVLTGLKPGEAYKVYVWAERGNQGSKKADTNALTEIDSPANLVTDRVTENTATISWDPVQATIDKYVVRYTSADDQETREVLVGKEQSSTVLTGLRPGVEYTVHVWAQKGDRESKKADTNAPTDIDSPKNLVTDRVTENMATVSWDPVQAAIDKYVVRYTSAGGETREVPVGKEQSSTVLTGLRPGMEYMVHVWAQKGDQESKKADTKAQTDIDSPQNLVTDRVTENMATVSWDPVRATIDRYVVRYTSAKDGETREVPVGKEQSSTVLTGLRPGVEYTVHVWAQKGAQESKKADTKAQTDIDSPQNLVTDWVTENTATVSWDPVQATIDRYVVHYTSANGETREVPVGKEQSSTVLTGLRPGMEYTVHVWAQKGNQESKKADTKAQTEIDGPKNLVTDWVTENMATVSWDPVQATIDKYMVRYTSADGETREVPVGKEHSSTVLTGLRPGMEYMVHVWAQKGAQESKKADTKAQTELDPPRNLRPSAVTQSGGILTWTPPSAQIHGYILTYQFPDGTVKEMQLGREDQRFALQGLEQGATYPVSLVAFKGGRRSRNVSTTLSTVGARFPHPSDCSQVQQNSNAASGLYTIYLHGDASRPLQVYCDMETDGGGWIVFQRRNTGQLDFFKRWRSYVEGFGDPMKEFWLGLDKLHNLTTGTPARYEVRVDLQTANESAYAIYDFFQVASSKERYKLTVGKYRGTAGDALTYHNGWKFTTFDRDNDIALSNCALTHHGGWWYKNCHLANPNGRYGETKHSEGVNWEPWKGHEFSIPYVELKIRPHGYSREPVLGRKKRTLRGRLRTF

SEQ ID NO: 87607 - protein, 1122 aa, Homo sapiens
  Payload ID: 17531
  Gene Symbol: TNN
  Gene Name: tenascin N
  ENSP ID: ENSP00000480895
MSLQEMFRFPMGLLLGSVLLVASAPATLEPPGCSNKEQQVTVSHTYKIDVPKSALVQVDADPQPLSDDGASLLALGEAREEQNIIFRHNIRLQTPQKDCELAGSVQDLLARVKKLEEEMVEMKEQCSAQRCCQGVTDLSRHCSGHGTFSLETCSCHCEEGREGPACERLACPGACSGHGRCVDGRCLCHEPYVGADCGYPACPENCSGHGECVRGVCQCHEDFMSEDCSEKRCPGDCSGHGFCDTGECYCEEGFTGLDCAQVVTPQGLQLLKNTEDSLLVSWEPSSQVDHYLLSYYPLGKELSGKQIQVPKEQHSYEILGLLPGTKYIVTLRNVKNEVSSSPQHLLATTDLAVLGTAWVTDETENSLDVEWENPSTEVDYYKLRYGPMTGQEVAEVTVPKSSDPKSRYDITGLHPGTEYKITVVPMRGELEGKPILLNGRTEIDSPTNVVTDRVTEDTATVSWDPVQAVIDKYVVRYTSADGDTKEMAVHKDESSTVLTGLKPGEAYKVYVWAERGNQGSKKADTNALTDIDSPQNLVTDRVTENMATVSWDPVRATIDRYVVRYTSAKDGETREVPVGKEQSSTVLTGLRPGVEYTVHVWAQKGAQESKKADTKAQTDIDSPQNLVTDWVTENTATVSWDPVQATIDRYVVHYTSANGETREVPVGKEQSSTVLTGLRPGMEYTVHVWAQKGNQESKKADTKAQTEIDGPKNLVTDWVTENMATVSWDPVQATIDKYMVRYTSADGETREVPVGKEHSSTVLTGLRPGMEYMVHVWAQKGAQESKKADTKAQTELDPPRNLRPSAVTQSGGILTWTPPSAQIHGYILTYQFPDGTVKEMQLGREDQRFALQGLEQGATYPVSLVAFKGGRRSRNVSTTLSTVGARFPHPSDCSQVQQNSNAASGLYTIYLHGDASRPLQVYCDMETDGGGWIVFQRRNTGQLDFFKRWRSYVEGFGDPMKEFWLGLDKLHNLTTGTPARYEVRVDLQTANESAYAIYDFFQVASSKERYKLTVGKYRGTAGDALTYHNGWKFTTFDRDNDIALSNCALTHHGGWWYKNCHLANPNGRYGETKHSEGVNWEPWKGHEFSIPYVELKIRPHGYSREPVLGRKKRTLRGRLRTF

SEQ ID NO: 87608 - protein, 1122 aa, Homo sapiens
  Payload ID: 17531
  Gene Symbol: TNN
  Gene Name: tenascin N
  ENSP ID: ENSP00000481259
MSLQEMFRFPMGLLLGSVLLVASAPATLEPPGCSNKEQQVTVSHTYKIDVPKSALVQVDADPQPLSDDGASLLALGEAREEQNIIFRHNIRLQTPQKDCELAGSVQDLLARVKKLEEEMVEMKEQCSAQRCCQGVTDLSRHCSGHGTFSLETCSCHCEEGREGPACERLACPGACSGHGRCVDGRCLCHEPYVGADCGYPACPENCSGHGECVRGVCQCHEDFMSEDCSEKRCPGDCSGHGFCDTGECYCEEGFTGLDCAQVVTPQGLQLLKNTEDSLLVSWEPSSQVDHYLLSYYPLGKELSGKQIQVPKEQHSYEILGLLPGTKYIVTLRNVKNEVSSSPQHLLATTDLAVLGTAWVTDETENSLDVEWENPSTEVDYYKLRYGPMTGQEVAEVTVPKSSDPKSRYDITGLHPGTEYKITVVPMRGELEGKPILLNGRTEIDSPTNVVTDRVTEDTATVSWDPVQAVIDKYVVRYTSADGDTKEMAVHKDESSTVLTGLKPGEAYKVYVWAERGNQGSKKADTNALTEIDSPANLVTDRVTENTATISWDPVQATIDRYVVRYTSAKDGETREVPVGKEQSSTVLTGLRPGVEYTVHVWAQKGAQESKKADTKAQTDIDSPQNLVTDWVTENTATVSWDPVQATIDRYVVHYTSANGETREVPVGKEQSSTVLTGLRPGMEYTVHVWAQKGNQESKKADTKAQTEIDGPKNLVTDWVTENMATVSWDPVQATIDKYMVRYTSADGETREVPVGKEHSSTVLTGLRPGMEYMVHVWAQKGAQESKKADTKAQTELDPPRNLRPSAVTQSGGILTWTPPSAQIHGYILTYQFPDGTVKEMQLGREDQRFALQGLEQGATYPVSLVAFKGGRRSRNVSTTLSTVGARFPHPSDCSQVQQNSNAASGLYTIYLHGDASRPLQVYCDMETDGGGWIVFQRRNTGQLDFFKRWRSYVEGFGDPMKEFWLGLDKLHNLTTGTPARYEVRVDLQTANESAYAIYDFFQVASSKERYKLTVGKYRGTAGDALTYHNGWKFTTFDRDNDIALSNCALTHHGGWWYKNCHLANPNGRYGETKHSEGVNWEPWKGHEFSIPYVELKIRPHGYSREPVLGRKKRTLRGRLRTF

SEQ ID NO: 87609 - protein, 1358 aa, Homo sapiens
  Payload ID: 17532
  Gene Symbol: TNR
  Gene Name: tenascin R
  Uniprot ID: Q92752
  ENSP ID: ENSP00000263525
MGADGETVVLKNMLIGINLILLGSMIKPSECQLEVTTERVQRQSVEEEGGIANYNTSSKEQPVVFNHVYNINVPLDNLCSSGLEASAEQEVSAEDETLAEYMGQTSDHESQVTFTHRINFPKKACPCASSAQVLQELLSRIEMLEREVSVLRDQCNANCCQESAATGQLDYIPHCSGHGNFSFESCGCICNEGWFGKNCSEPYCPLGCSSRGVCVDGQCICDSEYSGDDCSELRCPTDCSSRGLCVDGECVCEEPYTGEDCRELRCPGDCSGKGRCANGTCLCEEGYVGEDCGQRQCLNACSGRGQCEEGLCVCEEGYQGPDCSAVAPPEDLRVAGISDRSIELEWDGPMAVTEYVISYQPTALGGLQLQQRVPGDWSGVTITELEPGLTYNISVYAVISNILSLPITAKVATHLSTPQGLQFKTITETTVEVQWEPFSFSFDGWEISFIPKNNEGGVIAQVPSDVTSFNQTGLKPGEEYIVNVVALKEQARSPPTSASVSTVIDGPTQILVRDVSDTVAFVEWIPPRAKVDFILLKYGLVGGEGGRTTFRLQPPLSQYSVQALRPGSRYEVSVSAVRGTNESDSATTQFTTEIDAPKNLRVGSRTATSLDLEWDNSEAEVQEYKVVYSTLAGEQYHEVLVPRGIGPTTRATLTDLVPGTEYGVGISAVMNSQQSVPATMNARTELDSPRDLMVTASSETSISLIWTKASGPIDHYRITFTPSSGIASEVTVPKDRTSYTLTDLEPGAEYIISVTAERGRQQSLESTVDAFTGFRPISHLHFSHVTSSSVNITWSDPSPPADRLILNYSPRDEEEEMMEVSLDATKRHAVLMGLQPATEYIVNLVAVHGTVTSEPIVGSITTGIDPPKDITISNVTKDSVMVSWSPPVASFDYYRVSYRPTQVGRLDSSVVPNTVTEFTITRLNPATEYEISLNSVRGREESERICTLVHTAMDNPVDLIATNITPTEALLQWKAPVGEVENYVIVLTHFAVAGETILVDGVSEEFRLVDLLPSTHYTATMYATNGPLTSGTISTNFSTLLDPPANLTASEVTRQSALISWQPPRAEIENYVLTYKSTDGSRKELIVDAEDTWIRLEGLLENTDYTVLLQAAQDTTWSSITSTAFTTGGRVFPHPQDCAQHLMNGDTLSGVYPIFLNGELSQKLQVYCDMTTDGGGWIVFQRRQNGQTDFFRKWADYRVGFGNVEDEFWLGLDNIHRITSQGRYELRVDMRDGQEAAFASYDRFSVEDSRNLYKLRIGSYNGTAGDSLSYHQGRPFSTEDRDNDVAVTNCAMSYKGAWWYKNCHRTNLNGKYGESRHSQGINWYHWKGHEFSIPFVEMKMRPYNHRLMAGRKRQSLQF

SEQ ID NO: 87610 - protein, 1358 aa, Homo sapiens; identical to SEQ ID NO: 87609
  Payload ID: 17532
  Gene Symbol: TNR
  Gene Name: tenascin R
  Uniprot ID: Q92752
  ENSP ID: ENSP00000356646

SEQ ID NO: 87611 - protein, 180 aa, Homo sapiens
  Payload ID: 17532
  Gene Symbol: TNR
  Gene Name: tenascin R
  ENSP ID: ENSP00000403413
  MOD_RES (1)..(1): Any amino acid
XINFPKKACPCASSAQVLQELLSRIEMLEREVSVLRDQCNANCCQESAATVAPPEDLRVAGISDRSIELEWDGPMAVTEYVISYQPTALGGLQLQQRVPGDWSGVTITELEPGLTYNISVYAVISNILSLPITAKVATHLSTPQGLQFKTITETTVEVQWEPFSFSFDGWEISFIPKNNE

SEQ ID NO: 87612 - protein, 4244 aa, Homo sapiens
  Payload ID: 17533
  Gene Symbol: TNXB
  Gene Name: tenascin XB
  Uniprot ID: P22105
  ENSP ID: ENSP00000364393
MMPAQYALTSSLVLLVLLSTARAGPFSSRSNVTLPAPRPPPQPGGHTVGAGVGSPSSQLYEHTVEGGEKQVVFTHRINLPPSTGCGCPPGTEPPVLASEVQALRVRLEILEELVKGLKEQCTGGCCPASAQAGTGQTDVRTLCSLHGVFDLSRCTCSCEPGWGGPTCSDPTDAEIPPSSPPSASGSCPDDCNDQGRCVRGRCVCFPGYTGPSCGWPSCPGDCQGRGRCVQGVCVCRAGFSGPDCSQRSCPRGCSQRGRCEGGRCVCDPGYTGDDCGMRSCPRGCSQRGRCENGRCVCNPGYTGEDCGVRSCPRGCSQRGRCKDGRCVCDPGYTGEDCGTRSCPWDCGEGGRCVDGRCVCWPGYTGEDCSTRTCPRDCRGRGRCEDGECICDTGYSGDDCGVRSCPGDCNQRGRCEDGRCVCWPGYTGTDCGSRACPRDCRGRGRCENGVCVCNAGYSGEDCGVRSCPGDCRGRGRCESGRCMCWPGYTGRDCGTRACPGDCRGRGRCVDGRCVCNPGFTGEDCGSRRCPGDCRGHGLCEDGVCVCDAGYSGEDCSTRSCPGGCRGRGQCLDGRCVCEDGYSGEDCGVRQCPNDCSQHGVCQDGVCICWEGYVSEDCSIRTCPSNCHGRGRCEEGRCLCDPGYTGPTCATRMCPADCRGRGRCVQGVCLCHVGYGGEDCGQEEPPASACPGGCGPRELCRAGQCVCVEGFRGPDCAIQTCPGDCRGRGECHDGSCVCKDGYAGEDCGEEVPTIEGMRMHLLEETTVRTEWTPAPGPVDAYEIQFIPTTEGASPPFTARVPSSASAYDQRGLAPGQEYQVTVRALRGTSWGLPASKTITTMIDGPQDLRVVAVTPTTLELGWLRPQAEVDRFVVSYVSAGNQRVRLEVPPEADGTLLTDLMPGVEYVVTVTAERGRAVSYPASVRANTGSSPLGLLGTTDEPPPSGPSTTQGAQAPLLQQRPQELGELRVLGRDETGRLRVVWTAQPDTFAYFQLRMRVPEGPGAHEEVLPGDVRQALVPPPPPGTPYELSLHGVPPGGKPSDPIIYQGIMDKDEEKPGKSSGPPRLGELTVTDRTSDSLLLRWTVPEGEFDSFVIQYKDRDGQPQVVPVEGPQRSAVITSLDPGRKYKFVLYGFVGKKRHGPLVAEAKILPQSDPSPGTPPHLGNLWVTDPTPDSLHLSWTVPEGQFDTFMVQYRDRDGRPQVVPVEGPERSFVVSSLDPDHKYRFTLFGIANKKRYGPLTADGTTAPERKEEPPRPEFLEQPLLGELTVTGVTPDSLRLSWTVAQGPFDSFMVQYKDAQGQPQAVPVAGDENEVTVPGLDPDRKYKMNLYGLRGRQRVGPESVVAKTAPQEDVDETPSPTELGTEAPESPEEPLLGELTVTGSSPDSLSLFWTVPQGSFDSFTVQYKDRDGRPRAVRVGGKESEVTVGGLEPGHKYKMHLYGLHEGQRVGPVSAVGVTAPQQEETPPATESPLEPRLGELTVTDVTPNSVGLSWTVPEGQFDSFIVQYKDKDGQPQVVPVAADQREVTVYNLEPERKYKMNMYGLHDGQRMGPLSVVIVTAPLPPAPATEASKPPLEPRLGELTVTDITPDSVGLSWTVPEGEFDSFVVQYKDRDGQPQVVPVAADQREVTIPDLEPSRKYKFLLFGIQDGKRRSPVSVEAKTVARGDASPGAPPRLGELWVTDPTPDSLRLSWTVPEGQFDSFVVQFKDKDGPQVVPVEGHERSVTVTPLDAGRKYRFLLYGLLGKKRHGPLTADGTTEARSAMDDTGTKRPPKPRLGEELQVTTVTQNSVGLSWTVPEGQFDSFVVQYKDRDGQPQVVPVEGSLREVSVPGLDPAHRYKLLLYGLHHGKRVGPISAVAITAGREETETETTAPTPPAPEPHLGELTVEEATSHTLHLSWMVTEGEFDSFEIQYTDRDGQLQMVRIGGDRNDITLSGLESDHRYLVTLYGFSDGKHVGPVHVEALTVPEEEKPSEPPTATPEPPIKPRLGELTVTDATPDSLSLSWTVPEGQFDHFLVQYRNGDGQPKAVRVPGHEEGVTISGLEPDHKYKMNLYGFHGGQRMGPVSVVGVTAAEEETPSPTEPSMEAPEPAEEPLLGELTVTGSSPDSLSLSWTVPQGRFDSFTVQYKDRDGRPQVVRVGGEESEVTVGGLEPGRKYKMHLYGLHEGRRVGPVSAVGVTAPEEESPDAPLAKLRLGQMTVRDITSDSLSLSWTVPEGQFDHFLVQFKNGDGQPKAVRVPGHEDGVTISGLEPDHKYKMNLYGFHGGQRVGPVSAVGLTAPGKDEEMAPASTEPPTPEPPIKPRLEELTVTDATPDSLSLSWTVPEGQFDHFLVQYKNGDGQPKATRVPGHEDRVTISGLEPDNKYKMNLYGFHGGQRVGPVSAIGVTAAEEETPSPTEPSMEAPEPPEEPLLGELTVTGSSPDSLSLSWTVPQGRFDSFTVQYKDRDGRPQVVRVGGEESEVTVGGLEPGRKYKMHLYGLHEGRRVGPVSTVGVTAPQEDVDETPSPTEPGTEAPGPPEEPLLGELTVTGSSPDSLSLSWTVPQGRFDSFTVQYKDRDGRPQAVRVGGQESKVTVRGLEPGRKYKMHLYGLHEGRRLGPVSAVGVTEDEAETTQAVPTMTPEPPIKPRLGELTMTDATPDSLSLSWTVPEGQFDHFLVQYRNGDGQPKAVRVPGHEDGVTISGLEPDHKYKMNLYGFHGGQRVGPISVIGVTAAEEETPSPTELSTEAPEPPEEPLLGELTVTGSSPDSLSLSWTIPQGHFDSFTVQYKDRDGRPQVMRVRGEESEVTVGGLEPGRKYKMHLYGLHEGRRVGPVSTVGVTAPEDEAETTQAVPTTTPEPPNKPRLGELTVTDATPDSLSLSWMVPEGQFDHFLVQYRNGDGQPKVVRVPGHEDGVTISGLEPDHKYKMNLYGFHGGQRVGPISVIGVTAAEEETPAPTEPSTEAPEPPEEPLLGELTVTGSSPDSLSLSWTIPQGRFDSFTVQYKDRDGRPQVVRVRGEESEVTVGGLEPGCKYKMHLYGLHEGQRVGPVSAVGVTAPKDEAETTQAVPTMTPEPPIKPRLGELTVTDATPDSLSLSWMVPEGQFDHFLVQYRNGDGQPKAVRVPGHEDGVTISGLEPDHKYKMNLYGFHGGQRVGPVSAIGVTEEETPSPTEPSTEAPEAPEEPLLGELTVTGSSPDSLSLSWTVPQGRFDSFTVQYKDRDGQPQVVRVRGEESEVTVGGLEPGRKYKMHLYGLHEGQRVGPVSTVGITAPLPTPLPVEPRLGELAVAAVTSDSVGLSWTVAQGPFDSFLVQYRDAQGQPQAVPVSGDLRAVAVSGLDPARKYKFLLFGLQNGKRHGPVPVEARTAPDTKPSPRLGELTVTDATPDSVGLSWTVPEGEFDSFVVQYKDKDGRLQVVPVAANQREVTVQGLEPSRKYRFLLYGLSGRKRLGPISADSTTAPLEKELPPHLGELTVAEETSSSLRLSWTVAQGPFDSFVVQYRDTDGQPRAVPVAADQRTVTVEDLEPGKKYKFLLYGLLGGKRLGPVSALGMTAPEEDTPAPELAPEAPEPPEEPRLGVLTVTDTTPDSMRLSWSVAQGPFDSFVVQYEDTNGQPQALLVDGDQSKILISGLEPSTPYRFLLYGLHEGKRLGPLSAEGTTGLAPAGQTSEESRPRLSQLSVTDVTTSSLRLNWEAPPGAFDSFLLRFGVPSPSTLEPHPRPLLQRELMVPGTRHSAVLRDLRSGTLYSLTLYGLRGPHKADSIQGTARTLSPVLESPRDLQFSEIRETSAKVNWMPPPSRADSFKVSYQLADGGEPQSVQVDGQARTQKLQGLIPGARYEVTVVSVRGFEESEPLTGFLTTVPDGPTQLRALNLTEGFAVLHWKPPQNPVDTYDVQVTAPGAPPLQAETPGSAVDYPLHDLVLHTNYTATVRGLRGPNLTSPASITFTTGLEAPRDLEAKEVTPRTALLTWTEPPVRPAGYLLSFHTPGGQNQEILLPGGITSHQLLGLFPSTSYNARLQAMWGQSLLPPVSTSFTTGGLRIPFPRDCGEEMQNGAGASRTSTIFLNGNRERPLNVFCDMETDGGGWLVFQRRMDGQTDFWRDWEDYAHGFGNISGEFWLGNEALHSLTQAGDYSMRVDLRAGDEAVFAQYDSFHVDSAAEYYRLHLEGYHGTAGDSMSYHSGSVFSARDRDPNSLLISCAVSYRGAWWYRNCHYANLNGLYGSTVDHQGVSWYHWKGFEFSVPFTEMKLRPRNFRSPAGGG

SEQ ID NO: 87613 - protein, 4222 aa, Homo sapiens
  Payload ID: 17533
  Gene Symbol: TNXB
  Gene Name: tenascin XB
  ENSP ID: ENSP00000372645
MMPAQYALTSSLVLLVLLSTARAGPFSSRSNVTLPAPRPPPQPGGHTVGAGVGSPSSQLYEHTVEGGEKQVVFTHRINLPPSTGCGCPPGTEPPVLASEVQALRVRLEILEELVKGLKEQCTGGCCPASAQAGTGQTDVRTLCSLHGVFDLSRCTCSCEPGWGGPTCSDPTDAEIPPSSPPSASGSCPDDCNDQGRCVRGRCVCFPGYTGPSCGWPSCPGDCQGRGRCVQGVCVCRAGFSGPDCSQRSCPRGCSQRGRCEGGRCVCDPGYTGDDCGMRSCPRGCSQRGRCENGRCVCNPGYAGEDCGVRSCPRGCSQRGRCKDGRCVCDPGYTGEDCGTRSCPWDCGEGGRCVDGRCVCWPGYTGEDCSTRTCPRDCRGRGRCEDGECICDTGYSGDDCGVRSCPGDCNQRGRCEDGRCVCWPGYTGTDCGSRACPRDCRGRGRCENGVCVCNAGYSGEDCGVRSCPGDCRGRGRCESGRCMCWPGYTGRDCGTRACPGDCRGRGRCVDGRCVCNPGFTGEDCGSRRCPGDCRGHGLCEDGVCVCDAGYSGEDCSTRSCPGGCRGRGQCLDGRCVCEDGYSGEDCGVRQCPNDCSQHGVCQDGVCICWEGYVSEDCSIRTCPSNCHGRGRCEEGRCLCDPGYTGPTCATRMCPADCRGRGRCVQGVCLCHVGYGGEDCGQEEPPASACPGGCGPRELCRAGQCVCVEGFRGPDCAIQTCPGDCRGRGECHDGSCVCKDGYAGEDCGEEVPTIEGMRMHLLEETTVRTEWTPAPGPVDAYEIQFIPTTEGASPPFTARVPSSASAYDQRGLAPGQEYQVTVRALRGTSWGLPASKTITTMIDGPQDLRVVAVTPTTLELGWLRPQAEVDRFVVSYVSAGNQRVRLEVPPEADGTLLTDLMPGVEYVVTVTAERGRAVSYPASVRANTGSSPLGLLGTTDEPPPSGPSTTQGAQAPLLQQRPQELGELRVLGRDETGRLRVVWTAQPDTFAYFQLRMRVPEGPGAHEEVLPGDVRQALVPPPPPGTPYELSLHGVPPGGKPSDPIIYQGIMDKDEEKPGKSSGPPRLGELTVTDRTSDSLLLRWTVPEGEFDSFVIQYKDRDGQPQVVPVEGPQRSAVITSLDPGRKYKFVLYGFVGKKRHGPLVAEAKILPQSDPSPGTPPHLGNLWVTDPTPDSLHLSWTVPEGQFDTFMVQYRDRDGRPQVVPVEGPERSFVVSSLDPDHKYRFTLFGIANKKRYGPLTADGTTAPERKEEPPRPEFLEQPLLGELTVTGVTPDSLRLSWTVAQGPFDSFMVQYKDAQGQPQAVPVAGDENEVTVPGLDPDRKYKMNLYGLRGRQRVGPESVVAKTAPQEDVDETPSPTELGTEAPESPEEPLLGELTVTGSSPDSLSLFWTVPQGSFDSFTVQYKDRDGRPRAVRVGGKESEVTVGGLEPGHKYKMHLYGLHEGQRVGPVSAVGVTAPQQEETPPATESPLEPRLGELTVTDVTPNSVGLSWTVPEGQFDSFIVQYKDKDGQPQVVPVAADQREVTVYNLEPERKYKMNMYGLHDGQRMGPLSVVIVTAPLPPAPATEASKPPLEPRLGELTVTDITPDSVGLSWTVPEGEFDSFVVQYKDRDGQPQVVPVAADQREVTIPDLEPSRKYKFLLFGIQDGKRRSPVSVEAKTVARGDASPGAPPRLGELWVTDPTPDSLRLSWTVPEGQFDSFVVQFKDKDGPQVVPVEGHERSVTVTPLDAGRKYRFLLYGLLGKKRHGPLTADGTTEARSAMDDTGTKRPPKPRLGEELQVTTVTQNSVGLSWTVPEGQFDSFVVQYKDRDGQPQVVPVEGSLREVSVPGLDPAHRYKLLLYGLHHGKRVGPISAVAITAGREETETETTAPTPPAPEPHLGELTVEEATSHTLHLSWMVTEGEFDSFEIQYTDRDGQLQMVRIGGDRNDITLSGLESDHRYLVTLYGFSDGKHVGPVHVEALTVPEEEKPSEPPTATPEPPIKPRLGELTVTDATPDSLSLSWTVPEGQFDHFLVQYRNGDGQPKAVRVPGHEEGVTISGLEPDHKYKMNLYGFHGGQRMGPVSVVGVTAAEEETPSPTEPSMEAPEPAEEPLLGELTVTGSSPDSLSLSWTVPQGRFDSFTVQYKDRDGRPQVVRVGGEESEVTVGGLEPGRKYKMHLYGLHEGRRVGPVSAVGVTAPEEESPDAPLAKLRLGQMTVRDITSDSLSLSWTVPEGQFDHFLVQFKNGDGQPKAVRVPGHEDGVTISGLEPDHKYKMNLYGFHGGQRVGPVSAVGLTAPGKDEEMAPASTEPPTPEPPIKPRLEELTVTDATPDSLSLSWTVPEGQFDHFLVQYKNGDGQPKATRVPGHEDRVTISGLEPDNKYKMNLYGFHGGQRVGPVSAIGVTAAEEETPSPTEPSMEAPEPPEEPLLGELTVTGSSPDSLSLSWTVPQGRFDSFTVQYKDRDGRPQVVRVGGEESEVTVGGLEPGRKYKMHLYGLHEGRRVGPVSTVGVTAPQEDVDETPSPTEPGTEAPEPPEEPLLGELTVTGSSPDSLSLSWTVPQGRFDSFTVQYKDRDGRPQAVRVGGQESKVTVRGLEPGRKYKMHLYGLHEGRRLGPVSAVGVTEDEAETTQAVPTMTPEPPIKPRLGELTMTDATPDSLSLSWTVPEGQFDHFLVQYRNGDGQPKAVRVPGHEDGVTISGLEPDHKYKMNLYGFHGGQRVGPISVIGVTAAEEETPSPTELSTEAPEPPEEPLLGELTVTGSSPDSLSLSWTIPQGHFDSFTVQYKDRDGRPQVMRVRGEESEVTVGGLEPGRKYKMHLYGLHEGRRVGPVSTVGVTVPTTTPEPPNKPRLGELTVTDATPDSLSLSWMVPEGQFDHFLVQYRNGDGQPKVVRVPGHEDGVTISGLEPDHKYKMNLYGFHGGQRVGPISVIGVTAAEEETPAPTEPSTEAPEPPEEPLLGELTVTGSSPDSLSLSWTIPQGRFDSFTVQYKDRDGRPQVVRVRGEESEVTVGGLEPGCKYKMHLYGLHEGQRVGPVSAVGVTVPTMTPEPPIKPRLGELTVTDATPDSLSLSWMVPEGQFDHFLVQYRNGDGQPKAVRVPGHEDGVTISGLEPDHKYKMNLYGFHGGQRVGPVSAIGVTEEETPSPTEPSTEAPEAPEEPLLGELTVTGSSPDSLSLSWTVPQGRFDSFTVQYKDRDGQPQVVRVRGEESEVTVGGLEPGRKYKMHLYGLHEGQRVGPVSTVGITAPLPTPLPVEPRLGELAVAAVTSDSVGLSWTVAQGPFDSFLVQYRDAQGQPQAVPVSGDLRAVAVSGLDPARKYKFLLFGLQNGKRHGPVPVEARTAPDTKPSPRLGELTVTDATPDSVGLSWTVPEGEFDSFVVQYKDKDGRLQVVPVAANQREVTVQGLEPSRKYRFLLYGLSGRKRLGPISADSTTAPLEKELPPHLGELTVAEETSSSLRLSWTVAQGPFDSFVVQYRDTDGQPRAVPVAADQRTVTVEDLEPGKKYKFLLYGLLGGKRLGPVSALGMTAPEEDTPAPELAPEAPEPPEEPRLGVLTVTDTTPDSMRLSWSVAQGPFDSFVVQYEDTNGQPQALLVDGDQSKILISGLEPSTPYRFLLYGLHEGKRLGPLSAEGTTGLAPAGQTSEESRPRLSQLSVTDVTTSSLRLNWEAPPGAFDSFLLRFGVPSPSTLEPHPRPLLQRELMVPGTRHSAVLRDLRSGTLYSLTLYGLRGPHKADSIQGTARTLSPVLESPRDLQFSEIRETSAKVNWMPPPSRADSFKVSYQLADGGEPQSVQVDGQARTQKLQGLIPGARYEVTVVSVRGFEESEPLTGFLTTVPDGPTQLRALNLTEGFAVLHWKPPQNPVDTYDVQVTAPGAPPLQAETPGSAVDYPLHDLVLHTNYTATVRGLRGPNLTSPASITFTTGLEAPRDLEAKEVTPRTALLTWTEPPVRPAGYLLSFHTPGGQNQEILLPGGITSHQLLGLFPSTSYNARLQAMWGQSLLPPVSTSFTTGGLRIPFPRDCGEEMQNGAGASRTSTIFLNGNRERPLNVFCDMETDGGGWLVFQRRMDGQTDFWRDWEDYAHGFGNISGEFWLGNEALHSLTQAGDYSMRVDLRAGDEAVFAQYDSFHVDSAAEYYRLHLEGYHGTAGDSMSYHSGSVFSARDRDPNSLLISCAVSYRGAWWYRNCHYANLNGLYGSTVDHQGVSWYHWKGFEFSVPFTEMKLRPRNFRSPAGGG

SEQ ID NO: 87614 - protein, 3296 aa, Homo sapiens
  Payload ID: 17533
  Gene Symbol: TNXB
  Gene Name: tenascin XB
  ENSP ID: ENSP00000387438
  MOD_RES (1)..(1): Any amino acid
XSSPLGLLGTTDEPPPSGPSTTQGAQAPLLQQRPQELGELRVLGRDETGRLRVVWTAQPDTFAYFQLRMRVPEGPGAHEEVLPGDVRQALVPPPPPGTPYELSLHGVPPGGKPSDPIIYQGIMDKDEEKPGKSSGPPRLGELTVTDRTSDSLLLRWTVPEGEFDSFVIQYKDRDGQPQVVPVEGPQRSAVITSLDPGRKYKFVLYGFVGKKRHGPLVAEAKILPQSDPSPGTPPHLGNLWVTDPTPDSLHLSWTVPEGQFDTFMVQYRDRDGRPQVVPVEGPERSFVVSSLDPDHKYRFTLFGIANKKRYGPLTADGTTAPERKEEPPRPEFLEQPLLGELTVTGVTPDSLRLSWTVAQGPFDSFMVQYKDAQGQPQAVPVAGDENEVTVPGLDPDRKYKMNLYGLRGRQRVGPESVVAKTAPQEDVDETPSPTELGTEAPESPEEPLLGELTVTGSSPDSLSLFWTVPQGSFDSFTVQYKDRDGRPQAVRVGGKESEVTVGGLEPGHKYKMHLYGLHEGQRVGPVSAVGVTAPQQEETPPATESPLEPRLGELTVTDVTPNSVGLSWTVPEGQFDSFIVQYKDKDGQPQVVPVAADQREVTVYNLEPERKYKMNMYGLHDGQRMGPLSVVIVTAPLPPAPATEASKPPLEPRLGELTVTDITPDSVGLSWTVPEGEFDSFVVQYKDRDGQPQVVPVAADQREVTIPDLEPSRKYKFLLFGIQDGKRRSPVSVEAKTVARGDASPGAPPRLGELWVTDPTPDSLRLSWTVPEGQFDSFVVQFKDKDGPQVVPVEGHERSVTVTPLDAGRKYRFLLYGLLGKKRHGPLTADGTTEARSAMDDTGTKRPPKPRLGEELQVTTVTQNSVGLSWTVPEGQFDSFVVQYKDRDGQPQVVPVEGSLREVSVPGLDPAHRYKLLLYGLHHGKRVGPISAVAITAGREETETETTAPTPPAPEPHLGELTVEEATSHTLHLSWMVTEGEFDSFEIQYTDRDGQLQMVRIGGDRNDITLSGLESDHRYLVTLYGFSDGKHVGPVHVEALTVPEEEKPSEPPTATPEPPIKPRLGELTVTDATPDSLSLSWTVPEGQFDHFLVQYRNGDGQPKAVRVPGHEEGVTISGLEPDHKYKMNLYGFHGGQRMGPVSVVGVTAAEEETPSPTEPSMEAPEPAEEPLLGELTVTGSSPDSLSLSWTVPQGRFDSFTVQYKDRDGRPQVVRVGGEESEVTVGGLEPGRKYKMHLYGLHEGRRVGPVSAVGVTAPEEESPDAPLAKLRLGQMTVRDITSDSLSLSWTVPEGQFDHFLVQFKNGDGQPKAVRVPGHEDGVTISGLEPDHKYKMNLYGFHGGQRVGPVSAVGLTAPGKDEEMAPASTEPPTPEPPIKPRLEELTVTDATPDSLSLSWTVPEGQFDHFLVQYKNGDGQPKATRVPGHEDRVTISGLEPDNKYKMNLYGFHGGQRVGPVSAIGVTAAEEETPSPTEPSMEAPEPPEEPLLGELTVTGSSPDSLSLSWTVPQGRFDSFTVQYKDRDGRPQVVRVGGEESEVTVGGLEPGRKYKMHLYGLHEGRRVGPVSTVGVTAPQEDVDETPSPTEPGTEAPGPPEEPLLGELTVTGSSPDSLSLSWTVPQGRFDSFTVQYKDRDGRPQAVRVGGQESKVTVRGLEPGRKYKMHLYGLHEGRRLGPVSAVGVTEDEAETTQAVPTMTPEPPIKPRLGELTMTDATPDSLSLSWTVPEGQFDHFLVQYRNGDGQPKAVRVPGHEDGVTISGLEPDHKYKMNLYGFHGGQRVGPISVIGVTAAEEETPSPTELSTEAPEPPEEPLLGELTVTGSSPDSLSLSWTIPQGHFDSFTVQYKDRDGRPQVMRVRGEESEVTVGGLEPGRKYKMHLYGLHEGRRVGPVSTVGVTVPTTTPEPPNKPRLGELTVTDATPDSLSLSWMVPEGQFDHFLVQYRNGDGQPKVVRVPGHEDGVTISGLEPDHKYKMNLYGFHGGQRVGPISVIGVTAAEEETPAPTEPSTEAPEPPEEPLLGELTVTGSSPDSLSLSWTIPQGRFDSFTVQYKDRDGRPQVVRVRGEESEVTVGGLEPGCKYKMHLYGLHEGQRVGPVSAVGVTVPTMTPEPPIKPRLGELTVTDATPDSLSLSWMVPEGQFDHFLVQYRNGDGQPKAVRVPGHEDGVTISGLEPDHKYKMNLYGFHGGQRVGPVSAIGVTEEETPSPTEPSTEAPEAPEEPLLGELTVTGSSPDSLSLSWTVPQGRFDSFTVQYKDRDGQPQVVRVRVEESEVTVGGLEPGRKYKMHLYGLHEGQRVGPVSTVGITAPLPTPLPVEPRLGELAVAAVTSDSVGLSWTVAQGPFDSFLVQYRDAQGQPQAVPVSGDLRAVAVSGLDPARKYKFLLFGLQNGKRHGPVPVEARTAPDTKPSPRLGELTVTDATPDSVGLSWTVPEGEFDSFVVQYKDKDGRLQVVPVAANQREVTVQGLEPSRKYRFLLYGLSGRKRLGPISADSTTAPLEKELPPHLGELTVAEETSSSLRLSWTVAQGPFDSFVVQYRDTDGQPRAVPVAADQRTVTVEDLEPGKKYKFLLYGLLGGKRLGPVSALGMTAPEEDTPAPELAPEAPEPPEEPRLGVLTVTDTTPDSMRLSWSVAQGPFDSFVVQYEDTNGQPQALLVDGDQSKILISGLEPSTPYRFLLYGLHEGKRLGPLSAEGTTGLAPAGQTSEESRPRLSQLSVTDVTTSSLRLNWEAPPGAFDSFLLRFGVPSPSTLEPHPRPLLQRELMVPGTRHSAVLRDLRSGTLYSLTLYGLRGPHKADSIQGTARTLSPVLESPRDLQFSEIRETSAKVNWMPPPSRADSFKVSYQLADGGEPQSVQVDGQARTQKLQGLIPGARYEVTVVSVRGFEESEPLTGFLTTVPDGPTQLRALNLTEGFAVLHWKPPQNPVDTYDVQVTAPGAPPLQAETPGSAVDYPLHDLVLHTNYTATVRGLRGPNLTSPASITFTTGLEAPRDLEAKEVTPRTALLTWTEPPVRPAGYLLSFHTPGGQNQEILLPGGITSHQLLGLFPSTSYNARLQAMWGQSLLPPVSTSFTTGGLRIPFPRDCGEEMQNGAGASRTSTIFLNGNRERPLNVFCDMETDGGGWLVFQRRMDGQTDFWRDWEDYAHGFGNISGEFWLGNEALHSLTQAGDYSMRVDLRAGDEAVFAQYDSFHVDSAAEYYRLHLEGYHGTAGDSMSYHSGSVFSARDRDPNSLLISCAVSYRGAWWYRNCHYANLNGLYGSTVDHQGVSWYHWKGFEFSVPFTEMKLRPRNFRSPAGGG

SEQ ID NO: 87615 - protein, 4222 aa, Homo sapiens
  Payload ID: 17533
  Gene Symbol: TNXB
  Gene Name: tenascin XB
  ENSP ID: ENSP00000387561
MMPAQYALTSSLVLLVLLSTARAGPFSSRSNVTLPAPRPPPQPGGHTVGAGVGSPSSQLYEHTVEGGEKQVVFTHRINLPPSTGCGCPPGTEPPVLASEVQALRVRLEILEELVKGLKEQCTGGCCPASAQAGTGQTDVRTLCSLHGVFDLSRCTCSCEPGWGGPTCSDPTDAEIPPSSPPSASGSCPDDCNDQGRCVRGRCVCFPGYTGPSCGWPSCPGDCQGRGRCVQGVCVCRAGFSGPDCSQRSCPRGCSQRGRCEGGRCVCDPGYTGDDCGMRSCPRGCSQRGRCENGRCVCNPGYTGEDCGVRSCPRGCSQRGRCKDGRCVCDPGYTGEDCGTRSCPWDCGEGGRCVDGRCVCWPGYTGEDCSTRTCPRDCRGRGRCEDGECICDTGYSGDDCGVRSCPGDCNQRGRCEDGRCVCWPGYTGTDCGSRACPRDCRGRGRCENGVCVCNAGYSGEDCGVRSCPGDCRGRGRCESGRCMCWPGYTGRDCGTRACPGDCRGRGRCVDGRCVCNPGFTGEDCGSRRCPGDCRGHGLCEDGVCVCDAGYSGEDCSTRSCPGGCRGRGQCLDGRCVCEDGYSGEDCGVRQCPNDCSQHGVCQDGVCICWEGYVSEDCSIRTCPSNCHGRGRCEEGRCLCDPGYTGPTCATRMCPADCRGRGRCVQGVCLCHVGYGGEDCGQEEPPASACPGGCGPRELCRAGQCVCVEGFRGPDCAIQTCPGDCRGRGECHDGSCVCKDGYAGEDCGEEVPTIEGMRMHLLEETTVRTEWTPAPGPVDAYEIQFIPTTEGASPPFTARVPSSASAYDQRGLAPGQEYQVTVRALRGTSWGLPASKTITTMIDGPQDLRVVAVTPTTLELGWLRPQAEVDRFVVSYVSAGNQRVRLEVPPEADGTLLTDLMPGVEYVVTVTAERGRAVSYPASVRANTGSSPLGLLGTTDEPPPSGPSTTQGAQAPLLQQRPQELGELRVLGRDETGRLRVVWTAQPDTFAYFQLRMRVPEGPGAHEEVLPGDVRQALVPPPPPGTPYELSLHGVPPGGKPSDPIIYQGIMDKDEEKPGKSSGPPRLGELTVTDRTSDSLLLRWTVPEGEFDSFVIQYKDRDGQPQVVPVEGPQRSAVITSLDPGRKYKFVLYGFVGKKRHGPLVAEAKILPQSDPSPGTPPRLGNLWVTDPTPDSLHLSWTVPEGQFDTFMVQYRDRDGRPQVVPVEGPERSFVVSSLDPDHKYRFTLFGIANKKRYGPLTADGTTAPERKEEPPHPEFLEQPLLGELTVTGVTPDSLRLSWTVAQGPFDSFMVQYKDAQGQPQAVPVAGDENEVTVPGLDPDRKYKMNLYGLRGRQRVGPESVVAKTAPQEDVDETPSPTELGTEAPESPEEPLLGELTVTGSSPDSLSLFWTVPQGSFDSFTVQYKDRDGRPRAVRVGGKESEVTVGGLEPGHKYKMHLYGLHEGQRVGPVSAVGVTAPQQEETPPATESPLEPRLGELTVTDVTPNSVGLSWTVPEGQFDSFIVQYKDKDGQPQVVPVAADQREVTVYNLEPERKYKMNMYGLHDGQRMGPLSVVIVTAPLPPAPATEASKPPLEPRLGELTVTDITPDSVGLSWTVPEGEFDSFVVQYKDRDGQPQVVPVAADQREVTIPDLEPSRKYKFLLFGIQDGKRRSPVSVEAKTVARGDASPGAPPRLGELWVTDPTPDSLRLSWTVPEGQFDSFVVQFKDKDGPQVVPVEGHERSVTVTPLDAGRKYRFLLYGLLGKKRHGPLTADGTTEARSAMDDTGTKRPPKPRLGEELQVTTVTQNSVGLSWTVPEGQFDSFVVQYKDRDGQPQVVPVEGSLREVSVPGLDPAHRYKLLLYGLHHGKRVGPISAVAITAGREETETETTAPTPPAPEPHLGELTVEEATSHTLHLSWMVTEGEFDSFEIQYTDRDGQLQMVRIGGDRNDITLSGLESDHRYLVTLYGFSDGKHVGPVHVEALTVPEEEKPSEPPTATPEPPIKPRLGELTVTDATPDSLSLSWTVPEGQFDHFLVQYRNGDGQPKAVRVPGHEEGVTISGLEPDHKYKMNLYGFHGGQRMGPVSVVGVTAAEEETPSPTEPSMEAPEPAEEPLLGELTVTGSSPDSLSLSWTVPQGRFDSFTVQYKDRDGRPQVVRVGGEESEVTVGGLEPGRKYKMHLYGLHEGRRVGPVSAVGVTAPEEESPDAPLAKLRLGQMTVRDITSDSLSLSWTVPEGQFDHFLVQFKNGDGQPKAVRVPGHEDGVTISGLEPDHKYKMNLYGFHGGQRVGPVSAVGLTAPGKDEEMAPASTEPPTPEPPIKPRLEELTVTDATPDSLSLSWTVPEGQFDHFLVQYKNGDGQPKATRVPGHEDRVTISGLEPDNKYKMNLYGFHGGQRVGPVSAIGVTAAEEETPSPTEPSMEAPEPPEEPLLGELTVTGSSPDSLSLSWTVPQGRFDSFTVQYKDRDGRPQVVRVGGEESEVTVGGLEPGRKYKMHLYGLHEGRRVGPVSTVGVTAPQEDVDETPSPTEPGTEAPEPPEEPLLGELTVTGSSPDSLSLSWTVPQGRFDSFTVQYKDRDGRPQAVRVGGQESKVTVRGLEPGRKYKMHLYGLHEGRRLGPVSAVGVTEDEAETTQAVPTMTPEPPIKPRLGELTMTDATPDSLSLSWTVPEGQFDHFLVQYRNGDGQPKAVRVPGHEDGVTISGLEPDHKYKMNLYGFHGGQRVGPISVIGVTAAEEETPSPTELSTEAPEPPEEPLLGELTVTGSSPDSLSLSWTIPQGHFDSFTVQYKDRDGRPQVMRVRGEESEVTVGGLEPGRKYKMHLYGLHEGRRVGPVSTVGVTVPTTTPEPPNKPRLGELTVTDATPDSLSLSWMVPEGQFDHFLVQYRNGDGQPKVVRVPGHEDGVTISGLEPDHKYKMNLYGFHGGQRVGPISVIGVTAAEEETPAPTEPSTEAPEPPEEPLLGELTVTGSSPDSLSLSWTIPQGRFDSFTVQYKDRDGRPQVVRVRGEESEVTVGGLEPGCKYKMHLYGLHEGQRVGPVSAVGVTVPTMTPEPPIKPRLGELTVTDATPDSLSLSWMVPEGQFDHFLVQYRNGDGQPKAVRVPGHEDGVTISGLEPDHKYKMNLYGFHGGQRVGPVSAIGVTEEETPSPTEPSTEAPEAPEEPLLGELTVTGSSPDSLSLSWTIPQGRFDSFTVQYKDRDGQPQVVRVRGEESEVTVGGLEPGRKYKMHLYGLHEGQRVGPVSTVGITAPLPTPLPVEPRLGELAVAAVTSDSVGLSWTVAQGPFDSFLVQYRDAQGQPQAVPVSGDLRAVAVSGLDPARKYKFLLFGLQNGKRHGPVPVEARTAPDTKPSPRLGELTVTDATPDSVGLSWTVPEGEFDSFVVQYKDKDGRLQVVPVAANQREVTVQGLEPSRKYRFLLYGLSGRKRLGPISADSTTAPLEKELPPHLGELTVAEETSSSLRLSWTVAQGPFDSFVVQYRDTDGQPRAVPVAADQRTVTVEDLEPGKKYKFLLYGLLGGKRLGPVSALGMTAPEEDTPAPELAPEAPEPPEEPRLGVLTVTDTTPDSMRLSWSVAQGPFDSFVVQYEDTNGQPQALLVDGDQSKILISGLEPSTPYRFLLYGLHEGKRLGPLSAEGTTGLAPAGQTSEESRPRLSQLSVTDVTTSSLRLNWEAPPGAFDSFLLRFGVPSPSTLEPHPRPLLQRELMVPGTRHSAVLRDLRSGTLYSLTLYGLRGPHKADSIQGTARTLSPVLESPRDLQFSEIRETSAKVNWMPPPSRADSFKVSYQLADGGEPQSVQVDGQARTQKLQGLIPGARYEVTVVSVRGFEESEPLTGFLTTVPDGPTQLRALNLTEGFAVLHWKPPQNPVDTYDIQVTAPGAPPLQAETPGSAVDYPLHDLVLHTNYTATVRGLRGPNLTSPASITFTTGLEAPRDLEAKEVTPRTALLTWTEPPVRPAGYLLSFHTPGGQTQEILLPGGITSHQLLGLFPSTSYNARLQATWGQSLLPPVSTSFTTGGLRIPFPRDCGEEMQNGAGASRTSTIFLNGNRERPLNVFCDMETDGGGWLVFQRRMDGQTDFWRDWEDYAHGFGNISGEFWLGNEALHSLTQAGDYSMRVDLRAGDEAVFAQYDSFHVDSAAEYYRLHLEGYHGTAGDSMSYHSGSVFSARDRDPNSLLISCAVSYRGAWWYRNCHYANLNGLYGSTVDHQGVSWYHWKGFEFSVPFTEMKLRPRNFRSPAGGG

SEQ ID NO: 87616 - protein, 7 aa, Homo sapiens
  Payload ID: 17533
  Gene Symbol: TNXB
  Gene Name: tenascin XB
  ENSP ID: ENSP00000388950
MMPAQYA

SEQ ID NO: 87617 - protein, 634 aa, Homo sapiens
  Payload ID: 17533
  Gene Symbol: TNXB
  Gene Name: tenascin XB
  ENSP ID: ENSP00000389677
  MOD_RES (1)..(1): Any amino acid
XSSPLGLLGTTDEPPPSGPSTTQGAQAPLLQQRPQELGELRVLGRDETGRLRVVWTAQPDTFAYFQLRMRVPEGPGAHEEVLPGDVRQALVPPPPPGTPYELSLHGVPPGGKPSDPIIYQGIMDKDEEKPGKSSGPPRLGELTVTDRTSDSLLLRWTVPEGEFDSFVIQYKDRDGQPQVVPVEGPQRSAVITSLDPGRKYKFVLYGFVGKKRHGPLVAEAKILPQSDPSPGTPPRLGNLWVTDPTPDSLHLSWTVPEGQFDTFMVQYRDRDGRPQVVPVEGPERSFVVSSLDPDHKYRFTLFGIANKKRYGPLTADGTTAPERKEEPPRPEFLEQPLLGELTVTGVTPDSLRLSWTVAQGPFDSFMVQYKDAQGQPQAVPVAGDENEVTVPGLDPDRKYKMNLYGLRGRQRVGPESVVAKTAPQEDVDETPSPTELGTEAPESPEEPLLGELTVTGSSPDSLSLFWTVPQGSFDSFTVQYKDRDGRPRAVRVGGKESEVTVGGLEPGHKYKMHLYGLHEGQRVGPVSAVGVTAPQQEETPPATESPLEPRLGELTVTDVTPNSVGLSWTVPEGQFDSFIVQYKDKDGQPQVVPVAADQREVTVYNLEPERKYKMNMYGLHDGQRMGPLSVVIVT

SEQ ID NO: 87618 - protein, 7 aa, Homo sapiens
  Payload ID: 17533
  Gene Symbol: TNXB
  Gene Name: tenascin XB
  ENSP ID: ENSP00000389946
MMPAQYA

SEQ ID NO: 87619 - protein, 2280 aa, Homo sapiens
  Payload ID: 17533
  Gene Symbol: TNXB
  Gene Name: tenascin XB
  ENSP ID: ENSP00000393091
MMPAQYALTSSLVLLVLLSTARAGPFSSRSNVTLPAPRPPPQPGGHTVGAGVGSPSSQLYEHTVEGGEKQVVFTHRINLPPSTGCGCPPGTEPPVLASEVQALRVRLEILEELVKGLKEQCTGGCCPASAQAGTGQTDVRTLCSLHGVFDLSRCTCSCEPGWGGPTCSDPTDAEIPPSSPPSASGSCPDDCNDQGRCVRGRCVCFPGYTGPSCGWPSCPGDCQGRGRCVQGVCVCRAGFSGPDCSQRSCPRGCSQRGRCEGGRCVCDPGYTGDDCGMRSCPRGCSQRGRCENGRCVCNPGYTGEDCGVRSCPRGCSQRGRCKDGRCVCDPGYTGEDCGTRSCPWDCGEGGRCVDGRCVCWPGYTGEDCSTRTCPRDCRGRGRCEDGECICDTGYSGDDCGVRSCPGDCNQRGRCEDGRCVCWPGYTGTDCGSRACPRDCRGRGRCENGVCVCNAGYSGEDCGVRSCPGDCRGRGRCESGRCMCWPGYTGRDCGTRACPGDCRGRGRCVDGRCVCNPGFTGEDCGSRRCPGDCRGHGLCEDGVCVCDAGYSGEDCSTRSCPGGCRGRGQCLDGRCVCEDGYSGEDCGVRQCPNDCSQHGVCQDGVCICWEGYVSEDCSIRTCPSNCHGRGRCEEGRCLCDPGYTGPTCATRMCPADCRGRGRCVQGVCLCHVGYGGEDCGQEEPPASACPGGCGPRELCRAGQCVCVEGFRGPDCAIQTCPGDCRGRGECHDGSCVCKDGYAGEDCGEEVPTIEGMRMHLLEETTVRTEWTPAPGPVDAYEIQFIPTTEGASPPFTARVPSSASAYDQRGLAPGQEYQVTVRALRGTSWGLPASKTITTMIDGPQDLRVVAVTPTTLELGWLRPQAEVDRFVVSYVSAGNQRVRLEVPPEADGTLLTDLMPGVEYVVTVTAERGRAVSYPASVRANTGSSPLGLLGTTDEPPPSGPSTTQGAQAPLLQQRPQELGELRVLGRDETGRLRVVWTAQPDTFAYFQLRMRVPEGPGAHEEVLPGDVRQALVPPPPPGTPYELSLHGVPPGGKPSDPIIYQGIMDKDEEKPGKSSGPPRLGELTVTDRTSDSLLLRWTVPEGEFDSFVIQYKDRDGQPQVVPVEGPQRSAVITSLDPGRKYKFVLYGFVGKKRHGPLVAEAKILPQSDPSPGTPPHLGNLWVTDPTPDSLHLSWTVPEGQFDTFMVQYRDRDGRPQVVPVEGPERSFVVSSLDPDHKYRFTLFGIANKKRYGPLTADGTTAPERKEEPPRPEFLEQPLLGELTVTGVTPDSLRLSWTVAQGPFDSFMVQYKDAQGQPQAVPVAGDENEVTVPGLDPDRKYKMNLYGLRGRQRVGPESVVAKTAPQEDVDETPSPTELGTEAPESPEEPLLGELTVTGSSPDSLSLFWTVPQGSFDSFTVQYKDRDGRPRAVRVGGKESEVTVGGLEPGHKYKMHLYGLHEGQRVGPVSAVGVTAPQQEETPPATESPLEPRLGELTVTDVTPNSVGLSWTVPEGQFDSFIVQYKDKDGQPQVVPVAADQREVTVYNLEPERKYKMNMYGLHDGQRMGPLSVVIVTAPLPPAPATEASKPPLEPRLGELTVTDITPDSVGLSWTVPEGEFDSFVVQYKDRDGQPQVVPVAADQREVTIPDLEPSRKYKFLLFGIQDGKRRSPVSVEAKTVARGDASPGAPPRLGELWVTDPTPDSLRLSWTVPEGQFDSFVVQFKDKDGPQVVPVEGHERSVTVTPLDAGRKYRFLLYGLLGKKRHGPLTADGTTEARSAMDDTGTKRPPKPRLGEELQVTTVTQNSVGLSWTVPEGQFDSFVVQYKDRDGQPQVVPVEGSLREVSVPGLDPAHRYKLLLYGLHHGKRVGPISAVAITAGREETETETTAPTPPAPEPHLGELTVEEATSHTLHLSWMVTEGEFDSFEIQYTDRDGQLQMVRIGGDRNDITLSGLESDHRYLVTLYGFSDGKHVGPVHVEALTVPEEEKPSEPPTATPEPPIKPRLGELTVTDATPDSLSLSWTVPEGQFDHFLVQYRNGDGQPKAVRVPGHEEGVTISGLEPDHKYKMNLYGFHGGQRMGPVSVVGVTAAEEETPSPTEPSMEAPEPAEEPLLGELTVTGSSPDSLSLSWTVPQGRFDSFTVQYKDRDGRPQVVRVGGEESEVTVGGLEPGRKYKMHLYGLHEGRRVGPVSAVGVTAPEEESPDAPLAKLRLGQMTVRDITSDSLSLSWTVPEGQFDHFLVQFKNGDGQPKAVRVPGHEDGVTISGLEPDHKYKMNLYGFHGGQRVGPVSAVGLT

SEQ ID NO: 87620 - protein, 4222 aa, Homo sapiens
  Payload ID: 17533
  Gene Symbol: TNXB
  Gene Name: tenascin XB
  ENSP ID: ENSP00000399153
MMPAQYALTSSLVLLVLLSTARAGPFSSRSNVTLPAPRPPPQPGGHTVGAGVGSPSSQLYEHTVEGGEKQVVFTHRINLPPSTGCGCPPGTEPPVLASEVQALRVRLEILEELVKGLKEQCTGGCCPASAQAGTGQTDVRTLCSLHGVFDLSRCTCSCEPGWGGPTCSDPTDAEIPPSSPPSASGSCPDDCNDQGRCVRGRCVCFPGYTGPSCGWPSCPGDCQGRGRCVQGVCVCRAGFSGPDCSQRSCPRGCSQRGRCEGGRCVCDPGYTGDDCGMRSCPRGCSQRGRCENGRCVCNPGYTGEDCGVRSCPRGCSQRGRCKDGRCVCDPGYTGEDCGTRSCPWDCGEGGRCVDGRCVCWPGYTGEDCSTRTCPRDCRGRGRCEDGECICDTGYSGDDCGVRSCPGDCNQRGRCEDGRCVCWPGYTGTDCGSRACPRDCRGRGRCENGVCVCNAGYSGEDCGVRSCPGDCRGRGRCESGRCMCWPGYTGRDCGTRACPGDCRGRGRCVDGRCVCNPGFTGEDCGSRRCPGDCRGHGLCEDGVCVCDAGYSGEDCSTRSCPGGCRGRGQCLDGRCVCEDGYSGEDCGVRQCPNDCSQHGVCQDGVCICWEGYVSEDCSIRTCPSNCHGRGRCEEGRCLCDPGYTGPTCATRMCPADCRGRGRCVQGVCLCHVGYGGEDCGQEEPPASACPGGCGPRELCRAGQCVCVEGFRGPDCAIQTCPGDCRGRGECHDGSCVCKDGYAGEDCGEEVPTIEGMRMHLLEETTVRTEWTPAPGPVDAYEIQFIPTTEGASPPFTARVPSSASAYDQRGLAPGQEYQVTVRALRGTSWGLPASKTITTMIDGPQDLRVVAVTPTTLELGWLRPQAEVDRFVVSYVSAGNQRVRLEVPPEADGTLLTDLMPGVEYVVTVTAERGRAVSYPASVRANTGSSPLGLLGTTDEPPPSGPSTTQGAQAPLLQQRPQELGELRVLGRDETGRLRVVWTAQPDTFAYFQLRMRVPEGPGAHEEVLPGDVRQALVPPPPPGTPYELSLHGVPPGGKPSDPIIYQGIMDKDEEKPGKSSGPPRLGELTVTDRTSDSLLLRWTVPEGEFDSFVIQYKDRDGQPQVVPVEGPQRSAVITSLDPGRKYKFVLYGFVGKKRHGPLVAEAKILPQSDPSPGTPPRLGNLWVTDPTPDSLHLSWTVPEGQFDTFMVQYRDRDGRPQVVPVEGPERSFVVSSLDPDHKYRFTLFGIANKKRYGPLTADGTTAPERKEEPPRPEFLEQPLLGELTVTGVTPDSLRLSWTVAQGPFDSFMVQYKDAQGQPQAVPVAGDENEVTVPGLDPDRKYKMNLYGLRGRQRVGPESVVAKTAPQEDVDETPSPTELGTEAPESPEEPLLGELTVTGSSPDSLSLFWTVPQGSFDSFTVQYKDRDGRPRAVRVGGKESEVTVGGLEPGHKYKMHLYGLHEGQRVGPVSAVGVTAPQQEETPPATESPLEPRLGELTVTDVTPNSVGLSWTVPEGQFDSFIVQYKDKDGQPQVVPVAADQREVTVYNLEPERKYKMNMYGLHDGQRMGPLSVVIVTAPLPPAPATEASKPPLEPRLGELTVTDITPDSVGLSWTVPEGEFDSFVVQYKDRDGQPQVVPVAADQREVTIPDLEPSRKYKFLLFGIQDGKRRSPVSVEAKTVARGDASPGAPPRLGELWVTDPTPDSLRLSWTVPEGQFDSFVVQFKDKDGPQVVPVEGHERSVTVTPLDAGRKYRFLLYGLLGKKRHGPLTADGTTEARSAMDDTGTKRPPKPRLGEELQVTTVTQNSVGLSWTVPEGQFDSFVVQYKDRDGQPQVVPVEGSLREVSVPGLDPAHRYKLLLYGLHHGKRVGPISAVAITAGREETETETTAPTPPAPEPHLGELTVEEATSHTLHLSWMVTEGEFDSFEIQYTDRDGQLQMVRIGGDRNDITLSGLESDHRYLVTLYGFSDGKHVGPVHVEALTVPEEEKPSEPPTATPEPPIKPRLGELTVTDATPDSLSLSWTVPEGQFDHFLVQYRNGDGQPKAVRVPGHEEGVTISGLEPDHKYKMNLYGFHGGQRMGPVSVVGVTAAEEETPSPTEPSMEAPEPAEEPLLGELTVTGSSPDSLSLSWTVPQGRFDSFTVQYKDRDGRPQVVRVGGEESEVTVGGLEPGRKYKMHLYGLHEGRRVGPVSAVGVTAPEEESPDAPLAKLRLGQMTVRDITSDSLSLSWTVPEGQFDHFLVQFKNGDGQPKAVRVPGHEDGVTISGLEPDHKYKMNLYGFHGGQRVGPVSAVGLTAPGKDEEMAPASTEPPTPEPPIKPRLEELTVTDATPDSLSLSWTVPEGQFDHFLVQYKNGDGQPKATRVPGHEDRVTISGLEPDNKYKMNLYGFHGGQRVGPVSAIGVTAAEEETPSPTEPSMEAPEPPEEPLLGELTVTGSSPDSLSLSWTVPQGRFDSFTVQYKDRDGRPQVVRVGGEESEVTVGGLEPGRKYKMHLYGLHEGRRVGPVSTVGVTAPQEDVDETPSPTEPGTEAPEPPEEPLLGELTVTGSSPDSLSLSWTVPQGRFDSFTVQYKDRDGRPQAVRVGGQESKVTVRGLEPGRKYKMHLYGLHEGRRLGPVSAVGVTEDEAETTQAVPTMTPEPPIKPRLGELTMTDATPDSLSLSWTVPEGQFDHFLVQYRNGDGQPKAVRVPGHEDGVTISGLEPDHKYKMNLYGFHGGQRVGPISVIGVTAAEEETPSPTELSTEAPEPPEEPLLGELTVTGSSPDSLSLSWTIPQGHFDSFTVQYKDRDGRPQVMRVRGEESEVTVGGLEPGRKYKMHLYGLHEGRRVGPVSTVGVTVPTTTPEPPNKPRLGELTVTDATPDSLSLSWMVPEGQFDHFLVQYRNGDGQPKVVRVPGHEDGVTISGLEPDHKYKMNLYGFHGGQRVGPISVIGVTAAEEETPAPTEPSTEAPEPPEEPLLGELTVTGSSPDSLSLSWTIPQGRFDSFTVQYKDRDGRPQVVRVRGEESEVTVGGLEPGCKYKMHLYGLHEGQRVGPVSAVGVTVPTMTPEPPIKPRLGELTVTDATPDSLSLSWMVPEGQFDHFLVQYRNGDGQPKAVRVPGHEDGVTISGLEPDHKYKMNLYGFHGGQRVGPVSAIGVTEEETPSPTEPSTEAPEAPEEPLLGELTVTGSSPDSLSLSWTVPQGRFDSFTVQYKDRDGQPQVVRVRGEESEVTVGGLEPGRKYKMHLYGLHEGQRVGPVSTVGITAPLPTPLPVEPRLGELAVAAVTSDSVGLSWTVAQGPFDSFLVQYRDAQGQPQAVPVSGDLRAVAVSGLDPARKYKFLLFGLQNGKRHGPVPVEARTAPDTKPSPRLGELTVTDATPDSVGLSWTVPEGEFDSFVVQYKDKDGRLQVVPVAANQREVTVQGLEPSRKYRFLLYGLSGRKRLGPISADSTTAPLEKELPPHLGELTVAEETSSSLRLSWTVAQGPFDSFVVQYRDTDGQPRAVPVAADQRTVTVEDLEPGKKYKFLLYGLLGGKRLGPVSALGMTAPEEDTPAPELAPEAPEPPEEPRLGVLTVTDTTPDSMRLSWSVAQGPFDSFVVQYEDTNGQPQALLVDGDQSKILISGLEPSTPYRFLLYGLHEGKRLGPLSAEGTTGLAPAGQTSEESRPRLSQLSVTDVTTSSLRLNWEAPPGAFDSFLLRFGVPSPSTLEPHPRPLLQRELMVPGTRHSAVLRDLRSGTLYSLTLYGLRGPHKADSIQGTARTLSPVLESPRDLQFSEIRETSAKVNWMPPPSRADSFKVSYQLADGGEPQSVQVDGQARTQKLQGLIPGARYEVTVVSVRGFEESEPLTGFLTTVPDGPTQLRALNLTEGFAVLHWKPPQNPVDTYDIQVTAPGAPPLQAETPGSAVDYPLHDLVLHTNYTATVRGLRGPNLTSPASITFTTGLEAPRDLEAKEVTPRTALLTWTEPPVRPAGYLLSFHTPGGQTQEILLPGGITSHQLLGLFPSTSYNARLQAMWGQSLLPPVSTSFTTGGLRIPFPRDCGEEMQNGAGASRTSTIFLNGNRERPLIVFCDMETDGGGWLVFQRRMDGQTDFWRDWEDYAHGFGNISGEFWLGNEALHSLTQAGDYSMRVDLRAGDEAVFAQYDSFHVDSAAEYYRLHLEGYHGTAGDSMSYHSGSVFSARDRDPNSLLISCAVSYRGAWWYRNCHYANLNGLYGSTVDHQGVSWYHWKGFEFSVPFTEMKLRPRNFRSPAGGG

SEQ ID NO: 87621 - protein, 7 aa, Homo sapiens
  Payload ID: 17533
  Gene Symbol: TNXB
  Gene Name: tenascin XB
  ENSP ID: ENSP00000399599
MMPAQYA

SEQ ID NO: 87622 - protein, 7 aa, Homo sapiens
  Payload ID: 17533
  Gene Symbol: TNXB
  Gene Name: tenascin XB
  ENSP ID: ENSP00000404573
MMPAQYA

SEQ ID NO: 87623 - protein, 2149 aa, Homo sapiens
  Payload ID: 17533
  Gene Symbol: TNXB
  Gene Name: tenascin XB
  ENSP ID: ENSP00000406495
  MOD_RES (1)..(1): Any amino acid
XAEEETPSPTEPSMEAPEPAEEPLLGELTVTGSSPDSLSLSWTVPQGRFDSFTVQYKDRDGRPQVVRVGGEESEVTVGGLEPGRKYKMHLYGLHEGRRVGPVSAVGVTAPEEESPDAPLAKLRLGQMTVRDITSDSLSLSWTVPEGQFDHFLVQFKNGDGQPKAVRVPGHEDGVTISGLEPDHKYKMNLYGFHGGQRVGPVSAVGLTAPGKDEEMAPASTEPPTPEPPIKPRLEELTVTDATPDSLSLSWTVPEGQFDHFLVQYKNGDGQPKATRVPGHEDRVTISGLEPDNKYKMNLYGFHGGQRVGPVSAIGVTAAEEETPSPTEPSMEAPEPPEEPLLGELTVTGSSPDSLSLSWTVPQGRFDSFTVQYKDRDGRPQVVRVGGEESEVTVGGLEPGRKYKMHLYGLHEGRRVGPVSTVGVTAPQEDVDETPSPTEPGTEAPEPPEEPLLGELTVTGSSPDSLSLSWTVPQGRFDSFTVQYKDRDGRPQAVRVGGQESKVTVRGLEPGRKYKMHLYGLHEGRRLGPVSAVGVTEDEAETTQAVPTMTPEPPIKPRLGELTMTDATPDSLSLSWTVPEGQFDHFLVQYRNGDGQPKAVRVPGHEDGVTISGLEPDHKYKMNLYGFHGGQRVGPISVTGVTAAEEETPSPTELSTEAPEPPEEPLLGELTVTGSSPDSLSLSWTIPQGHFDSFTVQYKDRDGRPQVMRVRGEESEVTVGGLEPGRKYKMHLYGLHEGRRVGPVSTVGVTVPTTTPEPPNKPRLGELTVTDATPDSLSLSWMVPEGQFDHFLVQYRNGDGQPKVVRVPGHEDGVTISGLEPDHKYKMNLYGFHGGQRVGPISVIGVTAAEEETPAPTEPSTEAPEPPEEPLLGELTVTGSSPDSLSLSWTIPQGRFDSFTVQYKDRDGRPQVVRVRGEESEVTVGGLEPGCKYKMHLYGLHEGQRVGPVSAVGVTVPTMTPEPPIKPRLGELTVTDATPDSLSLSWMVPEGQFDHFLVQYRNGDGQPKAVRVPGHEDGVTISGLEPDHKYKMNLYGFHGGQRVGPVSAIGVTEEETPSPTEPSTEAPEAPEEPLLGELTVTGSSPDSLSLSWTVPQGRFDSFTVQYKDRDGQPQVVRVRGEESEVTVGGLEPGRKYKMHLYGLHEGQRVGPVSTVGITAPLPTPLPVEPRLGELAVAAVTSDSVGLSWTVAQGPFDSFLVQYRDAQGQPQAVPVSGDLRAVAVSGLDPARKYKFLLFGLQNGKRHGPVPVEARTAPDTKPSPRLGELTVTDATPDSVGLSWTVPEGEFDSFVVQYKDKDGRLQVVPVAANQREVTVQGLEPSRKYRFLLYGLSGRKRLGPISADSTTAPLEKELPPHLGELTVAEETSSSLRLSWTVAQGPFDSFVVQYRDTDGQPRAVPVAADQRTVTVEDLEPGKKYKFLLYGLLGGKRLGPVSALGMTAPEEDTPAPELAPEAPEPPEEPRLGVLTVTDTTPDSMRLSWSVAQGPFDSFVVQYEDTNGQPQALLVDGDQSKILISGLEPSTPYRFLLYGLHEGKRLGPLSAEGTTGLAPAGQTSEESRPRLSQLSVTDVTTSSLRLNWEAPPGAFDSFLLRFGVPSPSTLEPHPRPLLQRELMVPGTRHSAVLRDLRSGTLYSLTLYGLRGPHKADSIQGTARTLSPVLESPRDLQFSEIRETSAKVNWMPPPSRADSFKVSYQLADGGEPQSVQVDGQARTQKLQGLIPGARYEVTVVSVRGFEESEPLTGFLTTVPDGPTQLRALNLTEGFAVLHWKPPQNPVDTYDIQVTAPGAPPLQAETPGSAVDYPLHDLVLHTNYTATVRGLRGPNLTSPASITFTTGLEAPRDLEAKEVTPRTALLTWTEPPVRPAGYLLSFHTPGGQTQEILLPGGITSHQLLGLFPSTSYNARLQAMWGQSLLPPVSTSFTTGGLRIPFPRDCGEEMQNGAGASRTSTIFLNGNRERPLIVFCDMETDGGGWLVFQRRMDGQTDFWRDWEDYAHGFGNISGEFWLGNEALHSLTQAGDYSMRVDLRAGDEAVFAQYDSFHVDSAAEYYRLHLEGYHGTAGDSMSYHSGSVFSARDRDPNSLLISCAVSYRGAWWYRNCHYANLNGLYGSTVDHQGVSWYHWKGFEFSVPFTEMKLRPRNFRSPAGGG

SEQ ID NO: 87624 - protein, 673 aa, Homo sapiens
  Payload ID: 17533
  Gene Symbol: TNXB
  Gene Name: tenascin XB
  Uniprot ID: P22105
  ENSP ID: ENSP00000407685
MRLSWSVAQGPFDSFVVQYEDTNGQPQALLVDGDQSKILISGLEPSTPYRFLLYGLHEGKRLGPLSAEGTTGLAPAGQTSEESRPRLSQLSVTDVTTSSLRLNWEAPPGAFDSFLLRFGVPSPSTLEPHPRPLLQRELMVPGTRHSAVLRDLRSGTLYSLTLYGLRGPHKADSIQGTARTLSPVLESPRDLQFSEIRETSAKVNWMPPPSRADSFKVSYQLADGGEPQSVQVDGQARTQKLQGLIPGARYEVTVVSVRGFEESEPLTGFLTTVPDGPTQLRALNLTEGFAVLHWKPPQNPVDTYDVQVTAPGAPPLQAETPGSAVDYPLHDLVLHTNYTATVRGLRGPNLTSPASITFTTGLEAPRDLEAKEVTPRTALLTWTEPPVRPAGYLLSFHTPGGQNQEILLPGGITSHQLLGLFPSTSYNARLQAMWGQSLLPPVSTSFTTGGLRIPFPRDCGEEMQNGAGASRTSTIFLNGNRERPLNVFCDMETDGGGWLVFQRRMDGQTDFWRDWEDYAHGFGNISGEFWLGNEALHSLTQAGDYSMRVDLRAGDEAVFAQYDSFHVDSAAEYYRLHLEGYHGTAGDSMSYHSGSVFSARDRDPNSLLISCAVSYRGAWWYRNCHYANLNGLYGSTVDHQGVSWYHWKGFEFSVPFTEMKLRPRNFRSPAGGG

SEQ ID NO: 87625 - protein, 7 aa, Homo sapiens
  Payload ID: 17533
  Gene Symbol: TNXB
  Gene Name: tenascin XB
  ENSP ID: ENSP00000412400
MMPAQYA

SEQ ID NO: 87626 - protein, 7 aa, Homo sapiens
  Payload ID: 17533
  Gene Symbol: TNXB
  Gene Name: tenascin XB
  ENSP ID: ENSP00000416813
MMPAQYA

SEQ ID NO: 87627 - protein, 842 aa, Homo sapiens
  Payload ID: 17533
  Gene Symbol: TNXB
  Gene Name: tenascin XB
  ENSP ID: ENSP00000418248
MMPAQYALTSSLVLLVLLSTARAGPFSSRSNVTLPAPRPPPQPGGHTVGAGVGSPSSQLYEHTVEGGEKQVVFTHRINLPPSTGCGCPPGTEPPVLASEVQALRVRLEILEELVKGLKEQCTGGCCPASAQAGTGQTDVRTLCSLHGVFDLSRCTCSCEPGWGGPTCSDPTDAEIPPSSPPSASGSCPDDCNDQGRCVRGRCVCFPGYTGPSCGWPSCPGDCQGRGRCVQGVCVCRAGFSGPDCSQRSCPRGCSQRGRCEGGRCVCDPGYTGDDCGMRSCPRGCSQRGRCENGRCVCNPGYTGEDCGVRSCPRGCSQRGRCKDGRCVCDPGYTGEDCGTRSCPWDCGEGGRCVDGRCVCWPGYTGEDCSTRTCPRDCRGRGRCEDGECICDTGYSGDDCGVRSCPGDCNQRGRCEDGRCVCWPGYTGTDCGSRACPRDCRGRGRCENGVCVCNAGYSGEDCGVRSCPGDCRGRGRCESGRCMCWPGYTGRDCGTRACPGDCRGRGRCVDGRCVCNPGFTGEDCGSRRCPGDCRGHGLCEDGVCVCDAGYSGEDCSTRSCPGGCRGRGQCLDGRCVCEDGYSGEDCGVRQCPNDCSQHGVCQDGVCICWEGYVSEDCSIRTCPSNCHGRGRCEEGRCLCDPGYTGPTCATRMCPADCRGRGRCVQGVCLCHVGYGGEDCGQEEPPASACPGGCGPRELCRAGQCVCVEGFRGPDCAIQTCPGDCRGRGECHDGSCVCKDGYAGEDCGEEVPTIEGMRMHLLEETTVRTEWTPAPGPVDAYEIQFIPTASPLLCSASPHSPAKAEAEISTSWRNQDSLNFFFCLNIFFCCCYKNTLITRQEFGN

SEQ ID NO: 87628 - protein, 535 aa, Homo sapiens
  Payload ID: 17533
  Gene Symbol: TNXB
  Gene Name: tenascin XB
  Uniprot ID: P22105
  ENSP ID: ENSP00000447694
MVPGTRHSAVLRDLRSGTLYSLTLYGLRGPHKADSIQGTARTLSPVLESPRDLQFSEIRETSAKVNWMPPPSRADSFKVSYQLADGGEPQSVQVDGQARTQKLQGLIPGARYEVTVVSVRGFEESEPLTGFLTTVPDGPTQLRALNLTEGFAVLHWKPPQNPVDTYDIQVTAPGAPPLQAETPGSAVDYPLHDLVLHTNYTATVRGLRGPNLTSPASITFTTGLEAPRDLEAKEVTPRTALLTWTEPPVRPAGYLLSFHTPGGQTQEILLPGGITSHQLLGLFPSTSYNARLQAMWGQSLLPPVSTSFTTGGLRIPFPRDCGEEMQNGAGASRTSTIFLNGNRERPLIVFCDMETDGGGWLVFQRRMDGQTDFWRDWEDYAHGFGNISGEFWLGNEALHSLTQAGDYSMRVDLRAGDEAVFAQYDSFHVDSAAEYYRLHLEGYHGTAGDSMSYHSGSVFSARDRDPNSLLISCAVSYRGAWWYRNCHYANLNGLYGSTVDHQGVSWYHWKGFEFSVPFTEMKLRPRNFRSPAGGG

SEQ ID NO: 87629 - protein, 4242 aa, Homo sapiens
  Payload ID: 17533
  Gene Symbol: TNXB
  Gene Name: tenascin XB
  ENSP ID: ENSP00000447829
MMPAQYALTSSLVLLVLLSTARAGPFSSRSNVTLPAPRPPPQPGGHTVGAGVGSPSSQLYEHTVEGGEKQVVFTHRINLPPSTGCGCPPGTEPPVLASEVQALRVRLEILEELVKGLKEQCTGGCCPASAQAGTGQTDVRTLCSLHGVFDLSRCTCSCEPGWGGPTCSDPTDAEIPPSSPPSASGSCPDDCNDQGRCVRGRCVCFPGYTGPSCGWPSCPGDCQGRGRCVQGVCVCRAGFSGPDCSQRSCPRGCSQRGRCEGGRCVCDPGYTGDDCGMRSCPRGCSQRGRCENGRCVCNPGYTGEDCGVRSCPRGCSQRGRCKDGRCVCDPGYTGEDCGTRSCPWDCGEGGRCVDGRCVCWPGYTGEDCSTRTCPRDCRGRGRCEDGECICDTGYSGDDCGVRSCPGDCNQRGRCEDGRCVCWPGYTGTDCGSRACPRDCRGRGRCENGVCVCNAGYSGEDCGVRSCPGDCRGRGRCESGRCMCWPGYTGRDCGTRACPGDCRGRGRCVDGRCVCNPGFTGEDCGSRRCPGDCRGHGLCEDGVCVCDAGYSGEDCSTRSCPGGCRGRGQCLDGRCVCEDGYSGEDCGVRQCPNDCSQHGVCQDGVCICWEGYVSEDCSIRTCPSNCHGRGRCEEGRCLCDPGYTGPTCATRMCPADCRGRGRCVQGVCLCHVGYGGEDCGQEEPPASACPGGCGPRELCRAGQCVCVEGFRGPDCAIQTCPGDCRGRGECHDGSCVCKDGYAGEDCGEEVPTIEGMRMHLLEETTVRTEWTPAPGPVDAYEIQFIPTTEGASPPFTARVPSSASAYDQRGLAPGQEYQVTVRALRGTSWGLPASKTITTMIDGPQDLRVVAVTPTTLELGWLRPQAEVDRFVVSYVSAGNQRVRLEVPPEADGTLLTDLMPGVEYVVTVTAERGRAVSYPASVRANTGSSPLGLLGTTDEPPPSGPSTTQGAQAPLLQQRPQELGELRVLGRDETGRLRVVWTAQPDTFAYFQLRMRVPEGPGAHEEVLPGDVRQALVPPPPPGTPYELSLHGVPPGGKPSDPIIYQGIMDKDEEKPGKSSGPPRLGELTVTDRTSDSLLLRWTVPEGEFDSFVIQYKDRDGQPQVVPVEGPQRSAVITSLDPGRKYKFVLYGFVGKKRHGPLVAEAKILPQSDPSPGTPPRLGNLWVTDPTPDSLHLSWTVPEGQFDTFMVQYRDRDGRPQVVPVEGPERSFVVSSLDPDHKYRFTLFGIANKKRYGPLTADGTTAPERKEEPPHPEFLEQPLLGELTVTGVTPDSLRLSWTVAQGPFDSFMVQYKDAQGQPQAVPVAGDENEVTVPGLDPDRKYKMNLYGLRGRQRVGPESVVAKTAPQEDVDETPSPTELGTEAPESPEEPLLGELTVTGSSPDSLSLFWTVPQGSFDSFTVQYKDRDGRPRAVRVGGKESEVTVGGLEPGHKYKMHLYGLHEGQRVGPVSAVGVTAPQQEETPPATESPLEPRLGELTVTDVTPNSVGLSWTVPEGQFDSFIVQYKDKDGQPQVVPVAADQREVTVYNLEPERKYKMNMYGLHDGQRMGPLSVVIVTAPLPPAPATEASKPPLEPRLGELTVTDITPDSVGLSWTVPEGEFDSFVVQYKDRDGQPQVVPVAADQREVTIPDLEPSRKYKFLLFGIQDGKRRSPVSVEAKTVARGDASPGAPPRLGELWVTDPTPDSLRLSWTVPEGQFDSFVVQFKDKDGPQVVPVEGHERSVTVTPLDAGRKYRFLLYGLLGKKRHGPLTADGTTEARSAMDDTGTKRPPKPRLGEELQVTTVTQNSVGLSWTVPEGQFDSFVVQYKDRDGQPQVVPVEGSLREVSVPGLDPAHRYKLLLYGLHHGKRVGPISAVAITAGREETETETTAPTPPAPEPHLGELTVEEATSHTLHLSWMVTEGEFDSFEIQYTDRDGQLQMVRIGGDRNDITLSGLESDHRYLVTLYGFSDGKHVGPVHVEALTVPEEEKPSEPPTATPEPPIKPRLGELTVTDATPDSLSLSWTVPEGQFDHFLVQYRNGDGQPKAVRVPGHEEGVTISGLEPDHKYKMNLYGFHGGQRMGPVSVVGVTAAEEETPSPTEPSMEAPEPAEEPLLGELTVTGSSPDSLSLSWTVPQGRFDSFTVQYKDRDGRPQVVRVGGEESEVTVGGLEPGRKYKMHLYGLHEGRRVGPVSAVGVTAPEEESPDAPLAKLRLGQMTVRDITSDSLSLSWTVPEGQFDHFLVQFKNGDGQPKAVRVPGHEDGVTISGLEPDHKYKMNLYGFHGGQRVGPVSAVGLTAPGKDEEMAPASTEPPTPEPPIKPRLEELTVTDATPDSLSLSWTVPEGQFDHFLVQYKNGDGQPKATRVPGHEDRVTISGLEPDNKYKMNLYGFHGGQRVGPVSAIGVTAAEEETPSPTEPSMEAPEPPEEPLLGELTVTGSSPDSLSLSWTVPQGRFDSFTVQYKDRDGRPQVVRVGGEESEVTVGGLEPGRKYKMHLYGLHEGRRVGPVSTVGVTAPQEDVDETPSPTEPGTEAPEPPEEPLLGELTVTGSSPDSLSLSWTVPQGRFDSFTVQYKDRDGRPQAVRVGGQESKVTVRGLEPGRKYKMHLYGLHEGRRLGPVSAVGVTEDEAETTQAVPTMTPEPPIKPRLGELTMTDATPDSLSLSWTVPEGQFDHFLVQYRNGDGQPKAVRVPGHEDGVTISGLEPDHKYKMNLYGFHGGQRVGPISVIGVTAAEEETPSPTELSTEAPEPPEEPLLGELTVTGSSPDSLSLSWTIPQGHFDSFTVQYKDRDGRPQVMRVRGEESEVTVGGLEPGRKYKMHLYGLHEGRRVGPVSTVGVTEDEAETTQAVPTTTPEPPNKPRLGELTVTDATPDSLSLSWMVPEGQFDHFLVQYRNGDGQPKVVRVPGHEDGVTISGLEPDHKYKMNLYGFHGGQRVGPISVIGVTAAEEETPAPTEPSTEAPEPPEEPLLGELTVTGSSPDSLSLSWTIPQGRFDSFTVQYKDRDGRPQVVRVRGEESEVTVGGLEPGCKYKMHLYGLHEGQRVGPVSAVGVTAPKDEAETTQAVPTMTPEPPIKPRLGELTVTDATPDSLSLSWMVPEGQFDHFLVQYRNGDGQPKAVRVPGHEDGVTISGLEPDHKYKMNLYGFHGGQRVGPVSAIGVTEEETPSPTEPSTEAPEAPEEPLLGELTVTGSSPDSLSLSWTIPQGRFDSFTVQYKDRDGQPQVVRVRGEESEVTVGGLEPGRKYKMHLYGLHEGQRVGPVSTVGITAPLPTPLPVEPRLGELAVAAVTSDSVGLSWTVAQGPFDSFLVQYRDAQGQPQAVPVSGDLRAVAVSGLDPARKYKFLLFGLQNGKRHGPVPVEARTAPDTKPSPRLGELTVTDATPDSVGLSWTVPEGEFDSFVVQYKDKDGRLQVVPVAANQREVTVQGLEPSRKYRFLLYGLSGRKRLGPISADSTTAPLEKELPPHLGELTVAEETSSSLRLSWTVAQGPFDSFVVQYRDTDGQPRAVPVAADQRTVTVEDLEPGKKYKFLLYGLLGGKRLGPVSALGMTAPEEDTPAPELAPEAPEPPEEPRLGVLTVTDTTPDSMRLSWSVAQGPFDSFVVQYEDTNGQPQALLVDGDQSKILISGLEPSTPYRFLLYGLHEGKRLGPLSAEGTTGLAPAGQTSEESRPRLSQLSVTDVTTSSLRLNWEAPPGAFDSFLLRFGVPSPSTLEPHPRPLLQRELMVPGTRHSAVLRDLRSGTLYSLTLYGLRGPHKADSIQGTARTLSPVLESPRDLQFSEIRETSAKVNWMPPPSRADSFKVSYQLADGGEPQSVQVDGQARTQKLQGLIPGARYEVTVVSVRGFEESEPLTGFLTTVPDGPTQLRALNLTEGFAVLHWKPPQNPVDTYDIQVTAPGAPPLQAETPGSAVDYPLHDLVLHTNYTATVRGLRGPNLTSPASITFTTGLEAPRDLEAKEVTPRTALLTWTEPPVRPAGYLLSFHTPGGQTQEILLPGGITSHQLLGLFPSTSYNARLQATWGQSLLPPVSTSFTTGGLRIPFPRDCGEEMQNGAGASRTSTIFLNGNRERPLNVFCDMETDGGGWLVFQRRMDGQTDFWRDWEDYAHGFGNISGEFWLGNEALHSLTQAGDYSMRVDLRAGDEAVFAQYDSFHVDSAAEYYRLHLEGYHGTAGDSMSYHSGSVFSARDRDPNSLLISCAVSYRGAWWYRNCHYANLNGLYGSTVDHQGVSWYHWKGFEFSVPFTEMKLRPRNFRSPAGGG

SEQ ID NO: 87630 - protein, 4242 aa, Homo sapiens
  Payload ID: 17533
  Gene Symbol: TNXB
  Gene Name: tenascin XB
  ENSP ID: ENSP00000447841
MMPAQYALTSSLVLLVLLSTARAGPFSSRSNVTLPAPRPPPQPGGHTVGAGVGSPSSQLYEHTVEGGEKQVVFTHRINLPPSTGCGCPPGTEPPVLASEVQALRVRLEILEELVKGLKEQCTGGCCPASAQAGTGQTDVRTLCSLHGVFDLSRCTCSCEPGWGGPTCSDPTDAEIPPSSPPSASGSCPDDCNDQGRCVRGRCVCFPGYTGPSCGWPSCPGDCQGRGRCVQGVCVCRAGFSGPDCSQRSCPRGCSQRGRCEGGRCVCDPGYTGDDCGMRSCPRGCSQRGRCENGRCVCNPGYTGEDCGVRSCPRGCSQRGRCKDGRCVCDPGYTGEDCGTRSCPWDCGEGGRCVDGRCVCWPGYTGEDCSTRTCPRDCRGRGRCEDGECICDTGYSGDDCGVRSCPGDCNQRGRCEDGRCVCWPGYTGTDCGSRACPRDCRGRGRCENGVCVCNAGYSGEDCGVRSCPGDCRGRGRCESGRCMCWPGYTGRDCGTRACPGDCRGRGRCVDGRCVCNPGFTGEDCGSRRCPGDCRGHGLCEDGVCVCDAGYSGEDCSTRSCPGGCRGRGQCLDGRCVCEDGYSGEDCGVRQCPNDCSQHGVCQDGVCICWEGYVSEDCSIRTCPSNCHGRGRCEEGRCLCDPGYTGPTCATRMCPADCRGRGRCVQGVCLCHVGYGGEDCGQEEPPASACPGGCGPRELCRAGQCVCVEGFRGPDCAIQTCPGDCRGRGECHDGSCVCKDGYAGEDCGEEVPTIEGMRMHLLEETTVRTEWTPAPGPVDAYEIQFIPTTEGASPPFTARVPSSASAYDQRGLAPGQEYQVTVRALRGTSWGLPASKTITTMIDGPQDLRVVAVTPTTLELGWLRPQAEVDRFVVSYVSAGNQRVRLEVPPEADGTLLTDLMPGVEYVVTVTAERGRAVSYPASVRANTGSSPLGLLGTTDEPPPSGPSTTQGAQAPLLQQRPQELGELRVLGRDETGRLRVVWTAQPDTFAYFQLRMRVPEGPGAHEEVLPGDVRQALVPPPPPGTPYELSLHGVPPGGKPSDPIIYQGIMDKDEEKPGKSSGPPRLGELTVTDRTSDSLLLRWTVPEGEFDSFVIQYKDRDGQPQVVPVEGPQRSAVITSLDPGRKYKFVLYGFVGKKRHGPLVAEAKILPQSDPSPGTPPRLGNLWVTDPTPDSLHLSWTVPEGQFDTFMVQYRDRDGRPQVVPVEGPERSFVVSSLDPDHKYRFTLFGIANKKRYGPLTADGTTAPERKEEPPRPEFLEQPLLGELTVTGVTPDSLRLSWTVAQGPFDSFMVQYKDAQGQPQAVPVAGDENEVTVPGLDPDRKYKMNLYGLRGRQRVGPESVVAKTAPQEDVDETPSPTELGTEAPESPEEPLLGELTVTGSSPDSLSLFWTVPQGSFDSFTVQYKDRDGRPRAVRVGGKESEVTVGGLEPGHKYKMHLYGLHEGQRVGPVSAVGVTAPQQEETPPATESPLEPRLGELTVTDVTPNSVGLSWTVPEGQFDSFIVQYKDKDGQPQVVPVAADQREVTVYNLEPERKYKMNMYGLHDGQRMGPLSVVIVTAPLPPAPATEASKPPLEPRLGELTVTDITPDSVGLSWTVPEGEFDSFVVQYKDRDGQPQVVPVAADQREVTIPDLEPSRKYKFLLFGIQDGKRRSPVSVEAKTVARGDASPGAPPRLGELWVTDPTPDSLRLSWTVPEGQFDSFVVQFKDKDGPQVVPVEGHERSVTVTPLDAGRKYRFLLYGLLGKKRHGPLTADGTTEARSAMDDTGTKRPPKPRLGEELQVTTVTQNSVGLSWTVPEGQFDSFVVQYKDRDGQPQVVPVEGSLREVSVPGLDPAHRYKLLLYGLHHGKRVGPISAVAITAGREETETETTAPTPPAPEPHLGELTVEEATSHTLHLSWMVTEGEFDSFEIQYTDRDGQLQMVRIGGDRNDITLSGLESDHRYLVTLYGFSDGKHVGPVHVEALTVPEEEKPSEPPTATPEPPIKPRLGELTVTDATPDSLSLSWTVPEGQFDHFLVQYRNGDGQPKAVRVPGHEEGVTISGLEPDHKYKMNLYGFHGGQRMGPVSVVGVTAAEEETPSPTEPSMEAPEPAEEPLLGELTVTGSSPDSLSLSWTVPQGRFDSFTVQYKDRDGRPQVVRVGGEESEVTVGGLEPGRKYKMHLYGLHEGRRVGPVSAVGVTAPEEESPDAPLAKLRLGQMTVRDITSDSLSLSWTVPEGQFDHFLVQFKNGDGQPKAVRVPGHEDGVTISGLEPDHKYKMNLYGFHGGQRVGPVSAVGLTAPGKDEEMAPASTEPPTPEPPIKPRLEELTVTDATPDSLSLSWTVPEGQFDHFLVQYKNGDGQPKATRVPGHEDRVTISGLEPDNKYKMNLYGFHGGQRVGPVSAIGVTAAEEETPSPTEPSMEAPEPPEEPLLGELTVTGSSPDSLSLSWTVPQGRFDSFTVQYKDRDGRPQVVRVGGEESEVTVGGLEPGRKYKMHLYGLHEGRRVGPVSTVGVTAPQEDVDETPSPTEPGTEAPEPPEEPLLGELTVTGSSPDSLSLSWTVPQGRFDSFTVQYKDRDGRPQAVRVGGQESKVTVRGLEPGRKYKMHLYGLHEGRRLGPVSAVGVTEDEAETTQAVPTMTPEPPIKPRLGELTMTDATPDSLSLSWTVPEGQFDHFLVQYRNGDGQPKAVRVPGHEDGVTISGLEPDHKYKMNLYGFHGGQRVGPISVIGVTAAEEETPSPTELSTEAPEPPEEPLLGELTVTGSSPDSLSLSWTIPQGHFDSFTVQYKDRDGRPQVMRVRGEESEVTVGGLEPGRKYKMHLYGLHEGRRVGPVSTVGVTEDEAETTQAVPTTTPEPPNKPRLGELTVTDATPDSLSLSWMVPEGQFDHFLVQYRNGDGQPKVVRVPGHEDGVTISGLEPDHKYKMNLYGFHGGQRVGPISVIGVTAAEEETPAPTEPSTEAPEPPEEPLLGELTVTGSSPDSLSLSWTIPQGRFDSFTVQYKDRDGRPQVVRVRGEESEVTVGGLEPGCKYKMHLYGLHEGQRVGPVSAVGVTAPKDEAETTQAVPTMTPEPPIKPRLGELTVTDATPDSLSLSWMVPEGQFDHFLVQYRNGDGQPKAVRVPGHEDGVTISGLEPDHKYKMNLYGFHGGQRVGPVSAIGVTEEETPSPTEPSTEAPEAPEEPLLGELTVTGSSPDSLSLSWTVPQGRFDSFTVQYKDRDGQPQVVRVRGEESEVTVGGLEPGRKYKMHLYGLHEGQRVGPVSTVGITAPLPTPLPVEPRLGELAVAAVTSDSVGLSWTVAQGPFDSFLVQYRDAQGQPQAVPVSGDLRAVAVSGLDPARKYKFLLFGLQNGKRHGPVPVEARTAPDTKPSPRLGELTVTDATPDSVGLSWTVPEGEFDSFVVQYKDKDGRLQVVPVAANQREVTVQGLEPSRKYRFLLYGLSGRKRLGPISADSTTAPLEKELPPHLGELTVAEETSSSLRLSWTVAQGPFDSFVVQYRDTDGQPRAVPVAADQRTVTVEDLEPGKKYKFLLYGLLGGKRLGPVSALGMTAPEEDTPAPELAPEAPEPPEEPRLGVLTVTDTTPDSMRLSWSVAQGPFDSFVVQYEDTNGQPQALLVDGDQSKILISGLEPSTPYRFLLYGLHEGKRLGPLSAEGTTGLAPAGQTSEESRPRLSQLSVTDVTTSSLRLNWEAPPGAFDSFLLRFGVPSPSTLEPHPRPLLQRELMVPGTRHSAVLRDLRSGTLYSLTLYGLRGPHKADSIQGTARTLSPVLESPRDLQFSEIRETSAKVNWMPPPSRADSFKVSYQLADGGEPQSVQVDGQARTQKLQGLIPGARYEVTVVSVRGFEESEPLTGFLTTVPDGPTQLRALNLTEGFAVLHWKPPQNPVDTYDIQVTAPGAPPLQAETPGSAVDYPLHDLVLHTNYTATVRGLRGPNLTSPASITFTTGLEAPRDLEAKEVTPRTALLTWTEPPVRPAGYLLSFHTPGGQTQEILLPGGITSHQLLGLFPSTSYNARLQAMWGQSLLPPVSTSFTTGGLRIPFPRDCGEEMQNGAGASRTSTIFLNGNRERPLIVFCDMETDGGGWLVFQRRMDGQTDFWRDWEDYAHGFGNISGEFWLGNEALHSLTQAGDYSMRVDLRAGDEAVFAQYDSFHVDSAAEYYRLHLEGYHGTAGDSMSYHSGSVFSARDRDPNSLLISCAVSYRGAWWYRNCHYANLNGLYGSTVDHQGVSWYHWKGFEFSVPFTEMKLRPRNFRSPAGGG

SEQ ID NO: 87631 - protein, 535 aa, Homo sapiens
  Payload ID: 17533
  Gene Symbol: TNXB
  Gene Name: tenascin XB
  Uniprot ID: P22105
  ENSP ID: ENSP00000448326
MVPGTRHSAVLRDLRSGTLYSLTLYGLRGPHKADSIQGTARTLSPVLESPRDLQFSEIRETSAKVNWMPPPSRADSFKVSYQLADGGEPQSVQVDGQARTQKLQGLIPGARYEVTVVSVRGFEESEPLTGFLTTVPDGPTQLRALNLTEGFAVLHWKPPQNPVDTYDVQVTAPGAPPLQAETPGSAVDYPLHDLVLHTNYTATVRGLRGPNLTSPASITFTTGLEAPRDLEAKEVTPRTALLTWTEPPVRPAGYLLSFHTPGGQNQEILLPGGITSHQLLGLFPSTSYNARLQAMWGQSLLPPVSTSFTTGGLRIPFPRDCGEEMQNGAGASRTSTIFLNGNRERPLNVFCDMETDGGGWLVFQRRMDGQTDFWRDWEDYAHGFGNISGEFWLGNEALHSLTQAGDYSMRVDLRAGDEAVFAQYDSFHVDSAAEYYRLHLEGYHGTAGDSMSYHSGSVFSARDRDPNSLLISCAVSYRGAWWYRNCHYANLNGLYGSTVDHQGVSWYHWKGFEFSVPFTEMKLRPRNFRSPAGGG

SEQ ID NO: 87632 - protein, 4242 aa, Homo sapiens
  Payload ID: 17533
  Gene Symbol: TNXB
  Gene Name: tenascin XB
  ENSP ID: ENSP00000449211
MMPAQYALTSSLVLLVLLSTARAGPFSSRSNVTLPAPRPPPQPGGHTVGAGVGSPSSQLYEHTVEGGEKQVVFTHRINLPPSTGCGCPPGTEPPVLASEVQALRVRLEILEELVKGLKEQCTGGCCPASAQAGTGQTDVRTLCSLHGVFDLSRCTCSCEPGWGGPTCSDPTDAEIPPSSPPSASGSCPDDCNDQGRCVRGRCVCFPGYTGPSCGWPSCPGDCQGRGRCVQGVCVCRAGFSGPDCSQRSCPRGCSQRGRCEGGRCVCDPGYTGDDCGMRSCPRGCSQRGRCENGRCVCNPGYAGEDCGVRSCPRGCSQRGRCKDGRCVCDPGYTGEDCGTRSCPWDCGEGGRCVDGRCVCWPGYTGEDCSTRTCPRDCRGRGRCEDGECICDTGYSGDDCGVRSCPGDCNQRGRCEDGRCVCWPGYTGTDCGSRACPRDCRGRGRCENGVCVCNAGYSGEDCGVRSCPGDCRGRGRCESGRCMCWPGYTGRDCGTRACPGDCRGRGRCVDGRCVCNPGFTGEDCGSRRCPGDCRGHGLCEDGVCVCDAGYSGEDCSTRSCPGGCRGRGQCLDGRCVCEDGYSGEDCGVRQCPNDCSQHGVCQDGVCICWEGYVSEDCSIRTCPSNCHGRGRCEEGRCLCDPGYTGPTCATRMCPADCRGRGRCVQGVCLCHVGYGGEDCGQEEPPASACPGGCGPRELCRAGQCVCVEGFRGPDCAIQTCPGDCRGRGECHDGSCVCKDGYAGEDCGEEVPTIEGMRMHLLEETTVRTEWTPAPGPVDAYEIQFIPTTEGASPPFTARVPSSASAYDQRGLAPGQEYQVTVRALRGTSWGLPASKTITTMIDGPQDLRVVAVTPTTLELGWLRPQAEVDRFVVSYVSAGNQRVRLEVPPEADGTLLTDLMPGVEYVVTVTAERGRAVSYPASVRANTGSSPLGLLGTTDEPPPSGPSTTQGAQAPLLQQRPQELGELRVLGRDETGRLRVVWTAQPDTFAYFQLRMRVPEGPGAHEEVLPGDVRQALVPPPPPGTPYELSLHGVPPGGKPSDPIIYQGIMDKDEEKPGKSSGPPRLGELTVTDRTSDSLLLRWTVPEGEFDSFVIQYKDRDGQPQVVPVEGPQRSAVITSLDPGRKYKFVLYGFVGKKRHGPLVAEAKILPQSDPSPGTPPHLGNLWVTDPTPDSLHLSWTVPEGQFDTFMVQYRDRDGRPQVVPVEGPERSFVVSSLDPDHKYRFTLFGIANKKRYGPLTADGTTAPERKEEPPRPEFLEQPLLGELTVTGVTPDSLRLSWTVAQGPFDSFMVQYKDAQGQPQAVPVAGDENEVTVPGLDPDRKYKMNLYGLRGRQRVGPESVVAKTAPQEDVDETPSPTELGTEAPESPEEPLLGELTVTGSSPDSLSLFWTVPQGSFDSFTVQYKDRDGRPRAVRVGGKESEVTVGGLEPGHKYKMHLYGLHEGQRVGPVSAVGVTAPQQEETPPATESPLEPRLGELTVTDVTPNSVGLSWTVPEGQFDSFIVQYKDKDGQPQVVPVAADQREVTVYNLEPERKYKMNMYGLHDGQRMGPLSVVIVTAPLPPAPATEASKPPLEPRLGELTVTDITPDSVGLSWTVPEGEFDSFVVQYKDRDGQPQVVPVAADQREVTIPDLEPSRKYKFLLFGIQDGKRRSPVSVEAKTVARGDASPGAPPRLGELWVTDPTPDSLRLSWTVPEGQFDSFVVQFKDKDGPQVVPVEGHERSVTVTPLDAGRKYRFLLYGLLGKKRHGPLTADGTTEARSAMDDTGTKRPPKPRLGEELQVTTVTQNSVGLSWTVPEGQFDSFVVQYKDRDGQPQVVPVEGSLREVSVPGLDPAHRYKLLLYGLHHGKRVGPISAVAITAGREETETETTAPTPPAPEPHLGELTVEEATSHTLHLSWMVTEGEFDSFEIQYTDRDGQLQMVRIGGDRNDITLSGLESDHRYLVTLYGFSDGKHVGPVHVEALTVPEEEKPSEPPTATPEPPIKPRLGELTVTDATPDSLSLSWTVPEGQFDHFLVQYRNGDGQPKAVRVPGHEEGVTISGLEPDHKYKMNLYGFHGGQRMGPVSVVGVTAAEEETPSPTEPSMEAPEPAEEPLLGELTVTGSSPDSLSLSWTVPQGRFDSFTVQYKDRDGRPQVVRVGGEESEVTVGGLEPGRKYKMHLYGLHEGRRVGPVSAVGVTAPEEESPDAPLAKLRLGQMTVRDITSDSLSLSWTVPEGQFDHFLVQFKNGDGQPKAVRVPGHEDGVTISGLEPDHKYKMNLYGFHGGQRVGPVSAVGLTAPGKDEEMAPASTEPPTPEPPIKPRLEELTVTDATPDSLSLSWTVPEGQFDHFLVQYKNGDGQPKATRVPGHEDRVTISGLEPDNKYKMNLYGFHGGQRVGPVSAIGVTAAEEETPSPTEPSMEAPEPPEEPLLGELTVTGSSPDSLSLSWTVPQGRFDSFTVQYKDRDGRPQVVRVGGEESEVTVGGLEPGRKYKMHLYGLHEGRRVGPVSTVGVTAPQEDVDETPSPTEPGTEAPEPPEEPLLGELTVTGSSPDSLSLSWTVPQGRFDSFTVQYKDRDGRPQAVRVGGQESKVTVRGLEPGRKYKMHLYGLHEGRRLGPVSAVGVTEDEAETTQAVPTMTPEPPIKPRLGELTMTDATPDSLSLSWTVPEGQFDHFLVQYRNGDGQPKAVRVPGHEDGVTISGLEPDHKYKMNLYGFHGGQRVGPISVIGVTAAEEETPSPTELSTEAPEPPEEPLLGELTVTGSSPDSLSLSWTIPQGHFDSFTVQYKDRDGRPQVMRVRGEESEVTVGGLEPGRKYKMHLYGLHEGRRVGPVSTVGVTEDEAETTQAVPTTTPEPPNKPRLGELTVTDATPDSLSLSWMVPEGQFDHFLVQYRNGDGQPKVVRVPGHEDGVTISGLEPDHKYKMNLYGFHGGQRVGPISVIGVTAAEEETPAPTEPSTEAPEPPEEPLLGELTVTGSSPDSLSLSWTIPQGRFDSFTVQYKDRDGRPQVVRVRGEESEVTVGGLEPGCKYKMHLYGLHEGQRVGPVSAVGVTAPKDEAETTQAVPTMTPEPPIKPRLGELTVTDATPDSLSLSWMVPEGQFDHFLVQYRNGDGQPKAVRVPGHEDGVTISGLEPDHKYKMNLYGFHGGQRVGPVSAIGVTEEETPSPTEPSTEAPEAPEEPLLGELTVTGSSPDSLSLSWTVPQGRFDSFTVQYKDRDGQPQVVRVRGEESEVTVGGLEPGRKYKMHLYGLHEGQRVGPVSTVGITAPLPTPLPVEPRLGELAVAAVTSDSVGLSWTVAQGPFDSFLVQYRDAQGQPQAVPVSGDLRAVAVSGLDPARKYKFLLFGLQNGKRHGPVPVEARTAPDTKPSPRLGELTVTDATPDSVGLSWTVPEGEFDSFVVQYKDKDGRLQVVPVAANQREVTVQGLEPSRKYRFLLYGLSGRKRLGPISADSTTAPLEKELPPHLGELTVAEETSSSLRLSWTVAQGPFDSFVVQYRDTDGQPRAVPVAADQRTVTVEDLEPGKKYKFLLYGLLGGKRLGPVSALGMTAPEEDTPAPELAPEAPEPPEEPRLGVLTVTDTTPDSMRLSWSVAQGPFDSFVVQYEDTNGQPQALLVDGDQSKILISGLEPSTPYRFLLYGLHEGKRLGPLSAEGTTGLAPAGQTSEESRPRLSQLSVTDVTTSSLRLNWEAPPGAFDSFLLRFGVPSPSTLEPHPRPLLQRELMVPGTRHSAVLRDLRSGTLYSLTLYGLRGPHKADSIQGTARTLSPVLESPRDLQFSEIRETSAKVNWMPPPSRADSFKVSYQLADGGEPQSVQVDGQARTQKLQGLIPGARYEVTVVSVRGFEESEPLTGFLTTVPDGPTQLRALNLTEGFAVLHWKPPQNPVDTYDVQVTAPGAPPLQAETPGSAVDYPLHDLVLHTNYTATVRGLRGPNLTSPASITFTTGLEAPRDLEAKEVTPRTALLTWTEPPVRPAGYLLSFHTPGGQNQEILLPGGITSHQLLGLFPSTSYNARLQAMWGQSLLPPVSTSFTTGGLRIPFPRDCGEEMQNGAGASRTSTIFLNGNRERPLNVFCDMETDGGGWLVFQRRMDGQTDFWRDWEDYAHGFGNISGEFWLGNEALHSLTQAGDYSMRVDLRAGDEAVFAQYDSFHVDSAAEYYRLHLEGYHGTAGDSMSYHSGSVFSARDRDPNSLLISCAVSYRGAWWYRNCHYANLNGLYGSTVDHQGVSWYHWKGFEFSVPFTEMKLRPRNFRSPAGGG

SEQ ID NO: 87633 - protein, 1545 aa, Homo sapiens
  Payload ID: 17533
  Gene Symbol: TNXB
  Gene Name: tenascin XB
  ENSP ID: ENSP00000480067
MMPAQYALTSSLVLLVLLSTARAGPFSSRSNVTLPAPRPPPQPGGHTVGAGVGSPSSQLYEHTVEGGEKQVVFTHRINLPPSTGCGCPPGTEPPVLASEVQALRVRLEILEELVKGLKEQCTGGCCPASAQAGTGQTDVRTLCSLHGVFDLSRCTCSCEPGWGGPTCSDPTDAEIPPSSPPSASGSCPDDCNDQGRCVRGRCVCFPGYTGPSCGWPSCPGDCQGRGRCVQGVCVCRAGFSGPDCSQRSCPRGCSQRGRCEGGRCVCDPGYTGDDCGMRSCPRGCSQRGRCENGRCVCNPGYTGEDCGVRSCPRGCSQRGRCKDGRCVCDPGYTGEDCGTRSCPWDCGEGGRCVDGRCVCWPGYTGEDCSTRTCPRDCRGRGRCEDGECICDTGYSGDDCGVRSCPGDCNQRGRCEDGRCVCWPGYTGTDCGSRACPRDCRGRGRCENGVCVCNAGYSGEDCGVRSCPGDCRGRGRCESGRCMCWPGYTGRDCGTRACPGDCRGRGRCVDGRCVCNPGFTGEDCGSRRCPGDCRGHGLCEDGVCVCDAGYSGEDCSTRSCPGGCRGRGQCLDGRCVCEDGYSGEDCGVRQCPNDCSQHGVCQDGVCICWEGYVSEDCSIRTCPSNCHGRGRCEEGRCLCDPGYTGPTCATRMCPADCRGRGRCVQGVCLCHVGYGGEDCGQEEPPASACPGGCGPRELCRAGQCVCVEGFRGPDCAIQTCPGDCRGRGECHDGSCVCKDGYAGEDCGEARVPSSASAYDQRGLAPGQEYQVTVRALRGTSWGLPASKTITTMIDGPQDLRVVAVTPTTLELGWLRPQAEVDRFVVSYVSAGNQRVRLEVPPEADGTLLTDLMPGVEYVVTVTAERGRAVSYPASVRANTEEREEESPPRPSLSQPPRRPWGNLTAELSRFRGTVQDLERHLRAHGYPLRANQTYTSVARHIHEYLQRQVLGSSADGALLVSLDGLRGQFERVVLRWRPQPPAEGPGGELTVPGTTRTVSLPDLRPGTTYHVEVHGVRAGQTSKSYAFITTTGPSTTQGAQAPLLQQRPQELGELRVLGRDETGRLRVVWTAQPDTFAYFQLRMRVPEGPGAHEEVLPGDVRQALVPPPPPGTPYELSLHGVPPGGKPSDPIIYQGIMDKDEEKPGKSSGPPRLGELTVTDRTSDSLLLRWTVPEGEFDSFVIQYKDRDGQPQVVPVEGPQRSAVITSLDPGRKYKFVLYGFVGKKRHGPLVAEAKILPQSDPSPGTPPHLGNLWVTDPTPDSLHLSWTVPEGQFDTFMVQYRDRDGRPQVVPVEGPERSFVVSSLDPDHKYRFTLFGIANKKRYGPLTADGTTAPERKEEPPRPEFLEQPLLGELTVTGVTPDSLRLSWTVAQGPFDSFMVQYKDAQGQPQAVPVAGDENEVTVPGLDPDRKYKMNLYGLRGRQRVGPESVVAKTAPQEDVDETPSPTELGTEAPESPEEPLLGELTVTGSSPDSLSLFWTVPQGSFDSFTVQYKDRDGRPRAVRVGGKESEVTVGGLEPGHKYKMHLYGLHEGQRVGPVSAVGVT

SEQ ID NO: 87634 - protein, 1962 aa, Homo sapiens
  Payload ID: 17533
  Gene Symbol: TNXB
  Gene Name: tenascin XB
  ENSP ID: ENSP00000483409
APGKDEEMAPASTEPPTPEPPIKPRLEELTVTDATPDSLSLSWTVPEGQFDHFLVQYKNGDGQPKATRVPGHEDRVTISGLEPDNKYKMNLYGFHGGQRVGPVSAIGVTAAEEETPSPTEPSMEAPEPPEEPLLGELTVTGSSPDSLSLSWTVPQGRFDSFTVQYKDRDGRPQVVRVGGEESEVTVGGLEPGRKYKMHLYGLHEGRRVGPVSTVGVTAPQEDVDETPSPTEPGTEAPGPPEEPLLGELTVTGSSPDSLSLSWTVPQGRFDSFTVQYKDRDGRPQAVRVGGQESKVTVRGLEPGRKYKMHLYGLHEGRRLGPVSAVGVTEDEAETTQAVPTMTPEPPIKPRLGELTMTDATPDSLSLSWTVPEGQFDHFLVQYRNGDGQPKAVRVPGHEDGVTISGLEPDHKYKMNLYGFHGGQRVGPISVIGVTAAEEETPSPTELSTEAPEPPEEPLLGELTVTGSSPDSLSLSWTIPQGHFDSFTVQYKDRDGRPQVMRVRGEESEVTVGGLEPGRKYKMHLYGLHEGRRVGPVSTVGVTEDEAETTQAVPTTTPEPPNKPRLGELTVTDATPDSLSLSWMVPEGQFDHFLVQYRNGDGQPKVVRVPGHEDGVTISGLEPDHKYKMNLYGFHGGQRVGPISVIGVTAAEEETPAPTEPSTEAPEPPEEPLLGELTVTGSSPDSLSLSWTIPQGRFDSFTVQYKDRDGRPQVVRVRGEESEVTVGGLEPGCKYKMHLYGLHEGQRVGPVSAVGVTAPKDEAETTQAVPTMTPEPPIKPRLGELTVTDATPDSLSLSWMVPEGQFDHFLVQYRNGDGQPKAVRVPGHEDGVTISGLEPDHKYKMNLYGFHGGQRVGPVSAIGVTEEETPSPTEPSTEAPEAPEEPLLGELTVTGSSPDSLSLSWTVPQGRFDSFTVQYKDRDGQPQVVRVRGEESEVTVGGLEPGRKYKMHLYGLHEGQRVGPVSTVGITAPLPTPLPVEPRLGELAVAAVTSDSVGLSWTVAQGPFDSFLVQYRDAQGQPQAVPVSGDLRAVAVSGLDPARKYKFLLFGLQNGKRHGPVPVEARTAPDTKPSPRLGELTVTDATPDSVGLSWTVPEGEFDSFVVQYKDKDGRLQVVPVAANQREVTVQGLEPSRKYRFLLYGLSGRKRLGPISADSTTAPLEKELPPHLGELTVAEETSSSLRLSWTVAQGPFDSFVVQYRDTDGQPRAVPVAADQRTVTVEDLEPGKKYKFLLYGLLGGKRLGPVSALGMTAPEEDTPAPELAPEAPEPPEEPRLGVLTVTDTTPDSMRLSWSVAQGPFDSFVVQYEDTNGQPQALLVDGDQSKILISGLEPSTPYRFLLYGLHEGKRLGPLSAEGTTGLAPAGQTSEESRPRLSQLSVTDVTTSSLRLNWEAPPGAFDSFLLRFGVPSPSTLEPHPRPLLQRELMVPGTRHSAVLRDLRSGTLYSLTLYGLRGPHKADSIQGTARTLSPVLESPRDLQFSEIRETSAKVNWMPPPSRADSFKVSYQLADGGEPQSVQVDGQARTQKLQGLIPGARYEVTVVSVRGFEESEPLTGFLTTVPDGPTQLRALNLTEGFAVLHWKPPQNPVDTYDVQVTAPGAPPLQAETPGSAVDYPLHDLVLHTNYTATVRGLRGPNLTSPASITFTTGLEAPRDLEAKEVTPRTALLTWTEPPVRPAGYLLSFHTPGGQNQEILLPGGITSHQLLGLFPSTSYNARLQAMWGQSLLPPVSTSFTTGGLRIPFPRDCGEEMQNGAGASRTSTIFLNGNRERPLNVFCDMETDGGGWLVFQRRMDGQTDFWRDWEDYAHGFGNISGEFWLGNEALHSLTQAGDYSMRVDLRAGDEAVFAQYDSFHVDSAAEYYRLHLEGYHGTAGDSMSYHSGSVFSARDRDPNSLLISCAVSYRGAWWYRNCHYANLNGLYGSTVDHQGVSWYHWKGFEFSVPFTEMKLRPRNFRSPAGGG

SEQ ID NO: 87635 - protein, 2725 aa, Homo sapiens
  Payload ID: 17534
  Gene Symbol: TENM1
  Gene Name: teneurin transmembrane protein 1
  Uniprot ID: Q9UKZ4
  ENSP ID: ENSP00000360171
MEQTDCKPYQPLPKVKHEMDLAYTSSSDESEDGRKPRQSYNSRETLHEYNQELRMNYNSQSRKRKEVEKSTQEMEFCETSHTLCSGYQTDMHSVSRHGYQLEMGSDVDTETEGAASPDHALRMWIRGMKSEHSSCLSSRANSALSLTDTDHERKSDGENGFKFSPVCCDMEAQAGSTQDVQSSPHNQFTFRPLPPPPPPPHACTCARKPPPAADSLQRRSMTTRSQPSPAAPAPPTSTQDSVHLHNSWVLNSNIPLETRHFLFKHGSGSSAIFSAASQNYPLTSNTVYSPPPRPLPRSTFSRPAFTFNKPYRCCNWKCTALSATAITVTLALLLAYVIAVHLFGLTWQLQPVEGELYANGVSKGNRGTESMDTTYSPIGGKVSDKSEKKVFQKGRAIDTGEVDIGAQVMQTIPPGLFWRFQITIHHPIYLKFNISLAKDSLLGIYGRRNIPPTHTQFDFVKLMDGKQLVKQDSKGSDDTQHSPRNLILTSLQETGFIEYMDQGPWYLAFYNDGKKMEQVFVLTTAIEIMDDCSTNCNGNGECISGHCHCFPGFLGPDCARDSCPVLCGGNGEYEKGHCVCRHGWKGPECDVPEEQCIDPTCFGHGTCIMGVCICVPGYKGEICEEEDCLDPMCSNHGICVKGECHCSTGWGGVNCETPLPVCQEQCSGHGTFLLDAGVCSCDPKWTGSDCSTELCTMECGSHGVCSRGICQCEEGWVGPTCEERSCHSHCTEHGQCKDGKCECSPGWEGDHCTIAHYLDAVRDGCPGLCFGNGRCTLDQNGWHCVCQVGWSGTGCNVVMEMLCGDNLDNDGDGLTDCVDPDCCQQSNCYISPLCQGSPDPLDLIQQSQTLFSQHTSRLFYDRIKFLIGKDSTHVIPPEVSFDSRRACVIRGQVVAIDGTPLVGVNVSFLHHSDYGFTISRQDGSFDLVAIGGISVILIFDRSPFLPEKRTLWLPWNQFIVVEKVTMQRVVSDPPSCDISNFISPNPIVLPSPLTSFGGSCPERGTIVPELQVVQEEIPIPSSFVRLSYLSSRTPGYKTLLRILLTHSTIPVGMIKVHLTVAVEGRLTQKWFPAAINLVYTFAWNKTDIYGQKVWGLAEALVSVGYEYETCPDFILWEQRTVVLQGFEMDASNLGGWSLNKHHILNPQSGIIHKGNGENMFISQQPPVISTIMGNGHQRSVACTNCNGPAHNNKLFAPVALASGPDGSVYVGDFNFVRRIFPSGNSVSILELSTSPAHKYYLAMDPVSESLYLSDTNTRKVYKLKSLVETKDLSKNFEVVAGTGDQCLPFDQSHCGDGGRASEASLNSPRGITVDRHGFIYFVDGTMIRKIDENAVITTVIGSNGLTSTQPLSCDSGMDITQVRLEWPTDLAVNPMDNSLYVLDNNIVLQISENRRVRIIAGRPIHCQVPGIDHFLVSKVAIHSTLESARAISVSHSGLLFIAETDERKVNRIQQVTTNGEIYIIAGAPTDCDCKIDPNCDCFSGDGGYAKDAKMKAPSSLAVSPDGTLYVADLGNVRIRTISRNQAHLNDMNIYEIASPADQELYQFTVNGTHLHTLNLITRDYVYNFTYNSEGDLGAITSSNGNSVHIRRDAGGMPLWLVVPGGQVYWLTISSNGVLKRVSAQGYNLALMTYPGNTGLLATKSNENGWTTVYEYDPEGHLTNATFPTGEVSSFHSDLEKLTKVELDTSNRENVLMSTNLTATSTIYILKQENTQSTYRVNPDGSLRVTFASGMEIGLSSEPHILAGAVNPTLGKCNISLPGEHNANLIEWRQRKEQNKGNVSAFERRLRAHNRNLLSIDFDHITRTGKIYDDHRKFTLRILYDQTGRPILWSPVSRYNEVNITYSPSGLVTFIQRGTWNEKMEYDQSGKIISRTWADGKIWSYTYLEKSVMLLLHSQRRYIFEYDQPDCLLSVTMPSMVRHSLQTMLSVGYYRNIYTPPDSSTSFIQDYSRDGRLLQTLHLGTGRRVLYKYTKQARLSEVLYDTTQVTLTYEESSGVIKTIHLMHDGFICTIRYRQTGPLIGRQIFRFSEEGLVNARFDYSYNNFRVTSMQAVINETPLPIDLYRYVDVSGRTEQFGKFSVINYDLNQVITTTVMKHTKIFSANGQVIEVQYEILKAIAYWMTIQYDNVGRMVICDIRVGVDANITRYFYEYDADGQLQTVSVNDKTQWRYSYDLNGNINLLSHGKSARLTPLRYDLRDRITRLGEIQYKMDEDGFLRQRGNDIFEYNSNGLLQKAYNKASGWTVQYYYDGLGRRVASKSSLGQHLQFFYADLTNPIRVTHLYNHTSSEITSLYYDLQGHLIAMELSSGEEYYVACDNTGTPLAVFSSRGQVIKEILYTPYGDIYHDTYPDFQVIIGFHGGLYDFLTKLVHLGQRDYDVVAGRWTTPNHHIWKQLNLLPKPFNLYSFENNYPVGKIQDVAKYTTDIRSWLELFGFQLHNVLPGFPKPELENLELTYELLRLQTKTQEWDPGKTILGIQCELQKQLRNFISLDQLPMTPRYNDGRCLEGGKQPRFAAVPSVFGKGIKFAIKDGIVTADIIGVANEDSRRLAAILNNAHYLENLHFTIEGRDTHYFIKLGSLEEDLVLIGNTGGRRILENGVNVTVSQMTSVLNGRTRRFADIQLQHGALCFNIRYGTTVEEEKNHVLEIARQRAVAQAWTKEQRRLQEGEEGIRAWTEGEKQQLLSTGRVQGYDGYFVLSVEQYLELSDSANNIHFMRQSEIGRR

SEQ ID NO: 87636 - protein, 2732 aa, Homo sapiens
  Payload ID: 17534
  Gene Symbol: TENM1
  Gene Name: teneurin transmembrane protein 1
  Uniprot ID: Q9UKZ4
  ENSP ID: ENSP00000403954
MEQTDCKPYQPLPKVKHEMDLAYTSSSDESEDGRKPRQSYNSRETLHEYNQELRMNYNSQSRKRKEVEKSTQEMEFCETSHTLCSGYQTDMHSVSRHGYQLEMGSDVDTETEGAASPDHALRMWIRGMKSEHSSCLSSRANSALSLTDTDHERKSDGENGFKFSPVCCDMEAQAGSTQDVQSSPHNQFTFRPLPPPPPPPHACTCARKPPPAADSLQRRSMTTRSQPSPAAPAPPTSTQDSVHLHNSWVLNSNIPLETRHFLFKHGSGSSAIFSAASQNYPLTSNTVYSPPPRPLPRSTFSRPAFTFNKPYRCCNWKCTALSATAITVTLALLLAYVIAVHLFGLTWQLQPVEGELYANGVSKGNRGTESMDTTYSPIGGKVSDKSEKKVFQKGRAIDTGEVDIGAQVMQTIPPGLFWRFQITIHHPIYLKFNISLAKDSLLGIYGRRNIPPTHTQFDFVKLMDGKQLVKQDSKGSDDTQHSPRNLILTSLQETGFIEYMDQGPWYLAFYNDGKKMEQVFVLTTAIEIMDDCSTNCNGNGECISGHCHCFPGFLGPDCARDSCPVLCGGNGEYEKGHCVCRHGWKGPECDVPEEQCIDPTCFGHGTCIMGVCICVPGYKGEICEEEDCLDPMCSNHGICVKGECHCSTGWGGVNCETPLPVCQEQCSGHGTFLLDAGVCSCDPKWTGSDCSTELCTMECGSHGVCSRGICQCEEGWVGPTCEERSCHSHCTEHGQCKDGKCECSPGWEGDHCTIAHYLDAVRDGCPGLCFGNGRCTLDQNGWHCVCQVGWSGTGCNVVMEMLCGDNLDNDGDGLTDCVDPDCCQQSNCYISPLCQGSPDPLDLIQQSQTLFSQHTSRLFYDRIKFLIGKDSTHVIPPEVSFDSRRACVIRGQVVAIDGTPLVGVNVSFLHHSDYGFTISRQDGSFDLVAIGGISVILIFDRSPFLPEKRTLWLPWNQFIVVEKVTMQRVVSDPPSCDISNFISPNPIVLPSPLTSFGGSCPERGTIVPELQVVQEEIPIPSSFVRLSYLSSRTPGYKTLLRILLTHSTIPVGMIKVHLTVAVEGRLTQKWFPAAINLVYTFAWNKTDIYGQKVWGLAEALVSVGYEYETCPDFILWEQRTVVLQGFEMDASNLGGWSLNKHHILNPQSGIIHKGNGENMFISQQPPVISTIMGNGHQRSVACTNCNGPAHNNKLFAPVALASGPDGSVYVGDFNFVRRIFPSGNSVSILELRNRDTRHSTSPAHKYYLAMDPVSESLYLSDTNTRKVYKLKSLVETKDLSKNFEVVAGTGDQCLPFDQSHCGDGGRASEASLNSPRGITVDRHGFIYFVDGTMIRKIDENAVITTVIGSNGLTSTQPLSCDSGMDITQVRLEWPTDLAVNPMDNSLYVLDNNIVLQISENRRVRIIAGRPIHCQVPGIDHFLVSKVAIHSTLESARAISVSHSGLLFIAETDERKVNRIQQVTTNGEIYIIAGAPTDCDCKIDPNCDCFSGDGGYAKDAKMKAPSSLAVSPDGTLYVADLGNVRIRTISRNQAHLNDMNIYEIASPADQELYQFTVNGTHLHTLNLITRDYVYNFTYNSEGDLGAITSSNGNSVHIRRDAGGMPLWLVVPGGQVYWLTISSNGVLKRVSAQGYNLALMTYPGNTGLLATKSNENGWTTVYEYDPEGHLTNATFPTGEVSSFHSDLEKLTKVELDTSNRENVLMSTNLTATSTIYILKQENTQSTYRVNPDGSLRVTFASGMEIGLSSEPHILAGAVNPTLGKCNISLPGEHNANLIEWRQRKEQNKGNVSAFERRLRAHNRNLLSIDFDHITRTGKIYDDHRKFTLRILYDQTGRPILWSPVSRYNEVNITYSPSGLVTFIQRGTWNEKMEYDQSGKIISRTWADGKIWSYTYLEKSVMLLLHSQRRYIFEYDQPDCLLSVTMPSMVRHSLQTMLSVGYYRNIYTPPDSSTSFIQDYSRDGRLLQTLHLGTGRRVLYKYTKQARLSEVLYDTTQVTLTYEESSGVIKTIHLMHDGFICTIRYRQTGPLIGRQIFRFSEEGLVNARFDYSYNNFRVTSMQAVINETPLPIDLYRYVDVSGRTEQFGKFSVINYDLNQVITTTVMKHTKIFSANGQVIEVQYEILKAIAYWMTIQYDNVGRMVICDIRVGVDANITRYFYEYDADGQLQTVSVNDKTQWRYSYDLNGNINLLSHGKSARLTPLRYDLRDRITRLGEIQYKMDEDGFLRQRGNDIFEYNSNGLLQKAYNKASGWTVQYYYDGLGRRVASKSSLGQHLQFFYADLTNPIRVTHLYNHTSSEITSLYYDLQGHLIAMELSSGEEYYVACDNTGTPLAVFSSRGQVIKEILYTPYGDIYHDTYPDFQVIIGFHGGLYDFLTKLVHLGQRDYDVVAGRWTTPNHHIWKQLNLLPKPFNLYSFENNYPVGKIQDVAKYTTDIRSWLELFGFQLHNVLPGFPKPELENLELTYELLRLQTKTQEWDPGKTILGIQCELQKQLRNFISLDQLPMTPRYNDGRCLEGGKQPRFAAVPSVFGKGIKFAIKDGIVTADIIGVANEDSRRLAAILNNAHYLENLHFTIEGRDTHYFIKLGSLEEDLVLIGNTGGRRILENGVNVTVSQMTSVLNGRTRRFADIQLQHGALCFNIRYGTTVEEEKNHVLEIARQRAVAQAWTKEQRRLQEGEEGIRAWTEGEKQQLLSTGRVQGYDGYFVLSVEQYLELSDSANNIHFMRQSEIGRR

SEQ ID NO: 87637 - protein, 2598 aa, Homo sapiens
  Payload ID: 17535
  Gene Symbol: TENM2
  Gene Name: teneurin transmembrane protein 2
  ENSP ID: ENSP00000384905
GRPIPPTSSPSLLPSAQLPSSHNPPPVSCQMPLLDSNTSHQIMDTNPDEEFSPNSYLLRACSGPQQASSSGPPNHHSQSTLRPPLPPPHNHTLSHHHSSANSLNRNSLTNRRSQIHAPAPAPNDLATTPESVQLQDSWVLNSNVPLETRHFLFKTSSGSTPLFSSSSPGYPLTSGTVYTPPPRLLPRNTFSRKAFKLKKPSKYCSWKCAALSAIAAALLLAILLAYFIAMHLLGLNWQLQPADGHTFNNGIRTGLPGNDDVATMPSGGKVPWSLKNSSIDSGEAEVGRRVTQEVPPGVFWRSQIHISQPQFLKFNISLGKDALFGVYIRRGLPPSHAQYDFMERLDGKEKWSVVESPRERRSIQTLVQNEAVFVQYLDVGLWHLAFYNDGKDKEMVSFNTVVLDSVQDCPRNCHGNGECVSGVCHCFPGFLGADCAKAACPVLCSGNGQYSKGTCQCYSGWKGAECDVPMNQCIDPSCGGHGSCIDGNCVCSAGYKGEHCEEVDCLDPTCSSHGVCVNGECLCSPGWGGLNCELARVQCPDQCSGHGTYLPDTGLCSCDPNWMGPDCSVEVCSVDCGTHGVCIGGACRCEEGWTGAACDQRVCHPRCIEHGTCKDGKCECREGWNGEHCTIDGCPDLCNGNGRCTLGQNSWQCVCQTGWRGPGCNVAMETSCADNKDNEGDGLVDCLDPDCCLQSACQNSLLCRGSRDPLDIIQQGQTDWPAVKSFYDRIKLLAGKDSTHIIPGENPFNSSLVSLIRGQVVTTDGTPLVGVNVSFVKYPKYGYTITRQDGTFDLIANGGASLTLHFERAPFMSQERTVWLPWNSFYAMDTLVMKTEENSIPSCDLSGFVRPDPIIISSPLSTFFSAAPGQNPIVPETQVLHEEIELPGSNVKLRYLSSRTAGYKSLLKITMTQSTVPLNLIRVHLMVAVEGHLFQKSFQASPNLAYTFIWDKTDAYGQRVYGLSDAVVSVGFEYETCPSLILWEKRTALLQGFELDPSNLGGWSLDKHHILNVKSGILHKGTGENQFLTQQPAIITSIMGNGRRRSISCPSCNGLAEGNKLLAPVALAVGIDGSLYVGDFNYIRRIFPSRNVTSILELRNKEFKHSNNPAHKYYLAVDPVSGSLYVSDTNSRRIYRVKSLSGTKDLAGNSEVVAGTGEQCLPFDEARCGDGGKAIDATLMSPRGIAVDKNGLMYFVDATMIRKVDQNGIISTLLGSNDLTAVRPLSCDSSMDVAQVRLEWPTDLAVNPMDNSLYVLENNVILRITENHQVSIIAGRPMHCQVPGIDYSLSKLAIHSALESASAIAISHTGVLYITETDEKKINRLRQVTTNGEICLLAGAASDCDCKNDVNCNCYSGDDAYATDAILNSPSSLAVAPDGTIYIADLGNIRIRAVSKNKPVLNAFNQYEAASPGEQELYVFNADGIHQYTVSLVTGEYLYNFTYSTDNDVTELIDNNGNSLKIRRDSSGMPRHLLMPDNQIITLTVGTNGGLKVVSTQNLELGLMTYDGNTGLLATKSDETGWTTFYDYDHEGRLTNVTRPTGVVTSLHREMEKSITIDIENSNRDDDVTVITNLSSVEASYTVVQDQVRNSYQLCNNGTLRVMYANGMGISFHSEPHVLAGTITPTIGRCNISLPMENGLNSIEWRLRKEQIKGKVTIFGRKLRVHGRNLLSIDYDRNIRTEKIYDDHRKFTLRIIYDQVGRPFLWLPSSGLAAVNVSYFFNGRLAGLQRGAMSERTDIDKQGRIVSRMFADGKVWSYSYLDKSMVLLLQSQRQYIFEYDSSDRLLAVTMPSVARHSMSTHTSIGYIRNIYNPPESNASVIFDYSDDGRILKTSFLGTGRQVFYKYGKLSKLSEIVYDSTAVTFGYDETTGVLKMVNLQSGGFSCTIRYRKIGPLVDKQIYRFSEEGMVNARFDYTYHDNSFRIASIKPVISETPLPVDLYRYDEISGKVEHFGKFGVIYYDINQIITTAVMTLSKHFDTHGRIKEVQYEMFRSLMYWMTVQYDSMGRVIKRELKLGPYANTTKYTYDYDGDGQLQSVAVNDRPTWRYSYDLNGNLHLLNPGNSVRLMPLRYDLRDRITRLGDVQYKIDDDGYLCQRGSDIFEYNSKGLLTRAYNKASGWSVQYRYDGVGRRASYKTNLGHHLQYFYSDLHNPTRITHVYNHSNSEITSLYYDLQGHLFAMESSSGEEYYVASDNTGTPLAVFSINGLMIKQLQYTAYGEIYYDSNPDFQMVIGFHGGLYDPLTKLVHFTQRDYDVLAGRWTSPDYTMWKNVGKEPAPFNLYMFKSNNPLSSELDLKNYVTDVKSWLVMFGFQLSNIIPGFPRAKMYFVPPPYELSESQASENGQLITGVQQTTERHNQAFMALEGQVITKKLHASIREKAGHWFATTTPIIGKGIMFAIKEGRVTTGVSSIASEDSRKVASVLNNAYYLDKMHYSIEGKDTHYFVKIGSADGDLVTLGTTIGRKVLESGVNVTVSQPTLLVNGRTRRFTNIEFQYSTLLLSIRYGLTPDTLDEEKARVLDQARQRALGTAWAKEQQKARDGREGSRLWTEGEKQQLLSTGRVQGYEGYYVLPVEQYPELADSSSNIQFLRQNEMGKR

SEQ ID NO: 87638 - protein, 2535 aa, Homo sapiens
  Payload ID: 17535
  Gene Symbol: TENM2
  Gene Name: teneurin transmembrane protein 2
  ENSP ID: ENSP00000427874
MVSPPLLIISVAGTIECKPDHLLWRPGSTSPQSVSFLHGKVVMESLGPPNHHSQSTLRPPLPPPHNHTLSHHHSSANSLNRNSLTNRRSQIHAPAPAPNDLATTPESVQLQDSWVLNSNVPLETRHFLFKTSSGSTPLFSSSSPGYPLTSGTVYTPPPRLLPRNTFSRKAFKLKKPSKYCSWKCAALSAIAAALLLAILLAYFIVPWSLKNSSIDSGEAEVGRRVTQEVPPGVFWRSQIHISQPQFLKFNISLGKDALFGVYIRRGLPPSHAQYDFMERLDGKEKWSVVESPRERRSIQTLVQNEAVFVQYLDVGLWHLAFYNDGKDKEMVSFNTVVLDSVQDCPRNCHGNGECVSGVCHCFPGFLGADCAKAACPVLCSGNGQYSKGTCQCYSGWKGAECDVPMNQCIDPSCGGHGSCIDGNCVCSAGYKGEHCEEVDCLDPTCSSHGVCVNGECLCSPGWGGLNCELARVQCPDQCSGHGTYLPDTGLCSCDPNWMGPDCSVEVCSVDCGTHGVCIGGACRCEEGWTGAACDQRVCHPRCIEHGTCKDGKCECREGWNGEHCTIGRQTAGTETDGCPDLCNGNGRCTLGQNSWQCVCQTGWRGPGCNVAMETSCADNKDNEGDGLVDCLDPDCCLQSACQNSLLCRGSRDPLDIIQQGQTDWPAVKSFYDRIKLLAGKDSTHIIPGENPFNSSLVSLIRGQVVTTDGTPLVGVNVSFVKYPKYGYTITRQDGTFDLIANGGASLTLHFERAPFMSQERTVWLPWNSFYAMDTLVMKTEENSIPSCDLSGFVRPDPIIISSPLSTFFSAAPGQNPIVPETQVLHEEIELPGSNVKLRYLSSRTAGYKSLLKITMTQSTVPLNLIRVHLMVAVEGHLFQKSFQASPNLAYTFIWDKTDAYGQRVYGLSDAVVSVGFEYETCPSLILWEKRTALLQGFELDPSNLGGWSLDKHHILNVKSGILHKGTGENQFLTQQPAIITSIMGNGRRRSISCPSCNGLAEGNKLLAPVALAVGIDGSLYVGDFNYIRRIFPSRNVTSILELRNNPAHKYYLAVDPVSGSLYVSDTNSRRIYRVKSLSGTKDLAGNSEVVAGTGEQCLPFDEARCGDGGKAIDATLMSPRGIAVDKNGLMYFVDATMIRKVDQNGIISTLLGSNDLTAVRPLSCDSSMDVAQVRLEWPTDLAVNPMDNSLYVLENNVILRITENHQVSIIAGRPMHCQVPGIDYSLSKLAIHSALESASAIAISHTGVLYITETDEKKINRLRQVTTNGEICLLAGAASDCDCKNDVNCNCYSGDDAYATDAILNSPSSLAVAPDGTIYIADLGNIRIRAVSKNKPVLNAFNQYEAASPGEQELYVFNADGIHQYTVSLVTGEYLYNFTYSTDNDVTELIDNNGNSLKIRRDSSGMPRHLLMPDNQIITLTVGTNGGLKVVSTQNLELGLMTYDGNTGLLATKSDETGWTTFYDYDHEGRLTNVTRPTGVVTSLHREMEKSITIDIENSNRDDDVTVITNLSSVEASYTVVQDQVRNSYQLCNNGTLRVMYANGMGISFHSEPHVLAGTITPTIGRCNISLPMENGLNSIEWRLRKEQIKGKVTIFGRKLRVHGRNLLSIDYDRNIRTEKIYDDHRKFTLRIIYDQVGRPFLWLPSSGLAAVNVSYFFNGRLAGLQRGAMSERTDIDKQGRIVSRMFADGKVWSYSYLDKSMVLLLQSQRQYIFEYDSSDRLLAVTMPSVARHSMSTHTSIGYIRNIYNPPESNASVIFDYSDDGRILKTSFLGTGRQVFYKYGKLSKLSEIVYDSTAVTFGYDETTGVLKMVNLQSGGFSCTIRYRKIGPLVDKQIYRFSEEGMVNARFDYTYHDNSFRIASIKPVISETPLPVDLYRYDEISGKVEHFGKFGVIYYDINQIITTAVMTLSKHFDTHGRIKEVQYEMFRSLMYWMTVQYDSMGRVIKRELKLGPYANTTKYTYDYDGDGQLQSVAVNDRPTWRYSYDLNGNLHLLNPGNSVRLMPLRYDLRDRITRLGDVQYKIDDDGYLCQRGSDIFEYNSKGLLTRAYNKASGWSVQYRYDGVGRRASYKTNLGHHLQYFYSDLHNPTRITHVYNHSNSEITSLYYDLQGHLFAMESSSGEEYYVASDNTGTPLAVFSINGLMIKQLQYTAYGEIYYDSNPDFQMVIGFHGGLYDPLTKLVHFTQRDYDVLAGRWTSPDYTMWKNVGKEPAPFNLYMFKSNNPLSSELDLKNYVTDVKSWLVMFGFQLSNIIPGFPRAKMYFVPPPYELSESQASENGQLITGVQQTTERHNQAFMALEGQVITKKLHASIREKAGHWFATTTPIIGKGIMFAIKEGRVTTGVSSIASEDSRKVASVLNNAYYLDKMHYSIEGKDTHYFVKIGSADGDLVTLGTTIGRKVLESGVNVTVSQPTLLVNGRTRRFTNIEFQYSTLLLSIRYGLTPDTLDEEKARVLDQARQRALGTAWAKEQQKARDGREGSRLWTEGEKQQLLSTGRVQGYEGYYVLPVEQYPELADSSSNIQFLRQNEMGKR

SEQ ID NO: 87639 - protein, 2653 aa, Homo sapiens
  Payload ID: 17535
  Gene Symbol: TENM2
  Gene Name: teneurin transmembrane protein 2
  ENSP ID: ENSP00000428964
MVSPPLLIISVAGTIECKPDHLLWRPGSTSPQSVSFLHGKVVMESLGRPIPPTSSPSLLPSAQLPSSHNPPPVSCQMPLLDSNTSHQIMDTNPDEEFSPNSYLLRACSGPQQASSSGPPNHHSQSTLRPPLPPPHNHTLSHHHSSANSLNRNSLTNRRSQIHAPAPAPNDLATTPESVQLQDSWVLNSNVPLETRHFLFKTSSGSTPLFSSSSPGYPLTSGTVYTPPPRLLPRNTFSRKAFKLKKPSKYCSWKCAALSAIAAALLLAILLAYFIAMHLLGLNWQLQPADGHTFNNGIRTGLPGNDDVATMPSGGKVPWSLKNSSIDSGEAEVGRRVTQEVPPGVFWRSQIHISQPQFLKFNISLGKDALFGVYIRRGLPPSHAQYDFMERLDGKEKWSVVESPRERRSIQTLVQNEAVFVQYLDVGLWHLAFYNDGKDKEMVSFNTVVLDSVQDCPRNCHGNGECVSGVCHCFPGFLGADCAKAACPVLCSGNGQYSKGTCQCYSGWKGAECDVPMNQCIDPSCGGHGSCIDGNCVCSAGYKGEHCEEVDCLDPTCSSHGVCVNGECLCSPGWGGLNCELARVQCPDQCSGHGTYLPDTGLCSCDPNWMGPDCSVEVCSVDCGTHGVCIGGACRCEEGWTGAACDQRVCHPRCIEHGTCKDGKCECREGWNGEHCTIGRQTAGTETDGCPDLCNGNGRCTLGQNSWQCVCQTGWRGPGCNVAMETSCADNKDNEGDGLVDCLDPDCCLQSACQNSLLCRGSRDPLDIIQQGQTDWPAVKSFYDRIKLLAGKDSTHIIPGENPFNSSLVSLIRGQVVTTDGTPLVGVNVSFVKYPKYGYTITRQDGTFDLIANGGASLTLHFERAPFMSQERTVWLPWNSFYAMDTLVMKTEENSIPSCDLSGFVRPDPIIISSPLSTFFSAAPGQNPIVPETQVLHEEIELPGSNVKLRYLSSRTAGYKSLLKITMTQSTVPLNLIRVHLMVAVEGHLFQKSFQASPNLAYTFIWDKTDAYGQRVYGLSDAVVSVGFEYETCPSLILWEKRTALLQGFELDPSNLGGWSLDKHHILNVKSGILHKGTGENQFLTQQPAIITSIMGNGRRRSISCPSCNGLAEGNKLLAPVALAVGIDGSLYVGDFNYIRRIFPSRNVTSILELRNKEFKHSNNPAHKYYLAVDPVSGSLYVSDTNSRRIYRVKSLSGTKDLAGNSEVVAGTGEQCLPFDEARCGDGGKAIDATLMSPRGIAVDKNGLMYFVDATMIRKVDQNGIISTLLGSNDLTAVRPLSCDSSMDVAQVRLEWPTDLAVNPMDNSLYVLENNVILRITENHQVSIIAGRPMHCQVPGIDYSLSKLAIHSALESASAIAISHTGVLYITETDEKKINRLRQVTTNGEICLLAGAASDCDCKNDVNCNCYSGDDAYATDAILNSPSSLAVAPDGTIYIADLGNIRIRAVSKNKPVLNAFNQYEAASPGEQELYVFNADGIHQYTVSLVTGEYLYNFTYSTDNDVTELIDNNGNSLKIRRDSSGMPRHLLMPDNQIITLTVGTNGGLKVVSTQNLELGLMTYDGNTGLLATKSDETGWTTFYDYDHEGRLTNVTRPTGVVTSLHREMEKSITIDIENSNRDDDVTVITNLSSVEASYTVVQDQVRNSYQLCNNGTLRVMYANGMGISFHSEPHVLAGTITPTIGRCNISLPMENGLNSIEWRLRKEQIKGKVTIFGRKLRVHGRNLLSIDYDRNIRTEKIYDDHRKFTLRIIYDQVGRPFLWLPSSGLAAVNVSYFFNGRLAGLQRGAMSERTDIDKQGRIVSRMFADGKVWSYSYLDKSMVLLLQSQRQYIFEYDSSDRLLAVTMPSVARHSMSTHTSIGYIRNIYNPPESNASVIFDYSDDGRILKTSFLGTGRQVFYKYGKLSKLSEIVYDSTAVTFGYDETTGVLKMVNLQSGGFSCTIRYRKIGPLVDKQIYRFSEEGMVNARFDYTYHDNSFRIASIKPVISETPLPVDLYRYDEISGKVEHFGKFGVIYYDINQIITTAVMTLSKHFDTHGRIKEVQYEMFRSLMYWMTVQYDSMGRVIKRELKLGPYANTTKYTYDYDGDGQLQSVAVNDRPTWRYSYDLNGNLHLLNPGNSVRLMPLRYDLRDRITRLGDVQYKIDDDGYLCQRGSDIFEYNSKGLLTRAYNKASGWSVQYRYDGVGRRASYKTNLGHHLQYFYSDLHNPTRITHVYNHSNSEITSLYYDLQGHLFAMESSSGEEYYVASDNTGTPLAVFSINGLMIKQLQYTAYGEIYYDSNPDFQMVIGFHGGLYDPLTKLVHFTQRDYDVLAGRWTSPDYTMWKNVGKEPAPFNLYMFKSNNPLSSELDLKNYVTDVKSWLVMFGFQLSNIIPGFPRAKMYFVPPPYELSESQASENGQLITGVQQTTERHNQAFMALEGQVITKKLHASIREKAGHWFATTTPIIGKGIMFAIKEGRVTTGVSSIASEDSRKVASVLNNAYYLDKMHYSIEGKDTHYFVKIGSADGDLVTLGTTIGRKVLESGVNVTVSQPTLLVNGRTRRFTNIEFQYSTLLLSIRYGLTPDTLDEEKARVLDQARQRALGTAWAKEQQKARDGREGSRLWTEGEKQQLLSTGRVQGYEGYYVLPVEQYPELADSSSNIQFLRQNEMGKR

SEQ ID NO: 87640 - protein, 2774 aa, Homo sapiens
  Payload ID: 17535
  Gene Symbol: TENM2
  Gene Name: teneurin transmembrane protein 2
  Uniprot ID: Q9NT68
  ENSP ID: ENSP00000429430
MDVKDRRHRSLTRGRCGKECRYTSSSLDSEDCRVPTQKSYSSSETLKAYDHDSRMHYGNRVTDLIHRESDEFPRQGTNFTLAELGICEPSPHRSGYCSDMGILHQGYSLSTGSDADSDTEGGMSPEHAIRLWGRGIKSRRSSGLSSRENSALTLTDSDNENKSDDENGRPIPPTSSPSLLPSAQLPSSHNPPPVSCQMPLLDSNTSHQIMDTNPDEEFSPNSYLLRACSGPQQASSSGPPNHHSQSTLRPPLPPPHNHTLSHHHSSANSLNRNSLTNRRSQIHAPAPAPNDLATTPESVQLQDSWVLNSNVPLETRHFLFKTSSGSTPLFSSSSPGYPLTSGTVYTPPPRLLPRNTFSRKAFKLKKPSKYCSWKCAALSAIAAALLLAILLAYFIAMHLLGLNWQLQPADGHTFNNGIRTGLPGNDDVATMPSGGKVPWSLKNSSIDSGEAEVGRRVTQEVPPGVFWRSQIHISQPQFLKFNISLGKDALFGVYIRRGLPPSHAQYDFMERLDGKEKWSVVESPRERRSIQTLVQNEAVFVQYLDVGLWHLAFYNDGKDKEMVSFNTVVLDSVQDCPRNCHGNGECVSGVCHCFPGFLGADCAKAACPVLCSGNGQYSKGTCQCYSGWKGAECDVPMNQCIDPSCGGHGSCIDGNCVCSAGYKGEHCEEVDCLDPTCSSHGVCVNGECLCSPGWGGLNCELARVQCPDQCSGHGTYLPDTGLCSCDPNWMGPDCSVEVCSVDCGTHGVCIGGACRCEEGWTGAACDQRVCHPRCIEHGTCKDGKCECREGWNGEHCTIGRQTAGTETDGCPDLCNGNGRCTLGQNSWQCVCQTGWRGPGCNVAMETSCADNKDNEGDGLVDCLDPDCCLQSACQNSLLCRGSRDPLDIIQQGQTDWPAVKSFYDRIKLLAGKDSTHIIPGENPFNSSLVSLIRGQVVTTDGTPLVGVNVSFVKYPKYGYTITRQDGTFDLIANGGASLTLHFERAPFMSQERTVWLPWNSFYAMDTLVMKTEENSIPSCDLSGFVRPDPIIISSPLSTFFSAAPGQNPIVPETQVLHEEIELPGSNVKLRYLSSRTAGYKSLLKITMTQSTVPLNLIRVHLMVAVEGHLFQKSFQASPNLAYTFIWDKTDAYGQRVYGLSDAVVSVGFEYETCPSLILWEKRTALLQGFELDPSNLGGWSLDKHHILNVKSGILHKGTGENQFLTQQPAIITSIMGNGRRRSISCPSCNGLAEGNKLLAPVALAVGIDGSLYVGDFNYIRRIFPSRNVTSILELRNKEFKHSNNPAHKYYLAVDPVSGSLYVSDTNSRRIYRVKSLSGTKDLAGNSEVVAGTGEQCLPFDEARCGDGGKAIDATLMSPRGIAVDKNGLMYFVDATMIRKVDQNGIISTLLGSNDLTAVRPLSCDSSMDVAQVRLEWPTDLAVNPMDNSLYVLENNVILRITENHQVSIIAGRPMHCQVPGIDYSLSKLAIHSALESASAIAISHTGVLYITETDEKKINRLRQVTTNGEICLLAGAASDCDCKNDVNCNCYSGDDAYATDAILNSPSSLAVAPDGTIYIADLGNIRIRAVSKNKPVLNAFNQYEAASPGEQELYVFNADGIHQYTVSLVTGEYLYNFTYSTDNDVTELIDNNGNSLKIRRDSSGMPRHLLMPDNQIITLTVGTNGGLKVVSTQNLELGLMTYDGNTGLLATKSDETGWTTFYDYDHEGRLTNVTRPTGVVTSLHREMEKSITIDIENSNRDDDVTVITNLSSVEASYTVVQDQVRNSYQLCNNGTLRVMYANGMGISFHSEPHVLAGTITPTIGRCNISLPMENGLNSIEWRLRKEQIKGKVTIFGRKLRVHGRNLLSIDYDRNIRTEKIYDDHRKFTLRIIYDQVGRPFLWLPSSGLAAVNVSYFFNGRLAGLQRGAMSERTDIDKQGRIVSRMFADGKVWSYSYLDKSMVLLLQSQRQYIFEYDSSDRLLAVTMPSVARHSMSTHTSIGYIRNIYNPPESNASVIFDYSDDGRILKTSFLGTGRQVFYKYGKLSKLSEIVYDSTAVTFGYDETTGVLKMVNLQSGGFSCTIRYRKIGPLVDKQIYRFSEEGMVNARFDYTYHDNSFRIASIKPVISETPLPVDLYRYDEISGKVEHFGKFGVIYYDINQIITTAVMTLSKHFDTHGRIKEVQYEMFRSLMYWMTVQYDSMGRVIKRELKLGPYANTTKYTYDYDGDGQLQSVAVNDRPTWRYSYDLNGNLHLLNPGNSVRLMPLRYDLRDRITRLGDVQYKIDDDGYLCQRGSDIFEYNSKGLLTRAYNKASGWSVQYRYDGVGRRASYKTNLGHHLQYFYSDLHNPTRITHVYNHSNSEITSLYYDLQGHLFAMESSSGEEYYVASDNTGTPLAVFSINGLMIKQLQYTAYGEIYYDSNPDFQMVIGFHGGLYDPLTKLVHFTQRDYDVLAGRWTSPDYTMWKNVGKEPAPFNLYMFKSNNPLSSELDLKNYVTDVKSWLVMFGFQLSNIIPGFPRAKMYFVPPPYELSESQASENGQLITGVQQTTERHNQAFMALEGQVITKKLHASIREKAGHWFATTTPIIGKGIMFAIKEGRVTTGVSSIASEDSRKVASVLNNAYYLDKMHYSIEGKDTHYFVKIGSADGDLVTLGTTIGRKVLESGVNVTVSQPTLLVNGRTRRFTNIEFQYSTLLLSIRYGLTPDTLDEEKARVLDQARQRALGTAWAKEQQKARDGREGSRLWTEGEKQQLLSTGRVQGYEGYYVLPVEQYPELADSSSNIQFLRQNEMGKR

SEQ ID NO: 87641 - protein, 2607 aa, Homo sapiens
  Payload ID: 17535
  Gene Symbol: TENM2
  Gene Name: teneurin transmembrane protein 2
  ENSP ID: ENSP00000438635
GRPIPPTSSPSLLPSAQLPSSHNPPPVSCQMPLLDSNTSHQIMDTNPDEEFSPNSYLLRACSGPQQASSSGPPNHHSQSTLRPPLPPPHNHTLSHHHSSANSLNRNSLTNRRSQIHAPAPAPNDLATTPESVQLQDSWVLNSNVPLETRHFLFKTSSGSTPLFSSSSPGYPLTSGTVYTPPPRLLPRNTFSRKAFKLKKPSKYCSWKCAALSAIAAALLLAILLAYFIAMHLLGLNWQLQPADGHTFNNGIRTGLPGNDDVATMPSGGKVPWSLKNSSIDSGEAEVGRRVTQEVPPGVFWRSQIHISQPQFLKFNISLGKDALFGVYIRRGLPPSHAQYDFMERLDGKEKWSVVESPRERRSIQTLVQNEAVFVQYLDVGLWHLAFYNDGKDKEMVSFNTVVLDSVQDCPRNCHGNGECVSGVCHCFPGFLGADCAKAACPVLCSGNGQYSKGTCQCYSGWKGAECDVPMNQCIDPSCGGHGSCIDGNCVCSAGYKGEHCEEVDCLDPTCSSHGVCVNGECLCSPGWGGLNCELARVQCPDQCSGHGTYLPDTGLCSCDPNWMGPDCSVEVCSVDCGTHGVCIGGACRCEEGWTGAACDQRVCHPRCIEHGTCKDGKCECREGWNGEHCTIARQTGGRETNGCPDLCNGNGRCTLGQNSWQCVCQTGWRGPGCNVAMETSCADNKDNEGDGLVDCLDPDCCLQSACQNSLLCRGSRDPLDIIQQGQTDWPAVKSFYDRIKLLAGKDSTHIIPGENPFNSSLVSLIRGQVVTTDGTPLVGVNVSFVKYPKYGYTITRQDGTFDLIANGGASLTLHFERAPFMSQERTVWLPWNSFYAMDTLVMKTEENSIPSCDLSGFVRPDPIIISSPLSTFFSAAPGQNPIVPETQVLHEEIELPGSNVKLRYLSSRTAGYKSLLKITMTQSTVPLNLIRVHLMVAVEGHLFQKSFQASPNLAYTFIWDKTDAYGQRVYGLSDAVVSVGFEYETCPSLILWEKRTALLQGFELDPSNLGGWSLDKHHILNVKSGILHKGTGENQFLTQQPAIITSIMGNGRRRSISCPSCNGLAEGNKLLAPVALAVGIDGSLYVGDFNYIRRIFPSRNVTSILELRNKEFKHSNNPAHKYYLAVDPVSGSLYVSDTNSRRIYRVKSLSGTKDLAGNSEVVAGTGEQCLPFDEARCGDGGKAIDATLMSPRGIAVDKNGLMYFVDATMIRKVDQNGIISTLLGSNDLTAVRPLSCDSSMDVAQVRLEWPTDLAVNPMDNSLYVLENNVILRITENHQVSIIAGRPMHCQVPGIDYSLSKLAIHSALESASAIAISHTGVLYITETDEKKINRLRQVTTNGEICLLAGAASDCDCKNDVNCNCYSGDDAYATDAILNSPSSLAVAPDGTIYIADLGNIRIRAVSKNKPVLNAFNQYEAASPGEQELYVFNADGIHQYTVSLVTGEYLYNFTYSTDNDVTELIDNNGNSLKIRRDSSGMPRHLLMPDNQIITLTVGTNGGLKVVSTQNLELGLMTYDGNTGLLATKSDETGWTTFYDYDHEGRLTNVTRPTGVVTSLHREMEKSITIDIENSNRDDDVTVITNLSSVEASYTVVQDQVRNSYQLCNNGTLRVMYANGMGISFHSEPHVLAGTITPTIGRCNISLPMENGLNSIEWRLRKEQIKGKVTIFGRKLRVHGRNLLSIDYDRNIRTEKIYDDHRKFTLRIIYDQVGRPFLWLPSSGLAAVNVSYFFNGRLAGLQRGAMSERTDIDKQGRIVSRMFADGKVWSYSYLDKSMVLLLQSQRQYIFEYDSSDRLLAVTMPSVARHSMSTHTSIGYIRNIYNPPESNASVIFDYSDDGRILKTSFLGTGRQVFYKYGKLSKLSEIVYDSTAVTFGYDETTGVLKMVNLQSGGFSCTIRYRKIGPLVDKQIYRFSEEGMVNARFDYTYHDNSFRIASIKPVISETPLPVDLYRYDEISGKVEHFGKFGVIYYDINQIITTAVMTLSKHFDTHGRIKEVQYEMFRSLMYWMTVQYDSMGRVIKRELKLGPYANTTKYTYDYDGDGQLQSVAVNDRPTWRYSYDLNGNLHLLNPGNSVRLMPLRYDLRDRITRLGDVQYKIDDDGYLCQRGSDIFEYNSKGLLTRAYNKASGWSVQYRYDGVGRRASYKTNLGHHLQYFYSDLHNPTRITHVYNHSNSEITSLYYDLQGHLFAMESSSGEEYYVASDNTGTPLAVFSINGLMIKQLQYTAYGEIYYDSNPDFQMVIGFHGGLYDPLTKLVHFTQRDYDVLAGRWTSPDYTMWKNVGKEPAPFNLYMFKSNNPLSSELDLKNYVTDVKSWLVMFGFQLSNIIPGFPRAKMYFVPPPYELSESQASENGQLITGVQQTTERHNQAFMALEGQVITKKLHASIREKAGHWFATTTPIIGKGIMFAIKEGRVTTGVSSIASEDSRKVASVLNNAYYLDKMHYSIEGKDTHYFVKIGSADGDLVTLGTTIGRKVLESGVNVTVSQPTLLVNGRTRRFTNIEFQYSTLLLSIRYGLTPDTLDEEKARVLDQARQRALGTAWAKEQQKARDGREGSRLWTEGEKQQLLSTGRVQGYEGYYVLPVEQYPELADSSSNIQFLRQNEMGKR

SEQ ID NO: 87642 - protein, 2529 aa, Homo sapiens
  Payload ID: 17536
  Gene Symbol: TENM3
  Gene Name: teneurin transmembrane protein 3
  ENSP ID: ENSP00000385276
EQPASNQGQSTLQPLPPSHKQHSAQHHPSITSLNRNSLTNRRNQSPAPPAALPAELQTTPESVQLQDSWVLGSNVPLESRHFLFKTGTGTTPLFSTATPGYTMASGSVYSPPTRPLPRNTLSRSAFKFKKSSKYCSWKCTALCAVGVSVLLAILLSYFIAMHLFGLNWQLQQTENDTFENGKVNSDTMPTNTVSLPSGDNGKLGGFTQENNTIDSGELDIGRRAIQEIPPGIFWRSQLFIDQPQFLKFNISLQKDALIGVYGRKGLPPSHTQYDFVELLDGSRLIAREQRSLLETERAGRQARSVSLHEAGFIQYLDSGIWHLAFYNDGKNAEQVSFNTIVIESVVECPRNCHGNGECVSGTCHCFPGFLGPDCSRAACPVLCSGNGQYSKGRCLCFSGWKGTECDVPTTQCIDPQCGGRGICIMGSCACNSGYKGESCEEADCIDPGCSNHGVCIHGECHCSPGWGGSNCEILKTMCPDQCSGHGTYLQESGSCTCDPNWTGPDCSNEICSVDCGSHGVCMGGTCRCEEGWTGPACNQRACHPRCAEHGTCKDGKCECSQGWNGEHCTIEGCPGLCNSNGRCTLDQNGWHCVCQPGWRGAGCDVAMETLCTDSKDNEGDGLIDCMDPDCCLQSSCQNQPYCRGLPDPQDIISQSLQSPSQQAAKSFYDRISFLIGSDSTHVIPGESPFNKSLASVIRGQVLTADGTPLIGVNVSFFHYPEYGYTITRQDGMFDLVANGGASLTLVFERSPFLTQYHTVWIPWNVFYVMDTLVMKKEENDIPSCDLSGFVRPNPIIVSSPLSTFFRSSPEDSPIIPETQVLHEETTIPGTDLKLSYLSSRAAGYKSVLKITMTQSIIPFNLMKVHLMVAVVGRLFQKWFPASPNLAYTFIWDKTDAYNQKVYGLSEAVVSVGYEYESCLDLTLWEKRTAILQGYELDASNMGGWTLDKHHVLDVQNGILYKGNGENQFISQQPPVVSSIMGNGRRRSISCPSCNGQADGNKLLAPVALACGIDGSLYVGDFNYVRRIFPSGNVTSVLELSSNPAHRYYLATDPVTGDLYVSDTNTRRIYRPKSLTGAKDLTKNAEVVAGTGEQCLPFDEARCGDGGKAVEATLMSPKGMAVDKNGLIYFVDGTMIRKVDQNGIISTLLGSNDLTSARPLTCDTSMHISQVRLEWPTDLAINPMDNSIYVLDNNVVLQITENRQVRIAAGRPMHCQVPGVEYPVGKHAVQTTLESATAIAVSYSGVLYITETDEKKINRIRQVTTDGEISLVAGIPSECDCKNDANCDCYQSGDGYAKDAKLSAPSSLAASPDGTLYIADLGNIRIRAVSKNKPLLNSMNFYEVASPTDQELYIFDINGTHQYTVSLVTGDYLYNFSYSNDNDITAVTDSNGNTLRIRRDPNRMPVRVVSPDNQVIWLTIGTNGCLKSMTAQGLELVLFTYHGNSGLLATKSDETGWTTFFDYDSEGRLTNVTFPTGVVTNLHGDMDKAITVDIESSSREEDVSITSNLSSIDSFYTMVQDQLRNSYQIGYDGSLRIIYASGLDSHYQTEPHVLAGTANPTVAKRNMTLPGENGQNLVEWRFRKEQAQGKVNVFGRKLRVNGRNLLSVDFDRTTKTEKIYDDHRKFLLRIAYDTSGHPTLWLPSSKLMAVNVTYSSTGQIASIQRGTTSEKVDYDGQGRIVSRVFADGKTWSYTYLEKSMVLLLHSQRQYIFEYDMWDRLSAITMPSVARHTMQTIRSIGYYRNIYNPPESNASIITDYNEEGLLLQTAFLGTSRRVLFKYRRQTRLSEILYDSTRVSFTYDETAGVLKTVNLQSDGFICTIRYRQIGPLIDRQIFRFSEDGMVNARFDYSYDNSFRVTSMQGVINETPLPIDLYQFDDISGKVEQFGKFGVIYYDINQIISTAVMTYTKHFDAHGRIKEIQYEIFRSLMYWITIQYDNMGRVTKREIKIGPFANTTKYAYEYDVDGQLQTVYLNEKIMWRYNYDLNGNLHLLNPSNSARLTPLRYDLRDRITRLGDVQYRLDEDGFLRQRGTEIFEYSSKGLLTRVYSKGSGWTVIYRYDGLGRRVSSKTSLGQHLQFFYADLTYPTRITHVYNHSSSEITSLYYDLQGHLFAMEISSGDEFYIASDNTGTPLAVFSSNGLMLKQIQYTAYGEIYFDSNIDFQLVIGFHGGLYDPLTKLIHFGERDYDILAGRWTTPDIEIWKRIGKDPAPFNLYMFRNNNPASKIHDVKDYITDVNSWLVTFGFHLHNAIPGFPVPKFDLTEPSYELVKSQQWDDIPPIFGVQQQVARQAKAFLSLGKMAEVQVSRRRAGGAQSWLWFATVKSLIGKGVMLAVSQGRVQTNVLNIANEDCIKVAAVLNNAFYLENLHFTIEGKDTHYFIKTTTPESDLGTLRLTSGRKALENGINVTVSQSTTVVNGRTRRFADVEMQFGALALHVRYGMTLDEEKARILEQARQRALARAWAREQQRVRDGEEGARLWTEGEKRQLLSAGKVQGYDGYYVLSVEQYPELADSANNIQFLRQSEIGRR

SEQ ID NO: 87643 - protein, 170 aa, Homo sapiens
  Payload ID: 17536
  Gene Symbol: TENM3
  Gene Name: teneurin transmembrane protein 3
  ENSP ID: ENSP00000421320
MDVKERRPYCSLTKSRREKERRYTNSSADNEECRVPTQKSYSSSETLKAFDHDSSRLLYGNRVKDLVHREADEFTRQGQNFTLRQLGVCEPATRRGLAFCAEMGLPHRGYSISAGSDADTENEAVMSPEHAMRLWGRGVKSGRSSCLSSRSNSALTLTDTEHENKSDSEN

SEQ ID NO: 87644 - protein, 2699 aa, Homo sapiens
  Payload ID: 17536
  Gene Symbol: TENM3
  Gene Name: teneurin transmembrane protein 3
  Uniprot ID: Q9P273
  ENSP ID: ENSP00000424226
MDVKERRPYCSLTKSRREKERRYTNSSADNEECRVPTQKSYSSSETLKAFDHDSSRLLYGNRVKDLVHREADEFTRQGQNFTLRQLGVCEPATRRGLAFCAEMGLPHRGYSISAGSDADTENEAVMSPEHAMRLWGRGVKSGRSSCLSSRSNSALTLTDTEHENKSDSENEQPASNQGQSTLQPLPPSHKQHSAQHHPSITSLNRNSLTNRRNQSPAPPAALPAELQTTPESVQLQDSWVLGSNVPLESRHFLFKTGTGTTPLFSTATPGYTMASGSVYSPPTRPLPRNTLSRSAFKFKKSSKYCSWKCTALCAVGVSVLLAILLSYFIAMHLFGLNWQLQQTENDTFENGKVNSDTMPTNTVSLPSGDNGKLGGFTQENNTIDSGELDIGRRAIQEIPPGIFWRSQLFIDQPQFLKFNISLQKDALIGVYGRKGLPPSHTQYDFVELLDGSRLIAREQRSLLETERAGRQARSVSLHEAGFIQYLDSGIWHLAFYNDGKNAEQVSFNTIVIESVVECPRNCHGNGECVSGTCHCFPGFLGPDCSRAACPVLCSGNGQYSKGRCLCFSGWKGTECDVPTTQCIDPQCGGRGICIMGSCACNSGYKGESCEEADCIDPGCSNHGVCIHGECHCSPGWGGSNCEILKTMCPDQCSGHGTYLQESGSCTCDPNWTGPDCSNEICSVDCGSHGVCMGGTCRCEEGWTGPACNQRACHPRCAEHGTCKDGKCECSQGWNGEHCTIEGCPGLCNSNGRCTLDQNGWHCVCQPGWRGAGCDVAMETLCTDSKDNEGDGLIDCMDPDCCLQSSCQNQPYCRGLPDPQDIISQSLQSPSQQAAKSFYDRISFLIGSDSTHVIPGESPFNKSLASVIRGQVLTADGTPLIGVNVSFFHYPEYGYTITRQDGMFDLVANGGASLTLVFERSPFLTQYHTVWIPWNVFYVMDTLVMKKEENDIPSCDLSGFVRPNPIIVSSPLSTFFRSSPEDSPIIPETQVLHEETTIPGTDLKLSYLSSRAAGYKSVLKITMTQSIIPFNLMKVHLMVAVVGRLFQKWFPASPNLAYTFIWDKTDAYNQKVYGLSEAVVSVGYEYESCLDLTLWEKRTAILQGYELDASNMGGWTLDKHHVLDVQNGILYKGNGENQFISQQPPVVSSIMGNGRRRSISCPSCNGQADGNKLLAPVALACGIDGSLYVGDFNYVRRIFPSGNVTSVLELSSNPAHRYYLATDPVTGDLYVSDTNTRRIYRPKSLTGAKDLTKNAEVVAGTGEQCLPFDEARCGDGGKAVEATLMSPKGMAVDKNGLIYFVDGTMIRKVDQNGIISTLLGSNDLTSARPLTCDTSMHISQVRLEWPTDLAINPMDNSIYVLDNNVVLQITENRQVRIAAGRPMHCQVPGVEYPVGKHAVQTTLESATAIAVSYSGVLYITETDEKKINRIRQVTTDGEISLVAGIPSECDCKNDANCDCYQSGDGYAKDAKLSAPSSLAASPDGTLYIADLGNIRIRAVSKNKPLLNSMNFYEVASPTDQELYIFDINGTHQYTVSLVTGDYLYNFSYSNDNDITAVTDSNGNTLRIRRDPNRMPVRVVSPDNQVIWLTIGTNGCLKSMTAQGLELVLFTYHGNSGLLATKSDETGWTTFFDYDSEGRLTNVTFPTGVVTNLHGDMDKAITVDIESSSREEDVSITSNLSSIDSFYTMVQDQLRNSYQIGYDGSLRIIYASGLDSHYQTEPHVLAGTANPTVAKRNMTLPGENGQNLVEWRFRKEQAQGKVNVFGRKLRVNGRNLLSVDFDRTTKTEKIYDDHRKFLLRIAYDTSGHPTLWLPSSKLMAVNVTYSSTGQIASIQRGTTSEKVDYDGQGRIVSRVFADGKTWSYTYLEKSMVLLLHSQRQYIFEYDMWDRLSAITMPSVARHTMQTIRSIGYYRNIYNPPESNASIITDYNEEGLLLQTAFLGTSRRVLFKYRRQTRLSEILYDSTRVSFTYDETAGVLKTVNLQSDGFICTIRYRQIGPLIDRQIFRFSEDGMVNARFDYSYDNSFRVTSMQGVINETPLPIDLYQFDDISGKVEQFGKFGVIYYDINQIISTAVMTYTKHFDAHGRIKEIQYEIFRSLMYWITIQYDNMGRVTKREIKIGPFANTTKYAYEYDVDGQLQTVYLNEKIMWRYNYDLNGNLHLLNPSNSARLTPLRYDLRDRITRLGDVQYRLDEDGFLRQRGTEIFEYSSKGLLTRVYSKGSGWTVIYRYDGLGRRVSSKTSLGQHLQFFYADLTYPTRITHVYNHSSSEITSLYYDLQGHLFAMEISSGDEFYIASDNTGTPLAVFSSNGLMLKQIQYTAYGEIYFDSNIDFQLVIGFHGGLYDPLTKLIHFGERDYDILAGRWTTPDIEIWKRIGKDPAPFNLYMFRNNNPASKIHDVKDYITDVNSWLVTFGFHLHNAIPGFPVPKFDLTEPSYELVKSQQWDDIPPIFGVQQQVARQAKAFLSLGKMAEVQVSRRRAGGAQSWLWFATVKSLIGKGVMLAVSQGRVQTNVLNIANEDCIKVAAVLNNAFYLENLHFTIEGKDTHYFIKTTTPESDLGTLRLTSGRKALENGINVTVSQSTTVVNGRTRRFADVEMQFGALALHVRYGMTLDEEKARILEQARQRALARAWAREQQRVRDGEEGARLWTEGEKRQLLSAGKVQGYDGYYVLSVEQYPELADSANNIQFLRQSEIGRR

SEQ ID NO: 87645 - protein, 182 aa, Homo sapiens
  Payload ID: 17536
  Gene Symbol: TENM3
  Gene Name: teneurin transmembrane protein 3
  ENSP ID: ENSP00000426914
VTRYAPDPGNLAALGSVPHGHSEGAPRQEQPASNQGQSTLQPLPPSHKQHSAQHHPSITSLNRNSLTNRRNQSPAPPAALPAELQTTPESVQLQDSWVLGSNVPLESRHFLFKTGTGTTPLFSTATPGYTMASGSVYSPPTRPLPRNTLSRSAFKFKKSSKYCSWKCTALCAVGVSVLLAIL

SEQ ID NO: 87646 - protein, 2769 aa, Homo sapiens
  Payload ID: 17537
  Gene Symbol: TENM4
  Gene Name: teneurin transmembrane protein 4
  Uniprot ID: Q6N022
  ENSP ID: ENSP00000278550
MDVKERKPYRSLTRRRDAERRYTSSSADSEEGKAPQKSYSSSETLKAYDQDARLAYGSRVKDIVPQEAEEFCRTGANFTLRELGLEEVTPPHGTLYRTDIGLPHCGYSMGAGSDADMEADTVLSPEHPVRLWGRSTRSGRSSCLSSRANSNLTLTDTEHENTETDHPGGLQNHARLRTPPPPLSHAHTPNQHHAASINSLNRGNFTPRSNPSPAPTDHSLSGEPPAGGAQEPAHAQENWLLNSNIPLETRNLGKQPFLGTLQDNLIEMDILGASRHDGAYSDGHFLFKPGGTSPLFCTTSPGYPLTSSTVYSPPPRPLPRSTFARPAFNLKKPSKYCNWKCAALSAIVISATLVILLAYFVAMHLFGLNWHLQPMEGQMYEITEDTASSWPVPTDVSLYPSGGTGLETPDRKGKGTTEGKPSSFFPEDSFIDSGEIDVGRRASQKIPPGTFWRSQVFIDHPVHLKFNVSLGKAALVGIYGRKGLPPSHTQFDFVELLDGRRLLTQEARSLEGTPRQSRGTVPPSSHETGFIQYLDSGIWHLAFYNDGKESEVVSFLTTAIESVDNCPSNCYGNGDCISGTCHCFLGFLGPDCGRASCPVLCSGNGQYMKGRCLCHSGWKGAECDVPTNQCIDVACSNHGTCITGTCICNPGYKGESCEEVDCMDPTCSGRGVCVRGECHCSVGWGGTNCETPRATCLDQCSGHGTFLPDTGLCSCDPSWTGHDCSIEICAADCGGHGVCVGGTCRCEDGWMGAACDQRACHPRCAEHGTCRDGKCECSPGWNGEHCTIAHYLDRVVKEGCPGLCNGNGRCTLDLNGWHCVCQLGWRGAGCDTSMETACGDSKDNDGDGLVDCMDPDCCLQPLCHINPLCLGSPNPLDIIQETQVPVSQQNLHSFYDRIKFLVGRDSTHIIPGENPFDGGHACVIRGQVMTSDGTPLVGVNISFVNNPLFGYTISRQDGSFDLVTNGGISIILRFERAPFITQEHTLWLPWDRFFVMETIIMRHEENEIPSCDLSNFARPNPVVSPSPLTSFASSCAEKGPIVPEIQALQEEISISGCKMRLSYLSSRTPGYKSVLRISLTHPTIPFNLMKVHLMVAVEGRLFRKWFAAAPDLSYYFIWDKTDVYNQKVFGLSEAFVSVGYEYESCPDLILWEKRTTVLQGYEIDASKLGGWSLDKHHALNIQSGILHKGNGENQFVSQQPPVIGSIMGNGRRRSISCPSCNGLADGNKLLAPVALTCGSDGSLYVGDFNYIRRIFPSGNVTNILELRNKDFRHSHSPAHKYYLATDPMSGAVFLSDSNSRRVFKIKSTVVVKDLVKNSEVVAGTGDQCLPFDDTRCGDGGKATEATLTNPRGITVDKFGLIYFVDGTMIRRIDQNGIISTLLGSNDLTSARPLSCDSVMDISQVHLEWPTDLAINPMDNSLYVLDNNVVLQISENHQVRIVAGRPMHCQVPGIDHFLLSKVAIHATLESATALAVSHNGVLYIAETDEKKINRIRQVTTSGEISLVAGAPSGCDCKNDANCDCFSGDDGYAKDAKLNTPSSLAVCADGELYVADLGNIRIRFIRKNKPFLNTQNMYELSSPIDQELYLFDTTGKHLYTQSLPTGDYLYNFTYTGDGDITLITDNNGNMVNVRRDSTGMPLWLVVPDGQVYWVTMGTNSALKSVTTQGHELAMMTYHGNSGLLATKSNENGWTTFYEYDSFGRLTNVTFPTGQVSSFRSDTDSSVHVQVETSSKDDVTITTNLSASGAFYTLLQDQVRNSYYIGADGSLRLLLANGMEVALQTEPHLLAGTVNPTVGKRNVTLPIDNGLNLVEWRQRKEQARGQVTVFGRRLRVHNRNLLSLDFDRVTRTEKIYDDHRKFTLRILYDQAGRPSLWSPSSRLNGVNVTYSPGGYIAGIQRGIMSERMEYDQAGRITSRIFADGKTWSYTYLEKSMVLLLHSQRQYIFEFDKNDRLSSVTMPNVARQTLETIRSVGYYRNIYQPPEGNASVIQDFTEDGHLLHTFYLGTGRRVIYKYGKLSKLAETLYDTTKVSFTYDETAGMLKTINLQNEGFTCTIRYRQIGPLIDRQIFRFTEEGMVNARFDYNYDNSFRVTSMQAVINETPLPIDLYRYDDVSGKTEQFGKFGVIYYDINQIITTAVMTHTKHFDAYGRMKEVQYEIFRSLMYWMTVQYDNMGRVVKKELKVGPYANTTRYSYEYDADGQLQTVSINDKPLWRYSYDLNGNLHLLSPGNSARLTPLRYDIRDRITRLGDVQYKMDEDGFLRQRGGDIFEYNSAGLLIKAYNRAGSWSVRYRYDGLGRRVSSKSSHSHHLQFFYADLTNPTKVTHLYNHSSSEITSLYYDLQGHLFAMELSSGDEFYIACDNIGTPLAVFSGTGLMIKQILYTAYGEIYMDTNPNFQIIIGYHGGLYDPLTKLVHMGRRDYDVLAGRWTSPDHELWKHLSSSNVMPFNLYMFKNNNPISNSQDIKCFMTDVNSWLLTFGFQLHNVIPGYPKPDMDAMEPSYELIHTQMKTQEWDNSKSILGVQCEVQKQLKAFVTLERFDQLYGSTITSCQQAPKTKKFASSGSVFGKGVKFALKDGRVTTDIISVANEDGRRVAAILNHAHYLENLHFTIDGVDTHYFVKPGPSEGDLAILGLSGGRRTLENGVNVTVSQINTVLNGRTRRYTDIQLQYGALCLNTRYGTTLDEEKARVLELARQRAVRQAWAREQQRLREGEEGLRAWTEGEKQQVLSTGRVQGYDGFFVISVEQYPELSDSANNIHFMRQSEMGRR

SEQ ID NO: 87647 - protein, 951 aa, Homo sapiens
  Payload ID: 17537
  Gene Symbol: TENM4
  Gene Name: teneurin transmembrane protein 4
  ENSP ID: ENSP00000431711
NTPSSLAVCADGELYVADLGNIRIRFIRKNKPFLNTQNMYELSSPIDQELYLFDTTGKHLYTQSLPTGDYLYNFTYTGDGDITLITDNNGNMVNVRRDSTGMPLWLVVPDGQVYWVTMGTNSALKSVTTQGHELAMMTYHGNSGLLATKSNENGWTTFYEYDSFGRLTNVTFPTGQVSSFRSDTDSSVHVQVETSSKDDVTITTNLSASGAFYTLLQDQVRNSYYIGADGSLRLLLANGMEVALQTEPHLLAGTVNPTVGKRNVTLPIDNGLNLVEWRQRKEQARGQVTVFGRRLRVHNRNLLSLDFDRVTRTEKIYDDHRKFTLRILYDQAGRPSLWSPSSRLNGVNVTYSPGGYIAGIQRGIMSERMEYDQAGRITSRIFADGKTWSYTYLEKSMVLLLHSQRQYIFEFDKNDRLSSVTMPNVARQTLETIRSVGYYRNIYQPPEGNASVIQDFTEDGHLLHTFYLGTGRRVIYKYGKLSKLAETLYDTTKVSFTYDETAGMLKTINLQNEGFTCTIRYRQIGPLIDRQIFRFTEEGMVNARFDYNYDNSFRVTSMQAVINETPLPIDLYRYDDVSGKTEQFGKFGVIYYDINQIITTAVMTHTKHFDAYGRMKEVQYEIFRSLMYWMTVQYDNMGRVVKKELKVGPYANTTRYSYEYDADGQLQTVSINDKPLWRYSYDLNGNLHLLSPGNSARLTPLRYDIRDRITRLGDVQYKMDEDGFLRQRGGDIFEYNSAGLLIKAYNRAGSWSVRYRYDGLGRRVSSKSSHSHHLQFFYADLTNPTKVTHLYNHSSSEITSLYYDLQGHLFAMELSSGDEFYIACDNIGTPLAVFSGTGLMIKQILYTAYGEIYMDTNPNFQIIIGYHGGLYDPLTKLVHMGRRDYDVLAGRWTSPDHELWKHLSSSNVMPFNLYMFKNNNPISNSQDIKCFMTERTKDFLPKTATLLWPHT

SEQ ID NO: 87648 - protein, 151 aa, Homo sapiens
  Payload ID: 17537
  Gene Symbol: TENM4
  Gene Name: teneurin transmembrane protein 4
  ENSP ID: ENSP00000432427
  MOD_RES (1)..(1): Any amino acid
XNCETPRATCLDQCSGHGTFLPDTGLCSCDPSWTGHDCSIEICAADCGGHGVCVGGTCRCEDGWMGAACDQRACHPRCAEHGTCRDGKCECSPGWNGEHCTIEGCPGLCNGNGRCTLDLNGWHCVCQLGWRGAGCDTSMETACGDSKDNDG

SEQ ID NO: 87649 - protein, 157 aa, Homo sapiens
  Payload ID: 17537
  Gene Symbol: TENM4
  Gene Name: teneurin transmembrane protein 4
  ENSP ID: ENSP00000432705
MKQCEVAEMDHPGGLQNHARLRTPPPPLSHAHTPNQHHAASINSLNRGNFTPRSNPSPAPTDHSLSGEPPAGGAQEPAHAQENWLLNSNIPLETRNLGKQPFLGTLQDNLIEMDILGASRHDGAYSDGHFLFKPGGTSPLFCTTSPGYPLTSSTVYS

SEQ ID NO: 87650 - protein, 1 aa, Homo sapiens
  Payload ID: 17537
  Gene Symbol: TENM4
  Gene Name: teneurin transmembrane protein 4
  ENSP ID: ENSP00000433535
M

SEQ ID NO: 87651 - protein, 2769 aa, Homo sapiens; identical to SEQ ID NO: 87646
  Payload ID: 17537
  Gene Symbol: TENM4
  Gene Name: teneurin transmembrane protein 4
  Uniprot ID: Q6N022
  ENSP ID: ENSP00000483150

SEQ ID NO: 87652 - protein, 317 aa, Homo sapiens
  Payload ID: 17538
  Gene Symbol: TNMD
  Gene Name: tenomodulin
  Uniprot ID: Q9H2S6
  ENSP ID: ENSP00000362122
MAKNPPENCEDCHILNAEAFKSKKICKSLKICGLVFGILALTLIVLFWGSKHFWPEVPKKAYDMEHTFYSNGEKKKIYMEIDPVTRTEIFRSGNGTDETLEVHDFKNGYTGIYFVGLQKCFIKTQIKVIPEFSEPEEEIDENEEITTTFFEQSVIWVPAEKPIENRDFLKNSKILEICDNVTMYWINPTLISVSELQDFEEEGEDLHFPANEKKGIEQNEQWVVPQVKVEKTRHARQASEEELPINDYTENGIEFDPMLDERGYCCIYCRRGNRYCRRVCEPLLGYYPYPYCYQGGRVICRVIMPCNWWVARMLGRV

SEQ ID NO: 87653 - protein, 1735 aa, Homo sapiens
  Payload ID: 17539
  Gene Symbol: TNS1
  Gene Name: tensin 1
  Uniprot ID: Q9HBL0
  ENSP ID: ENSP00000171887
MSVSRTMEDSCELDLVYVTERIIAVSFPSTANEENFRSNLREVAQMLKSKHGGNYLLFNLSERRPDITKLHAKVLEFGWPDLHTPALEKICSICKAMDTWLNADPHNVVVLHNKGNRGRIGVVIAAYMHYSNISASADQALDRFAMKRFYEDKIVPIGQPSQRRYVHYFSGLLSGSIKMNNKPLFLHHVIMHGIPNFESKGGCRPFLRIYQAMQPVYTSGIYNIPGDSQTSVCITIEPGLLLKGDILLKCYHKKFRSPARDVIFRVQFHTCAIHDLGVVFGKEDLDDAFKDDRFPEYGKVEFVFSYGPEKIQGMEHLENGPSVSVDYNTSDPLIRWDSYDNFSGHRDDGMEEVVGHTQGPLDGSLYAKVKKKDSLHGSTGAVNATRPTLSATPNHVEHTLSVSSDSGNSTASTKTDKTDEPVPGASSATAALSPQEKRELDRLLSGFGLEREKQGAMYHTQHLRSRPAGGSAVPSSGRHVVPAQVHVNGGALASERETDILDDELPNQDGHSAGSMGTLSSLDGVTNTSEGGYPEALSPLTNGLDKSYPMEPMVNGGGYPYESASRAGPAHAGHTAPMRPSYSAQEGLAGYQREGPHPAWPQPVTTSHYAHDPSGMFRSQSFSEAEPQLPPAPVRGGSSREAVQRGLNSWQQQQQQQQQPRPPPRQQERAHLESLVASRPSPQPLAETPIPSLPEFPRAASQQEIEQSIETLNMLMLDLEPASAAAPLHKSQSVPGAWPGASPLSSQPLSGSSRQSHPLTQSRSGYIPSGHSLGTPEPAPRASLESVPPGRSYSPYDYQPCLAGPNQDFHSKSPASSSLPAFLPTTHSPPGPQQPPASLPGLTAQPLLSPKEATSDPSRTPEEEPLNLEGLVAHRVAGVQAREKQPAEPPAPLRRRAASDGQYENQSPEATSPRSPGVRSPVQCVSPELALTIALNPGGRPKEPHLHSYKEAFEEMEGTSPSSPPPSGVRSPPGLAKTPLSALGLKPHNPADILLHPTGVTRRRIQPEEDEGKVVVRLSEEPRSYVESVARTAVAGPRAQDSEPKSFSAPATQAYGHEIPLRNGTLGGSFVSPSPLSTSSPILSADSTSVGSFPSGESSDQGPRTPTQPLLESGFRSGSLGQPSPSAQRNYQSSSPLPTVGSSYSSPDYSLQHFSSSPESQARAQFSVAGVHTVPGSPQARHRTVGTNTPPSPGFGWRAINPSMAAPSSPSLSHHQMMGPPGTGFHGSTVSSPQSSAATTPGSPSLCRHPAGVYQVSGLHNKVATTPGSPSLGRHPGAHQGNLASGLHSNAIASPGSPSLGRHLGGSGSVVPGSPCLDRHVAYGGYSTPEDRRPTLSRQSSASGYQAPSTPSFPVSPAYYPGLSSPATSPSPDSAAFRQGSPTPALPEKRRMSVGDRAGSLPNYATINGKVSSPVASGMSSPSGGSTVSFSHTLPDFSKYSMPDNSPETRAKVKFVQDTSKYWYKPEISREQAIALLKDQEPGAFIIRDSHSFRGAYGLAMKVSSPPPTIMQQNKKGDMTHELVRHFLIETGPRGVKLKGCPNEPNFGSLSALVYQHSIIPLALPCKLVIPNRDPTDESKDSSGPANSTADLLKQGAACNVLFVNSVDMESLTGPQAISKATSETLAADPTPAATIVHFKVSAQGITLTDNQRKLFFRRHYPLNTVTFCDLDPQERKWMKTEGGAPAKLFGFVARKQGSTTDNACHLFAELDPNQPASAIVNFVSKVMLNAGQKR

SEQ ID NO: 87654 - protein, 416 aa, Homo sapiens
  Payload ID: 17539
  Gene Symbol: TNS1
  Gene Name: tensin 1
  Uniprot ID: Q9HBL0
  ENSP ID: ENSP00000308321
MVPFQQRKDCVLEGSTRVTPSVQPHLQPIRNMSVSRTMEDSCELDLVYVTERIIAVSFPSTANEENFRSNLREVAQMLKSKHGGNYLLFNLSERRPDITKLHAKVLEFGWPDLHTPALEKICSICKAMDTWLNADPHNVVVLHNKGNRGRIGVVIAAYMHYSNISASADQALDRFAMKRFYEDKIVPIGQPSQRRYVHYFSGLLSGSIKMNNKPLFLHHVIMHGIPNFESKGGCRPFLRIYQAMQPVYTSGIYNIPGDSQTSVCITIEPGLLLKGDILLKCYHKKFRSPARDVIFRVQFHTCAIHDLGVVFGKEDLDDAFKDDRFPEYGKVEFVFSYGPEKIQGMEHLENGPSVSVDYNTSDPLIRWDSYDNFSGHRDDGMEDGNKQNTNSQSIGSISGGLEDQYTWPDTHWPSQS

SEQ ID NO: 87655 - protein, 24 aa, Homo sapiens
  Payload ID: 17539
  Gene Symbol: TNS1
  Gene Name: tensin 1
  ENSP ID: ENSP00000393925
MSVSRTMEDSCELDLVYVTERIIA

SEQ ID NO: 87656 - protein, 846 aa, Homo sapiens
  Payload ID: 17539
  Gene Symbol: TNS1
  Gene Name: tensin 1
  ENSP ID: ENSP00000394171
MEQLVKERKGVQAREKQPAEPPAPLRRRAASDGQYENQSPEATSPRSPGVRSPVQCVSPELALTIALNPGGRPKEPHLHSYKEAFEEMEGTSPSSPPPSGVRSPPGLAKTPLSALGLKPHNPADILLHPTGEPRSYVESVARTAVAGPRAQDSEPKSFSAPATQAYGHEIPLRNGTLGGSFVSPSPLSTSSPILSADSTSVGSFPSGESSDQGPRTPTQPLLESGFRSGSLGQPSPSAQRNYQSSSPLPTVGSSYSSPDYSLQHFSSSPESQARAQFSVAGVHTVPGSPQARHRTVGTNTPPSPGFGWRAINPSMAAPSSPSLSHHQMMGPPGTGFHGSTVSSPQSSAATTPGSPSLCRHPAGVYQVSGLHNKVATTPGSPSLGRHPGAHQGNLASGLHSNAIASPGSPSLGRHLGGSGSVVPGSPCLDRHVAYGGYSTPEDRRPTLSRQSSASGYQAPSTPSFPVSPAYYPGLSSPATSPSPDSAAFRQGSPTPALPEKRRMSVGDRAGSLPNYATINGKVSSPVASGMSSPSGGSTVSFSHTLPDFSKYSMPDNSPETRAKVKFVQDTSKYWYKPEISREQAIALLKDQEPGAFIIRDSHSFRGAYGLAMKVSSPPPTIMQQNKKGDMTHELVRHFLIETGPRGVKLKGCPNEPNFGSLSALVYQHSIIPLALPCKLVIPNRDPTDESKDSSGPANSTADLLKQGAACNVLFVNSVDMESLTGPQAISKATSETLAADPTPAATIVHFKVSAQGITLTDNQRKLFFRRHYPLNTVTFCDLDPQERKWMKTEGGAPAKLFGFVARKQGSTTDNACHLFAELDPNQPASAIVNFVSKVMLNAGQKR

SEQ ID NO: 87657 - protein, 102 aa, Homo sapiens
  Payload ID: 17539
  Gene Symbol: TNS1
  Gene Name: tensin 1
  ENSP ID: ENSP00000395615
MSVSRTMEDSCELDLVYVTERIIAVSFPSTANEENFRSNLREVAQMLKSKHGGNYLLFNLSERRPDITKLHAKVLEFGWPDLHTPALEKICSICKAMDTWLN

SEQ ID NO: 87658 - protein, 487 aa, Homo sapiens
  Payload ID: 17539
  Gene Symbol: TNS1
  Gene Name: tensin 1
  ENSP ID: ENSP00000400383
MVSPLPPPHCPGAALHVQPYKAAASHGPHGASPGGAGSMPLKLVGKVLLKGSTRVTPSVQPHLQPIRNMSVSRTMEDSCELDLVYVTERIIAVSFPSTANEENFRSNLREVAQMLKSKHGGNYLLFNLSERRPDITKLHAKVLEFGWPDLHTPALEKICSICKAMDTWLNADPHNVVVLHNKGNRGRIGVVIAAYMHYSNISASADQALDRFAMKRFYEDKIVPIGQPSQRRYVHYFSGLLSGSIKMNNKPLFLHHVIMHGIPNFESKGGCRPFLRIYQAMQPVYTSGIYNIPGDSQTSVCITIEPGLLLKGDILLKCYHKKFRSPARDVIFRVQFHTCAIHDLGVVFGKEDLDDAFKDDRFPEYGKVEFVFSYGPEKIQGMEHLENGPSVSVDYNTSDPLIRWDSYDNFSGHRDDGMEEVVGHTQGPLDGSLYAKVKKKDSLHGSTGAVNATRPTLSATPNHVEHTLSVSSDSGNSTASTKTDKTD

SEQ ID NO: 87659 - protein, 61 aa, Homo sapiens
  Payload ID: 17539
  Gene Symbol: TNS1
  Gene Name: tensin 1
  ENSP ID: ENSP00000404477
MSVSRTMEDSCELDLVYVTERIIAVSFPSTANEENFRSNLREVAQMLKSKHGGNYLLFNLS

SEQ ID NO: 87660 - protein, 780 aa, Homo sapiens
  Payload ID: 17539
  Gene Symbol: TNS1
  Gene Name: tensin 1
  ENSP ID: ENSP00000405460
MTWICLSCMLWPEDLEAPKTHRFKVKTFKKVKPCGICRQVITQEGCTCKVCSFSCHRKCQAKVAAPCVPPSNHELVPITTENAPKNVVDKGEGASRGGNTRKSLEDNGSTRVTPSVQPHLQPIRNMSVSRTMEDSCELDLVYVTERIIAVSFPSTANEENFRSNLREVAQMLKSKHGGNYLLFNLSERRPDITKLHAKVLEFGWPDLHTPALEKICSICKAMDTWLNADPHNVVVLHNKGNRGRIGVVIAAYMHYSNISASADQALDRFAMKRFYEDKIVPIGQPSQRRYVHYFSGLLSGSIKMNNKPLFLHHVIMHGIPNFESKGGCRPFLRIYQAMQPVYTSGIYNIPGDSQTSVCITIEPGLLLKGDILLKCYHKKFRSPARDVIFRVQFHTCAIHDLGVVFGKEDLDDAFKDDRFPEYGKVEFVFSYGPEKIQGMEHLENGPSVSVDYNTSDPLIRWDSYDNFSGHRDDGMEEVVGHTQGPLDGSLYAKVKKKDSLHGSTGAVNATRPTLSATPNHVEHTLSVSSDSGNSTASTKTDKTDEPVPGASSATAALSPQEKRELDRLLSGFGLEREKQGAMYHTQHLRSRPAGGSAVPSSGRHVVPAQVHVNGGALASERETDILDDELPNQDGHSAGSMGTLSSLDGVTNTSEGGYPEALSPLTNGLDKSYPMEPMVNGGGYPYESASRAGPAHAGHTAPMRPSYSAQEGLAGYQREGPHPAWPQPVTTSHYAHDPSGMFRSQSFSEAEPQLPPAPVRGGSSREAVQRGLNSWQQQQQ

SEQ ID NO: 87661 - protein, 1714 aa, Homo sapiens
  Payload ID: 17539
  Gene Symbol: TNS1
  Gene Name: tensin 1
  ENSP ID: ENSP00000406016
MSVSRTMEDSCELDLVYVTERIIAVSFPSTANEENFRSNLREVAQMLKSKHGGNYLLFNLSERRPDITKLHAKVLEFGWPDLHTPALEKICSICKAMDTWLNADPHNVVVLHNKGNRGRIGVVIAAYMHYSNISASADQALDRFAMKRFYEDKIVPIGQPSQRRYVHYFSGLLSGSIKMNNKPLFLHHVIMHGIPNFESKGGCRPFLRIYQAMQPVYTSGIYNIPGDSQTSVCITIEPGLLLKGDILLKCYHKKFRSPARDVIFRVQFHTCAIHDLGVVFGKEDLDDAFKDDRFPEYGKVEFVFSYGPEKIQGMEHLENGPSVSVDYNTSDPLIRWDSYDNFSGHRDDGMEEVVGHTQGPLDGSLYAKVKKKDSLHGSTGAVNATRPTLSATPNHVEHTLSVSSDSGNSTASTKTDKTDEPVPGASSATAALSPQEKRELDRLLSGFGLEREKQGAMYHTQHLRSRPAGGSAVPSSGRHVVPAQVHVNGGALASERETDILDDELPNQDGHSAGSMGTLSSLDGVTNTSEGGYPEALSPLTNGLDKSYPMEPMVNGGGYPYESASRAGPAHAGHTAPMRPSYSAQEGLAGYQREGPHPAWPQPVTTSHYAHDPSGMFRSQSFSEAEPQLPPAPVRGGSSREAVQRGLNSWQQQQQQQQQPRPPPRQQERAHLESLVASRPSPQPLAETPIPSLPEFPRAASQQEIEQSIETLNMLMLDLEPASAAAPLHKSQSVPGAWPGASPLSSQPLSGSSRQSHPLTQSRSGYIPSGHSLGTPEPAPRASLESVPPGRSYSPYDYQPCLAGPNQDFHSKSPASSSLPAFLPTTHSPPGPQQPPASLPGLTAQPLLSPKEATSDPSRTPEEEPLNLEGLVAHRVAGVQAREKQPAEPPAPLRRRAASDGQYENQSPEATSPRSPGVRSPVQCVSPELALTIALNPGGRPKEPHLHSYKEAFEEMEGTSPSSPPPSGVRSPPGLAKTPLSALGLKPHNPADILLHPTGEPRSYVESVARTAVAGPRAQDSEPKSFSAPATQAYGHEIPLRNGTLGGSFVSPSPLSTSSPILSADSTSVGSFPSGESSDQGPRTPTQPLLESGFRSGSLGQPSPSAQRNYQSSSPLPTVGSSYSSPDYSLQHFSSSPESQARAQFSVAGVHTVPGSPQARHRTVGTNTPPSPGFGWRAINPSMAAPSSPSLSHHQMMGPPGTGFHGSTVSSPQSSAATTPGSPSLCRHPAGVYQVSGLHNKVATTPGSPSLGRHPGAHQGNLASGLHSNAIASPGSPSLGRHLGGSGSVVPGSPCLDRHVAYGGYSTPEDRRPTLSRQSSASGYQAPSTPSFPVSPAYYPGLSSPATSPSPDSAAFRQGSPTPALPEKRRMSVGDRAGSLPNYATINGKVSSPVASGMSSPSGGSTVSFSHTLPDFSKYSMPDNSPETRAKVKFVQDTSKYWYKPEISREQAIALLKDQEPGAFIIRDSHSFRGAYGLAMKVSSPPPTIMQQNKKGDMTHELVRHFLIETGPRGVKLKGCPNEPNFGSLSALVYQHSIIPLALPCKLVIPNRDPTDESKDSSGPANSTADLLKQGAACNVLFVNSVDMESLTGPQAISKATSETLAADPTPAATIVHFKVSAQGITLTDNQRKLFFRRHYPLNTVTFCDLDPQERKWMKTEGGAPAKLFGFVARKQGSTTDNACHLFAELDPNQPASAIVNFVSKVMLNAGQKR

SEQ ID NO: 87662 - protein, 1721 aa, Homo sapiens
  Payload ID: 17539
  Gene Symbol: TNS1
  Gene Name: tensin 1
  ENSP ID: ENSP00000408724
MSVSRTMEDSCELDLVYVTERIIAVSFPSTANEENFRSNLREVAQMLKSKHGGNYLLFNLSERRPDITKLHAKVLEFGWPDLHTPALEKICSICKAMDTWLNADPHNVVVLHNKGNRGRIGVVIAAYMHYSNISASADQALDRFAMKRFYEDKIVPIGQPSQRRYVHYFSGLLSGSIKMNNKPLFLHHVIMHGIPNFESKGGCRPFLRIYQAMQPVYTSGIYNIPGDSQTSVCITIEPGLLLKGDILLKCYHKKFRSPARDVIFRVQFHTCAIHDLGVVFGKEDLDDAFKDDRFPEYGKVEFVFSYGPEKIQGMEHLENGPSVSVDYNTSDPLIRWDSYDNFSGHRDDGMEEVVGHTQGPLDGSLYAKVKKKDSLHGSTGAVNATRPTLSATPNHVEHTLSVSSDSGNSTASTKTDKTDEPVPGASSATAALSPQEKRELDRLLSGFGLEREKQGAMYHTQHLRSRPAGGSAVPSSGRHVVPAQVHVNGGALASERETDILDDELPNQDGHSAGSMGTLSSLDGVTNTSEGGYPEALSPLTNGLDKSYPMEPMVNGGGYPYESASRAGPAHAGHTAPMRPSYSAQEGLAGYQREGPHPAWPQPVTTSHYAHDPSGMFRSQSFSEAEPQLPPAPVRGGSSREAVQRGLNSWQQQQQQQQQPRPPPRQQERAHLESLVASRPSPQPLAETPIPSLPEFPRAASQQEIEQSIETLNMLMLDLEPASAAAPLHKSQSVPGAWPGASPLSSQPLSGSSRQSHPLTQSRSGYIPSGHSLGTPEPAPRASLESVPPGRSYSPYDYQPCLAGPNQDFHSKSPASSSLPAFLPTTHSPPGPQQPPASLPGLTAQPLLSPKEATSDPSRTPEEEPLNLEGLVAHRVAGVQAREKQPAEPPAPLRRRAASDGQYENQSPEATSPRSPGVRSPVQCVSPELALTIALNPGGRPKEPHLHSYKEAFEEMEGTSPSSPPPSGVRSPPGLAKTPLSALGLKPHNPADILLHPTGVTRRRIQPEPRSYVESVARTAVAGPRAQDSEPKSFSAPATQAYGHEIPLRNGTLGGSFVSPSPLSTSSPILSADSTSVGSFPSGESSDQGPRTPTQPLLESGFRSGSLGQPSPSAQRNYQSSSPLPTVGSSYSSPDYSLQHFSSSPESQARAQFSVAGVHTVPGSPQARHRTVGTNTPPSPGFGWRAINPSMAAPSSPSLSHHQMMGPPGTGFHGSTVSSPQSSAATTPGSPSLCRHPAGVYQVSGLHNKVATTPGSPSLGRHPGAHQGNLASGLHSNAIASPGSPSLGRHLGGSGSVVPGSPCLDRHVAYGGYSTPEDRRPTLSRQSSASGYQAPSTPSFPVSPAYYPGLSSPATSPSPDSAAFRQGSPTPALPEKRRMSVGDRAGSLPNYATINGKVSSPVASGMSSPSGGSTVSFSHTLPDFSKYSMPDNSPETRAKVKFVQDTSKYWYKPEISREQAIALLKDQEPGAFIIRDSHSFRGAYGLAMKVSSPPPTIMQQNKKDMTHELVRHFLIETGPRGVKLKGCPNEPNFGSLSALVYQHSIIPLALPCKLVIPNRDPTDESKDSSGPANSTADLLKQGAACNVLFVNSVDMESLTGPQAISKATSETLAADPTPAATIVHFKVSAQGITLTDNQRKLFFRRHYPLNTVTFCDLDPQERKWMKTEGGAPAKLFGFVARKQGSTTDNACHLFAELDPNQPASAIVNFVSKVMLNAGQKR

SEQ ID NO: 87663 - protein, 122 aa, Homo sapiens
  Payload ID: 17539
  Gene Symbol: TNS1
  Gene Name: tensin 1
  ENSP ID: ENSP00000411349
MQVAAPCVPPSNHELVPITTENAPKNVVDKGEGASRGGNTRKSLEDNGSTRVTPSVQPHLQPIRNMSVSRTMEDSCELDLVYVTERIIAVSFPSTANEENFRSNLREVAQMLKSKHGGNYLV

SEQ ID NO: 87664 - protein, 149 aa, Homo sapiens
  Payload ID: 17539
  Gene Symbol: TNS1
  Gene Name: tensin 1
  ENSP ID: ENSP00000414704
  MOD_RES (1)..(1): Any amino acid
XGDSQTSVCITIEPGLLLKGDILLKCYHKKFRSPARDVIFRVQFHTCAIHDLGVVFGKEDLDDAFKDDRFPEYGKVEFVFSYGPEKIQGMEHLENGPSVSVDYNTSDPLIRWDSYDNFSGHRDDGMEGAQHPQIGQDTPPGPSDPPGCL

SEQ ID NO: 87665 - protein, 1365 aa, Homo sapiens
  Payload ID: 17539
  Gene Symbol: TNS1
  Gene Name: tensin 1
  ENSP ID: ENSP00000480559
MEEVVGHTQGPLDGSLYAKVKKKDSLHGSTGAVNATRPTLSATPNHVEHTLSVSSDSGNSTASTKTDKTDEPVPGASSATAALSPQEKRELDRLLSGFGLEREKQGAMYHTQHLRSRPAGGSAVPSSGRHVVPAQVHVNGGALASERETDILDDELPNQDGHSAGSMGTLSSLDGVTNTSEGGYPEALSPLTNGLDKSYPMEPMVNGGGYPYESASRAGPAHAGHTAPMRPSYSAQEGLAGYQREGPHPAWPQPVTTSHYAHDPSGMFRSQSFSEAEPQLPPAPVRGGSSREAVQRGLNSWQQQQQQQQQPRPPPRQQERAHLESLVASRPSPQPLAETPIPSLPEFPRAASQQEIEQSIETLNMLMLDLEPASAAAPLHKSQSVPGAWPGASPLSSQPLSGSSRQSHPLTQSRSGYIPSGHSLGTPEPAPRASLESVPPGRSYSPYDYQPCLAGPNQDFHSKSPASSSLPAFLPTTHSPPGPQQPPASLPGLTAQPLLSPKEATSDPSRTPEEEPLNLEGLVAHRVAGVQAREKQPAEPPAPLRRRAASDGQYENQSPEATSPRSPGVRSPVQCVSPELALTIALNPGGRPKEPHLHSYKEAFEEMEGTSPSSPPPSGVRSPPGLAKTPLSALGLKPHNPADILLHPTGEPRSYVESVARTAVAGPRAQDSEPKSFSAPATQAYGHEIPLRNGTLGGSFVSPSPLSTSSPILSADSTSVGSFPSGESSDQGPRTPTQPLLESGFRSGSLGQPSPSAQRNYQSSSPLPTVGSSYSSPDYSLQHFSSSPESQARAQFSVAGVHTVPGSPQARHRTVGTNTPPSPGFGWRAINPSMAAPSSPSLSHHQMMGPPGTGFHGSTVSSPQSSAATTPGSPSLCRHPAGVYQVSGLHNKVATTPGSPSLGRHPGAHQGNLASGLHSNAIASPGSPSLGRHLGGSGSVVPGSPCLDRHVAYGGYSTPEDRRPTLSRQSSASGYQAPSTPSFPVSPAYYPGLSSPATSPSPDSAAFRQGSPTPALPEKRRMSVGDRAGSLPNYATINGKVSSPVASGMSSPSGGSTVSFSHTLPDFSKYSMPDNSPETRAKVKFVQDTSKYWYKPEISREQAIALLKDQEPGAFIIRDSHSFRGAYGLAMKVSSPPPTIMQQNKKGDMTHELVRHFLIETGPRGVKLKGCPNEPNFGSLSALVYQHSIIPLALPCKLVIPNRDPTDESKDSSGPANSTADLLKQGAACNVLFVNSVDMESLTGPQAISKATSETLAADPTPAATIVHFKVSAQGITLTDNQRKLFFRRHYPLNTVTFCDLDPQERKWMKTEGGAPAKLFGFVARKQGSTTDNACHLFAELDPNQPASAIVNFVSKVMLNAGQKR

SEQ ID NO: 87666 - protein, 1721 aa, Homo sapiens; identical to SEQ ID NO: 87662
  Payload ID: 17539
  Gene Symbol: TNS1
  Gene Name: tensin 1
  ENSP ID: ENSP00000484271

SEQ ID NO: 87667 - protein, 1409 aa, Homo sapiens
  Payload ID: 17540
  Gene Symbol: TNS2
  Gene Name: tensin 2
  Uniprot ID: Q63HR2
  ENSP ID: ENSP00000319684
MKSSGPVERLLRALGRRDSSRAASRPRKAEPHSFREKVFRKKPPVCAVCKVTIDGTGVSCRVCKVATHRKCEAKVTSACQALPPVELRRNTAPVRRIEHLGSTKSLNHSKQRSTLPRSFSLDPLMERRWDLDLTYVTERILAAAFPARPDEQRHRGHLRELAHVLQSKHRDKYLLFNLSEKRHDLTRLNPKVQDFGWPELHAPPLDKLCSICKAMETWLSADPQHVVVLYCKGNKGKLGVIVSAYMHYSKISAGADQALATLTMRKFCEDKVATELQPSQRRYISYFSGLLSGSIRMNSSPLFLHYVLIPMLPAFEPGTGFQPFLKIYQSMQLVYTSGVYHIAGPGPQQLCISLEPALLLKGDVMVTCYHKGGRGTDRTLVFRVQFHTCTIHGPQLTFPKDQLDEAWTDERFPFQASVEFVFSSSPEKIKGSTPRNDPSVSVDYNTTEPAVRWDSYENFNQHHEDSVDGSLTHTRGPLDGSPYAQVQRPPRQTPPAPSPEPPPPPMLSVSSDSGHSSTLTTEPAAESPGRPPPTAAERQELDRLLGGCGVASGGRGAGRETAILDDEEQPTVGGGPHLGVYPGHRPGLSRHCSCRQGYREPCGVPNGGYYRPEGTLERRRLAYGGYEGSPQGYAEASMEKRRLCRSLSEGLYPYPPEMGKPATGDFGYRAPGYREVVILEDPGLPALYPCPACEEKLALPTAALYGLRLEREAGEGWASEAGKPLLHPVRPGHPLPLLLPACGHHHAPMPDYSCLKPPKAGEEGHEGCSYTMCPEGRYGHPGYPALVTYSYGGAVPSYCPAYGRVPHSCGSPGEGRGYPSPGAHSPRAGSISPGSPPYPQSRKLSYEIPTEEGGDRYPLPGHLASAGPLASAESLEPVSWREGPSGHSTLPRSPRDAPCSASSELSGPSTPLHTSSPVQGKESTRRQDTRSPTSAPTQRLSPGEALPPVSQAGTGKAPELPSGSGPEPLAPSPVSPTFPPSSPSDWPQERSPGGHSDGASPRSPVPTTLPGLRHAPWQGPRGPPDSPDGSPLTPVPSQMPWLVASPEPPQSSPTPAFPLAASYDTNGLSQPPLPEKRHLPGPGQQPGPWGPEQASSPARGISHHVTFAPLLSDNVPQTPEPPTQESQSNVKFVQDTSKFWYKPHLSRDQAIALLKDKDPGAFLIRDSHSFQGAYGLALKVATPPPSAQPWKGDPVEQLVRHFLIETGPKGVKIKGCPSEPYFGSLSALVSQHSISPISLPCCLRIPSKDPLEETPEAPVPTNMSTAADLLRQGAACSVLYLTSVETESLTGPQAVARASSAALSCSPRPTPAVVHFKVSAQGITLTDNQRKLFFRRHYPVNSITFSSTDPQDRRWTNPDGTTSKIFGFVAKKPGSPWENVCHLFAELDPDQPAGAIVTFITKVLLGQRK

SEQ ID NO: 87668 - protein, 1419 aa, Homo sapiens
  Payload ID: 17540
  Gene Symbol: TNS2
  Gene Name: tensin 2
  Uniprot ID: Q63HR2
  ENSP ID: ENSP00000319756
MDGGGVCVGRGDLLSSPQALGQLLRKESRPRRAMKPRKAEPHSFREKVFRKKPPVCAVCKVTIDGTGVSCRVCKVATHRKCEAKVTSACQALPPVELRRNTAPVRRIEHLGSTKSLNHSKQRSTLPRSFSLDPLMERRWDLDLTYVTERILAAAFPARPDEQRHRGHLRELAHVLQSKHRDKYLLFNLSEKRHDLTRLNPKVQDFGWPELHAPPLDKLCSICKAMETWLSADPQHVVVLYCKGNKGKLGVIVSAYMHYSKISAGADQALATLTMRKFCEDKVATELQPSQRRYISYFSGLLSGSIRMNSSPLFLHYVLIPMLPAFEPGTGFQPFLKIYQSMQLVYTSGVYHIAGPGPQQLCISLEPALLLKGDVMVTCYHKGGRGTDRTLVFRVQFHTCTIHGPQLTFPKDQLDEAWTDERFPFQASVEFVFSSSPEKIKGSTPRNDPSVSVDYNTTEPAVRWDSYENFNQHHEDSVDGSLTHTRGPLDGSPYAQVQRPPRQTPPAPSPEPPPPPMLSVSSDSGHSSTLTTEPAAESPGRPPPTAAERQELDRLLGGCGVASGGRGAGRETAILDDEEQPTVGGGPHLGVYPGHRPGLSRHCSCRQGYREPCGVPNGGYYRPEGTLERRRLAYGGYEGSPQGYAEASMEKRRLCRSLSEGLYPYPPEMGKPATGDFGYRAPGYREVVILEDPGLPALYPCPACEEKLALPTAALYGLRLEREAGEGWASEAGKPLLHPVRPGHPLPLLLPACGHHHAPMPDYSCLKPPKAGEEGHEGCSYTMCPEGRYGHPGYPALVTYSYGGAVPSYCPAYGRVPHSCGSPGEGRGYPSPGAHSPRAGSISPGSPPYPQSRKLSYEIPTEEGGDRYPLPGHLASAGPLASAESLEPVSWREGPSGHSTLPRSPRDAPCSASSELSGPSTPLHTSSPVQGKESTRRQDTRSPTSAPTQRLSPGEALPPVSQAGTGKAPELPSGSGPEPLAPSPVSPTFPPSSPSDWPQERSPGGHSDGASPRSPVPTTLPGLRHAPWQGPRGPPDSPDGSPLTPVPSQMPWLVASPEPPQSSPTPAFPLAASYDTNGLSQPPLPEKRHLPGPGQQPGPWGPEQASSPARGISHHVTFAPLLSDNVPQTPEPPTQESQSNVKFVQDTSKFWYKPHLSRDQAIALLKDKDPGAFLIRDSHSFQGAYGLALKVATPPPSAQPWKGDPVEQLVRHFLIETGPKGVKIKGCPSEPYFGSLSALVSQHSISPISLPCCLRIPSKDPLEETPEAPVPTNMSTAADLLRQGAACSVLYLTSVETESLTGPQAVARASSAALSCSPRPTPAVVHFKVSAQGITLTDNQRKLFFRRHYPVNSITFSSTDPQDRRWTNPDGTTSKIFGFVAKKPGSPWENVCHLFAELDPDQPAGAIVTFITKVLLGQRK

SEQ ID NO: 87669 - protein, 1285 aa, Homo sapiens
  Payload ID: 17540
  Gene Symbol: TNS2
  Gene Name: tensin 2
  Uniprot ID: Q63HR2
  ENSP ID: ENSP00000369232
MERRWDLDLTYVTERILAAAFPARPDEQRHRGHLRELAHVLQSKHRDKYLLFNLSEKRHDLTRLNPKVQDFGWPELHAPPLDKLCSICKAMETWLSADPQHVVVLYCKGNKGKLGVIVSAYMHYSKISAGADQALATLTMRKFCEDKVATELQPSQRRYISYFSGLLSGSIRMNSSPLFLHYVLIPMLPAFEPGTGFQPFLKIYQSMQLVYTSGVYHIAGPGPQQLCISLEPALLLKGDVMVTCYHKGGRGTDRTLVFRVQFHTCTIHGPQLTFPKDQLDEAWTDERFPFQASVEFVFSSSPEKIKGSTPRNDPSVSVDYNTTEPAVRWDSYENFNQHHEDSVDGSLTHTRGPLDGSPYAQVQRPPRQTPPAPSPEPPPPPMLSVSSDSGHSSTLTTEPAAESPGRPPPTAAERQELDRLLGGCGVASGGRGAGRETAILDDEEQPTVGGGPHLGVYPGHRPGLSRHCSCRQGYREPCGVPNGGYYRPEGTLERRRLAYGGYEGSPQGYAEASMEKRRLCRSLSEGLYPYPPEMGKPATGDFGYRAPGYREVVILEDPGLPALYPCPACEEKLALPTAALYGLRLEREAGEGWASEAGKPLLHPVRPGHPLPLLLPACGHHHAPMPDYSCLKPPKAGEEGHEGCSYTMCPEGRYGHPGYPALVTYSYGGAVPSYCPAYGRVPHSCGSPGEGRGYPSPGAHSPRAGSISPGSPPYPQSRKLSYEIPTEEGGDRYPLPGHLASAGPLASAESLEPVSWREGPSGHSTLPRSPRDAPCSASSELSGPSTPLHTSSPVQGKESTRRQDTRSPTSAPTQRLSPGEALPPVSQAGTGKAPELPSGSGPEPLAPSPVSPTFPPSSPSDWPQERSPGGHSDGASPRSPVPTTLPGLRHAPWQGPRGPPDSPDGSPLTPVPSQMPWLVASPEPPQSSPTPAFPLAASYDTNGLSQPPLPEKRHLPGPGQQPGPWGPEQASSPARGISHHVTFAPLLSDNVPQTPEPPTQESQSNVKFVQDTSKFWYKPHLSRDQAIALLKDKDPGAFLIRDSHSFQGAYGLALKVATPPPSAQPWKGDPVEQLVRHFLIETGPKGVKIKGCPSEPYFGSLSALVSQHSISPISLPCCLRIPSKDPLEETPEAPVPTNMSTAADLLRQGAACSVLYLTSVETESLTGPQAVARASSAALSCSPRPTPAVVHFKVSAQGITLTDNQRKLFFRRHYPVNSITFSSTDPQDRRWTNPDGTTSKIFGFVAKKPGSPWENVCHLFAELDPDQPAGAIVTFITKVLLGQRK
